United States Patent Application Publication US 2021/0260178 A1 - sequence listing, part 23

SEQ ID NO: 37866 - RNA, 1655 nt, Artificial Sequence
  mRNA product Design i-3 (hSL-A64-N5) comprising derived and/or modified sequence from LASV(Togo/2016/7082;Clade VI)__AMR44577__GPCmut10 (opt1)
aggagaaagcuuaccaugggccagaucaucaccuucuuccaggaggugccccacgucaucgaggaggugaugaacaucgugcugaucgcccucagccugcuggccauccucaagggggucuacaacguggcgaccugcggcaucaucgggcuggugacguuccuguuccucugcggccgcuccugcagccugaucuacaagggguccuacgagcugcagacccucgagcugaacauggagacccugaacaugugcaugccgcucagcugcaccaagaacuccagccaccacuacauccgggucggcaacgagacgggccuggagcugacccucaccaacaccuccaucaucaaccacaaguucugcaaccugagcgacgcccacaagcgcaaccuguacgaccacgcccucauguccauccugagcacguuccaccuguccauccccaacuucaaccaguacgaggccaugagcugcgacuucaacgggggcaagaucuccgugcaguacaaccucagccacgccuacgcgguggacgccgccgagcacugcgggaccgucgccaacggcgugcugcagaccuucaugcggauggcguggggcggguccuacaucgcccuggacagcggccgcgggaacugggacugcaucaugaccuccuaccaguaccucaucauccagaacacgaccugggaggaccacugccaguucagccggcccucccccaucggcuaccuggggcugcucagccagcgcacccgggacaucuacaucagccgccggcugcugggcaccuucacguggacccucuccgacagcgagggcaacgagacccccgggggcuacugccugacccgcuggaugcugaucgaggccgagcucaagugcuucgggaacacggccguggccaagugcaacgagaagcacgacgaggaguucugcgacaugcugcggcuguucgacuucugcaagcaggcgauccagcgccucaaguccgaggcccagaugagcauccagcugaucaacaaggccgucaacgcccugaucaacgaccagcucaucaugaagaaccaccuccgggacaugaugggcauccccuacugcaacuacuccaaguacugguaccugaaccacaccagcuccgggcgcaccagccugcccaagugcuggcugguguccaacggcagcuaccugaacgagacccacuucuccgacgacaucgagcagcaggccgacaacaugaucacggagaugcuccagaaggaguacaucgaccggcagggcaagaccccgcuggggcugguggaccuguucgucuucagcaccuccuucuaccucaucagcaucuuccugcaccugaucaagaucccgacccaccgccacaucgugggcaagcccugccccaagccccaccggcucaaccacauggggaucugcuccugcggccuguacaagcagccgggggugcccacgcgcuggaagcggugaggacuaguuauaagacugacuagcccgaugggccucccaacgggcccuccuccccuccuugcaccgagauuaaucaaaggcucuuuucagagccaccaaaaaaaaaaaaaaaaaaaaaaaaaaaaaaaaaaaaaaaaaaaaaaaaaaaaaaaaaaaaaaaaagaauu

SEQ ID NO: 37867 - RNA, 1655 nt, Artificial Sequence
  mRNA product Design i-3 (hSL-A64-N5) comprising derived and/or modified sequence from LASV(KAK-428;Clade n.d. (VII))__ANH09740__GPCmut10 (opt1)
aggagaaagcuuaccaugggccagaucgugaccuucuuccaggaggucccccacgugaucgaggaggugaugaacaucguccugaucgcccucagccugcuggccauccucaaggggcuguacaacuucgcgaccugcggcgugaucgggcugaucacguuccuccugcugugcggccgcuccugcagcgccaccuacaaggggcaguacgagcuccagacccuggagcugaacauggagucccucaacaugugcaugccgcugagcugcaccaagaacaacucccaccacuacauccgggccggcaacaacacgggccuggagcucacccugaccaacaccagcaucaucucccacaaguucugcaaccugagcgacgcccacaagaagaaccucuacgaccacacgcugauguccaucaucaccaccuuccaccugagcauccccaacuucaaccaguacgaggccauguccugcgacuucaacgggggcaagaucagcauccaguacaaccucucccacagcuacgcgggggacgccgcccagcacugcggcaccguggccaacgggguccugcagacguucaugcgcauggcguggggcggcuccuaccuggcccucgacagcgggcggcgcggcugggacugcaucaucuccagcuaccaguaccugaucauccagaacaccaccugggacgaccacugccaguucucccggcccagccccaucggguaccugggcuucgugagccagaagacccgcgacaucuacaucucccggcgccuccugggcacguucaccuggacccugagcgacuccgaggggcacgacaugccgggcggguacugccucacccgguggaugcugaucgaggccgaccugaagugcuucggcaacacggccguggccaagugcaacgagaagcacgacgaggaguucugcgacauguggcgccucuucgacuucugcaagcaggcgauccagcggcugaaggccgaggcccagaugaacauccagcugaucaacaaggccgucaacgcccucaucaacgaccagcugaugaugaagaaccaccuccgcgacaucauggggauccccuacugcaacuacagcaaguucugguaccugaacaacaccaccaccggccggacgucccugccccgcugcuggcugaucagcaacggcuccuaccucaacgagacccacuucagcgacgacaucgagcagcaggcggacaacaugaucaccgagaugcugcagaaggaguacauggaccggcaggggaagacgccccugggccucguggaccuguucguguucuccaccagcuucuaccugaucaccaucuuccugcaccucgucaagaucccgacccaccgccacaucguggggaagcccugccccaagccccaccggcugaaccacaugggcaucugcuccugcgggcuguacaagcagccgggcgugcccguccgcuggaagcggugaggacuaguuauaagacugacuagcccgaugggccucccaacgggcccuccuccccuccuugcaccgagauuaaucaaaggcucuuuucagagccaccaaaaaaaaaaaaaaaaaaaaaaaaaaaaaaaaaaaaaaaaaaaaaaaaaaaaaaaaaaaaaaaaagaauu

SEQ ID NO: 37868 - RNA, 1655 nt, Artificial Sequence; identical to SEQ ID NO: 37862
  mRNA product Design i-3 (hSL-A64-N5) comprising derived and/or modified sequence from LASV(Pinneo-NIG-1969;Clade I)__AIT17836__GPCmut10 (opt1)

SEQ ID NO: 37869 - RNA, 1655 nt, Artificial Sequence
  mRNA product Design i-3 (hSL-A64-N5) comprising derived and/or modified sequence from LASV(ISTH0009-NIG-2011;Clade II)__AIT17404__GPCmut10 (opt1)
aggagaaagcuuaccaugggccagaucaucaccuucuuccaggaggugccccacgucaucgaggaggugaugaacaucgugcugaucgcccucagccugcuggccauccucaaggggaucuacaacgucgcgaccugcggccuguucgggcugguguccuuccuccugcugugcggccgcagcugcuccacgaccuacaaggggguguacgagcuccagacccuggagcuggacauggccagccucaacaugugcaugccgcuguccugcaccaagaacaacagccaccacuacaucauggucggcaacgagacgggccuggagcucacccugaccaacaccuccaucaucaaccacaaguucugcaaccugagcgacgcccacaagaagaaccucuacgaccacgcccugauguccaucaucagcacguuccaccuguccauccccaacuucaaccaguacgaggccaugagcugcgacuucaacgggggcaagaucuccgugcaguacaaccucagccacgcguacgccguggacgccgccaaccacugcgggaccaucgcgaacggcguccugcagaccuucaugcggauggccuggggcggguccuacaucgcccuggacagcggcaagggguccugggacugcaucaugaccagcuaccaguaccucaucauccagaacacgaccugggaggaccacugccaguucucccgccccagccccaucggcuaccuggggcugcucagccagcggacccgcgacaucuacaucucccggcgccugcugggcaccuucacguggacccucagcgacuccgagggcaacgagacccccgggggcuacugccugacccgguggaugcugaucgaggccgagcucaagugcuucgggaacacggccguggcgaagugcaacgagaagcacgacgaggaguucugcgacaugcugcgccuguucgacuucugcaagcaggccauccggcgccucaagaccgaggcccagaugagcauccagcugaucaacaaggccgugaacgcccugaucaacgaccagcucaucaugaagaaccaccuccgggacaucaugggcauccccuacugcaacuacuccaaguacugguaccugaaccacaccgucaccgggaagacgagccugccccgcugcuggcugguguccaacggcagcuaccugaacgagacccacuucuccgacgacaucgagcagcaggcggacaacaugaucaccgagcuccugcagaaggaguacauggaccggcagggcaagaccccgcuggggcugguggaccucuucgucuucagcacguccuucuaccugaucagcaucuuccugcaccucaucaagaucccgacccaccgccacaucaccggcaagcccugccccaagccccaccggcugaaccacauggggaucugcuccugcggccuguacaagcacccgggggugcccgugaaguggaagcgcugaggacuaguuauaagacugacuagcccgaugggccucccaacgggcccuccuccccuccuugcaccgagauuaaucaaaggcucuuuucagagccaccaaaaaaaaaaaaaaaaaaaaaaaaaaaaaaaaaaaaaaaaaaaaaaaaaaaaaaaaaaaaaaaaagaauu

SEQ ID NO: 37870 - RNA, 1655 nt, Artificial Sequence
  mRNA product Design i-3 (hSL-A64-N5) comprising derived and/or modified sequence from LASV(ISTH2010-NIG-2012;Clade II)__AIT17482__GPCmut10 (opt1)
aggagaaagcuuaccaugggccagaucaucaccuucuuccaggaggugccccacgucaucgaggaggugaugaacaucgugcugaucgcccucagccugcuggccauccucaaggggaucuacaacgucgcgaccugcggccuguucgggcugguguccuuccuccugcugugcggccgcagcugcuccacgaccuacaaggggguguacgagcuccagacccuggagcuggacauggccagccucaacaugugcaugccgcuguccugcaccaagaacaacagccaccacuacaucauggucggcaacgagacgggccuggagcucacccugaccaacaccuccaucaucaaccacaaguucugcaaccugagcgacgcccacaagaagaaccucuacgaccacgcccugauguccaucaucagcacguuccaccuguccauccccaacuucaaccaguacgaggccaugagcugcgacuucaacgggggcaagaucuccgugcaguacaaccucagccacgcguacgccguggacgccgccaaccacugcgggaccaucgcgaacggcguccugcagaccuucaugcggauggccuggggcggguccuacaucgcccuggacagcggcaagggguccugggacugcaucaugaccagcuaccaguaccucaucauccagaacaucacgugggaggaccacugccaguucucccgccccagccccaucggcuaccuggggcugcucagccagcggacccgcgacaucuacaucucccggcgccugcugggcaccuucaccuggacgcucagcgacuccgagggcaacgagacccccgggggcuacugccugacccgguggaugcugaucgaggccgagcucaagugcuucgggaacaccgccguggcgaagugcaacgagaagcacgacgaggaguucugcgacaugcugcgccuguucgacuucugcaagcaggccauccggcgccucaagacggaggcccagaugagcauccagcugaucaacaaggccgugaacgcccugaucaacgaccagcucaucaugaagaaccaccuccgggacaucaugggcauccccuacugcaacuacuccaaguacugguaccugaaccacaccgucaccgggaagaccagccugccccgcugcuggcugguguccaacggcagcuaccugaacgagacgcacuucuccgacgacaucgagcagcaggcggacaacaugaucaccgagcuccugcagaaggaguacaucgaccggcagggcaagaccccgcuggggcugguggaccucuucgucuucagcaccuccuucuaccugaucagcaucuuccugcaccucgugaagaucccgacgcaccgccacguggucggcaagcccugccccaagccccaccggcugaaccacauggggaucugcuccugcggccuguacaagcacccgggggugcccgugaaguggaagcgcugaggacuaguuauaagacugacuagcccgaugggccucccaacgggcccuccuccccuccuugcaccgagauuaaucaaaggcucuuuucagagccaccaaaaaaaaaaaaaaaaaaaaaaaaaaaaaaaaaaaaaaaaaaaaaaaaaaaaaaaaaaaaaaaaagaauu

SEQ ID NO: 37871 - RNA, 1655 nt, Artificial Sequence
  mRNA product Design i-3 (hSL-A64-N5) comprising derived and/or modified sequence from LASV(Lassa virus/H.sapiens-wt/NGA/2015/ISTH_0543;Clade II)__AVO03639__GPCmut10 (opt1)
aggagaaagcuuaccaugggccagaucaucaccuucuuccaggaggugccccacgucaucgaggaggugaugaacaucgugcugaucgcccucagccugcuggccauccucaaggggaucuacaacgucgcgaccugcggccuguucgggcugguguccuuccuccugcugugcggccgcagcugcuccacgaccuacaaggggguguacgagcuccagacccuggagcuggacauggccaaccucaacaugugcaugccgcugagcugcaccaagaacaacucccaccacuacaucauggucggcaacgagacgggccuggagcucacccugaccaacaccagcaucaucaaccacaaguucugcaaccuguccgacgcccacaagaagaaccucuacgaccacgcccugaugagcaucaucuccacguuccaccugagcauccccaacuucaaccaguacgaggccauguccugcgacuucaacgggggcaagaucagcgugcaguacaaccucucccacaccuacgcgguggacgccgccaaccacugcgggaccaucgccaacggcguccugcagaccuucaugcggauggcguggggcgggagcuacaucgcccuggacuccggcaaggggagcugggacugcaucaugacguccuaccaguaccucgugauccagaacaccaccugggaggaccacugccaguucagccgccccucccccaucggcuaccuggggcugcucagccagcggacccgcgacaucuacaucagccggcgccugcugggcacguucaccuggacccucuccgacagcgagggcaacgagacccccgggggcuacugccugacgcgguggaugcugaucgaggccgagcucaagugcuucgggaacaccgccguggccaagugcaacgagaagcacgacgaggaguucugcgacaugcugcgccuguucgacuucugcaagcaggcgauccggcgccucaagaccgaggcccagauguccauccagcugaucaacaaggccgucaacgcccugaucaacgaccagcucaucaugaagaaccaccuccgggacaucaugggcaucccguacugcaacuacagcaaguacugguaccugaaccacaccgugacggggaagaccucccugccccgcugcuggcuggugagcaacggcuccuaccugaacgagacccacuucagcgacgacaucgagcagcaggccgacaacaugaucaccgagcuccugcagaaggaguacaucgaccggcagggcaagacgccccuggggcuggucgaccucuucguguucuccaccagcuucuaccugaucuccaucuuccugcaccucgugaagaucccgacccaccgccacaucaccggcaagcccugccccaagccccaccggcugaaccacauggggaucugcagcugcggccuguacaagcacccggggguccccgugaaguggaagcgcugaggacuaguuauaagacugacuagcccgaugggccucccaacgggcccuccuccccuccuugcaccgagauuaaucaaaggcucuuuucagagccaccaaaaaaaaaaaaaaaaaaaaaaaaaaaaaaaaaaaaaaaaaaaaaaaaaaaaaaaaaaaaaaaaagaauu

SEQ ID NO: 37872 - RNA, 1655 nt, Artificial Sequence
  mRNA product Design i-3 (hSL-A64-N5) comprising derived and/or modified sequence from LASV(Lassa virus/H.sapiens-wt/NGA/2016/ISTH_0009;Clade II)__AVO03571__GPCmut10 (opt1)
aggagaaagcuuaccaugggccagaucaucaccuucuuccaggaggugccccacgucaucgaggaggugaugaacaucgugcugaucgcccucagccugcuggccauccucaaggggaucuacaacgucgcgaccugcggccugcuggggcucguguccuuccugcugcucugcggccgcagcugcuccacgaccuacaaggggguguacgagcugcagacccuggagcucgacauggccagccugaacaugugcaugccgcuguccugcaccaagaacaacagccaccacuacaucauggucggcaacgagacgggccucgagcugacccugaccaacaccuccaucaucaaccacaaguucugcaaccucagcgacgcccacaagaagaaccuguacgaccacgcccugauguccaucaucagcacguuccaccucuccauccccaacuucaaccaguacgaggccaugagcugcgacuucaacgggggccggaucuccgugcaguacaaccugagccacuccuacgcgguggacgccgccaaccacugcgggaccaucgccaacggcguccugcagaccuucaugcgcauggcguggggcgggagcuacaucgcccucgacuccggcaaggggagcugggacugcaucaugaccuccuaccaguaccugaucauccagaacacgaccugggaggaccacugccaguucagccggcccagccccaucggcuaccuggggcuccugucccagcgcacccgggacaucuacaucagccgccggcugcucggcaccuucacguggacccuguccgacagcgagggcaacgagacccccgggggcuacugccugacccgcuggaugcucaucgaggccgagcugaagugcuucgggaacacggccguggccaagugcaacgagaagcacgacgaggaguucugcgacaugcugcggcuguucgacuucugcaagcaggcgauccgccggcugaagaccgaggcccagauguccauccagcugaucaacaaggccgugaacgcccucaucaacgaccagcugaucaugaagaaccaccuccgcgacaucaugggcauccccuacugcaacuacagcaaguacugguaccucaaccacaccgucaccgggaagacgucccugccccggugcuggcuggugagcaacggcuccuaccucaacgagacccacuucagcgacgacaucgagcagcaggccgacaacaugaucaccgagcugcugcagaaggaguacaucgaccgccagggcaagaccccgcuggggcucguggaccuguucgucuucuccacgagcuucuaccugaucuccaucuuccuccaccuggugaagaucccgacccaccggcacaucaccggcaagcccugccccaagccccaccgccugaaccacauggggaucugcagcugcggccucuacaaccacccgggggugcccgucaaguggaagcggugaggacuaguuauaagacugacuagcccgaugggccucccaacgggcccuccuccccuccuugcaccgagauuaaucaaaggcucuuuucagagccaccaaaaaaaaaaaaaaaaaaaaaaaaaaaaaaaaaaaaaaaaaaaaaaaaaaaaaaaaaaaaaaaaagaauu

SEQ ID NO: 37873 - RNA, 1655 nt, Artificial Sequence
  mRNA product Design i-3 (hSL-A64-N5) comprising derived and/or modified sequence from LASV(Lassa virus/H.sapiens-wt/NGA/2016/ISTH_0017;Clade II)__AVO03567__GPCmut10 (opt1)
aggagaaagcuuaccaugggccagaucaucaccuucuuccaggaggugccccacgucaucgaggaggugaugaacaucgugcugaucgcccucagccugcuggccauccucaaggggaucuacaacgucgcgaccugcggccuguucgggcugguguccuuccuccugcugugcggccgcagcugcuccacgaccuacaaggggguguacgagcuccagacccuggagcuggacauggccagccucaacaugugcaugccgcuguccugcaccaagaacaacagccaccacuacaucauggucggcaacgagacgggccuggagcucacccugaccaacaccuccaucaucaaccacaaguucugcaaccugagcgacgcccacaagaagaaccucuacgaccacgcccugauguccaucaucagcacguuccaccuguccauccccaacuucaaccaguacgaggccaugagcugcgacuucaacgggggcaagaucuccgugcaguacaaccucagccacaccuacgcgaucgacgccgccaaccacugcgggaccaucgccaacggcgugcugcagaccuucaugcggauggcguggggcggguccuacaucgcccuggacagcggcaagggguccugggacugcaucaugacgagcuaccaguaccucaucauccagaacaccaccugggaggaccacugccaguucucccgccccagccccaucggcuaccuggggcugcucagccagcggacccgcgacaucuacaucucccggcgccugcugggcacguucaccuggacccucagcgacuccgagggcaacgagacccccgggggcuacugccugacgcgguggaugcugaucgaggccgagcucaagugcuucgggaacaccgccgucgccaagugcaacgagaagcacgacgaggaguucugcgacaugcugcgccuguucgacuucugcaagcaggcgauccggcgccucaagaccgaggcccagaugagcauccagcugaucaacaaggccgugaacgcccugaucaacgaccagcucaucaugaagaaccaccuccgggacaucaugggcaucccguacugcaacuacuccaaguacugguaccugaaccacaccgugacggggaagaccagccugccccgcugcuggcuggucuccaacggcagcuaccugaacgagacccacuucuccgacgacaucgagcagcaggccgacaacaugaucaccgagcuccugcagaaggaguacauggaccggcagggcaagacgccccuggggcugguggaccucuucguguucagcaccuccuucuaccugaucagcaucuuccugcaccucguccgcaucccgacccaccggcacgugaucggcaagcccugccccaagccccaccgccugaaccacauggggaucugcuccugcggccuguacaagcacccgggggugcccgucaaguggaagcggugaggacuaguuauaagacugacuagcccgaugggccucccaacgggcccuccuccccuccuugcaccgagauuaaucaaaggcucuuuucagagccaccaaaaaaaaaaaaaaaaaaaaaaaaaaaaaaaaaaaaaaaaaaaaaaaaaaaaaaaaaaaaaaaaagaauu

SEQ ID NO: 37874 - RNA, 1655 nt, Artificial Sequence
  mRNA product Design i-3 (hSL-A64-N5) comprising derived and/or modified sequence from LASV(Lassa virus/H.sapiens-wt/NGA/2018/ISTH_0959;Clade II)__AVV65099__GPCmut10 (opt1)
aggagaaagcuuaccaugggccagaucaucaccuucuuccaggaggugccccacgucaucgaggaggugaugaacaucgugcugaucgcccucagccugcuggccauccucaaggggaucuacaacgucgugaccugcggccuguucgggcugguguccuuccuccugcugugcggccgcagcugcuccacgaccuacaagggggucuacgagcuccagacccuggagcuggacauggcgagccucaacaugugcaugccgcuguccugcaccaagaacaacagccaccacuacaucauggugggcaacgagacgggccuggagcucacccugaccaacaccuccaucaucaaccacaaguucugcaaccugagcgacgcccacaagaagaaccucuacgaccacgcccugauguccaucaucagcacguuccaccuguccauccccaacuucaaccaguacgaggccaugagcugcgacuucaacgggggcaagaucuccgugcaguacaaccucagccacgccuacgcgaucgacgccgccaaccacugcgggaccaucgccaacggcguccugcagaccuucaugcggauggcguggggcggguccuacaucgcccuggacagcggcaagggguccugggacugcaucaugaccagcuaccaguaccucaucauccagaacacgaccugggaggaccacugccaguucucccgccccagccccaucggcuaccuggggcugcucagccagcggacccgcgacaucuacaucucccggcgccugcugggcaccuucacguggacccucagcgacuccgagggcaacgagacccccgggggcuacugccugacccgguggaugcugaucgaggccgagcucaagugcuucgggaacacggccguggccaagugcaacgagaagcacgacgaggaguucugcgacaugcugcgccuguucgacuucugcaagcaggcgauccggcgccucaagaccgaggcccagaugagcauccagcugaucaacaaggccgugaacgcccugaucaacgaccagcucaucaugaagaaccaccuccgggacaucaugggcauccccuacugcaacuacuccaaguacugguaccugaaccacaccgucaccgggaagacgagccugccccgcugcuggcugguguccaacggcagcuaccugaacgagacccacuucuccgacgacaucgagcagcaggccgacaacaugaucaccgagcuccugcagaaggaguacaucgaccggcagggcaagaccccgcuggggcugguggaccucuucgucuucagcacguccuucuaccugaucagcaucuuccugcaccucgugaagaucccgacccaccgccacgugaucggcaagcccugccccaagccccaccggcugaaccacauggggaucugcuccugcggccuguacaagcacccggggguccccgugaaguggaagcgcugaggacuaguuauaagacugacuagcccgaugggccucccaacgggcccuccuccccuccuugcaccgagauuaaucaaaggcucuuuucagagccaccaaaaaaaaaaaaaaaaaaaaaaaaaaaaaaaaaaaaaaaaaaaaaaaaaaaaaaaaaaaaaaaaagaauu

SEQ ID NO: 37875 - RNA, 1655 nt, Artificial Sequence
  mRNA product Design i-3 (hSL-A64-N5) comprising derived and/or modified sequence from LASV(LASV003-NIG-2008;Clade II)__AIT17580__GPCmut10 (opt1)
aggagaaagcuuaccaugggccagaucaucaccuucuuccaggaggugccccacgucaucgaggaggugaugaacaucgugcugaucgcccucagccugcuggccauccucaaggggaucuacaacgucgcgaccugcggccuguucgggcugguguccuuccuccugcugugcggccgcagcugcuccacgaccuacaaggggguguacgagcuccagacccuggagcuggacauggccagccucaacaugugcaugccgcuguccugcaccaagaacaacagccaccacuacaucauggucggcaacgagacgggccuggagcucacccugaccaacaccuccaucaucaaccacaaguucugcaaccugagcgacgcccacaagaagaaccucuacgaccacgcccugauguccaucaucagcacguuccaccuguccauccccaacuucaaccaguacgaggccaugagcugcgacuucaacgggggcaagaucuccgugcaguacaaccucagccacaccuacgcgguggacgccgccaaccacugcgggaccaucgccaacggcguccugcagaccuucaugcggauggcguggggcggguccuacaucgcccuggacagcggcaagggguccugggacugcaucaugacgagcuaccaguaccucaucauccagaacaccaccugggaggaccacugccaguucucccgccccagccccaucggcuaccuggggcugcucagccagcggacccgcgacaucuacaucucccggcgccugcugggcacguucaccuggacccucagcgacuccgagagcaacgagaccccgggcggguacugccugacgcgguggaugcugaucgaggccgagcucaagugcuucggcaacaccgccguggccaagugcaacgagaagcacgacgaggaguucugcgacaugcugcgccuguucgacuucugcaagcaggcgauccggcgccucaaggccgaggcccagauguccauccagcugaucaacaaggccgugaacgcccugaucaacgaccagcucaucaugaagaaccaccuccgggacaucauggggauccccuacugcaacuacagcaaguacugguaccugaaccacaccgucaccggccgcacgucccugccccggugcuggcuggugagcaacggguccuaccugaacgagacccacuucagcgacgacaucgagcagcaggcggacaacaugaucaccgagcuccugcagaaggaguacauggaccgccagggcaagacgccccugggccugguggaccucuucgucuucuccaccagcuucuaccugaucuccaucuuccugcaccucgugaagaucccgacccaccggcacgugaucgggaagcccugccccaagccccaccgccugaaccacaugggcaucugcagcugcgggcuguacaagcacccgggcguccccgugaaguggaagcggugaggacuaguuauaagacugacuagcccgaugggccucccaacgggcccuccuccccuccuugcaccgagauuaaucaaaggcucuuuucagagccaccaaaaaaaaaaaaaaaaaaaaaaaaaaaaaaaaaaaaaaaaaaaaaaaaaaaaaaaaaaaaaaaaagaauu

SEQ ID NO: 37876 - RNA, 1655 nt, Artificial Sequence
  mRNA product Design i-3 (hSL-A64-N5) comprising derived and/or modified sequence from LASV(LASV035-NIG-2009;Clade II)__AIT17588__GPCmut10 (opt1)
aggagaaagcuuaccaugggccagaucaucaccuucuuccaggaggugccccacgucaucgaggaggugaugaacaucgugcugaucgcccucagccugcuggccauccucaaggggaucuacaacgucgcgaccugcggccuguucgggcugguguccuuccuccugcugugcggccgcagcugcuccacgaccuacaaggggguguacgagcuccagacccuggagcuggacauggccagccucaacaugugcaugccgcuguccugcaccaagaacaacagccaccacuacaucauggucggcaacgagacgggccuggagcucacccugaccaacaccuccaucaucaaccacaaguucugcaaccugagcgacgcccacaagaagaaccucuacgaccacgcccugauguccaucaucagcacguuccaccuguccauccccaacuucaaccaguacgaggccaugagcugcgacuucaacgggggcaagaucuccgugcaguacaaccucagccacgcguacgccguggacgccgccaaccacugcgggaccaucgcgaacggcguccugcagaccuucaugcggauggccuggggcggguccuacaucgcccuggacagcggcaagggguccugggacugcaucaugaccagcuaccaguaccucaucauccagaacacgaccugggaggaccacugccaguucucccgccccagccccaucggcuaccuggggcugcucagccagcggacccgcgacaucuacaucucccggcgccugcugggcaccuucacguggacccucagcgacuccgagggcaacgagacccccgggggcuacugccugacccgguggaugcugaucgaggccgagcucaagugcuucgggaacacggccguggcgaagugcaacgagaagcacgacgaggaguucugcgacaugcugcgccuguucgacuucugcaagcaggccauccggcgccucaaggccgaggcccagaugagcauccagcugaucaacaaggccgugaacgcgcugaucaacgaccagcucaucaugaagaaccaccuccgggacaucaugggcauccccuacugcaacuacuccaaguacugguaccugaaccacaccgucaccgggaagaccagccugccccgcugcuggcugguguccaacggcagcuaccugaacgagacgcacuucuccgacgacaucgagcagcaggccgacaacaugaucaccgagcuccugcagaaggaguacaucgaccggcagggcaagaccccgcuggggcugguggaccucuucgucuucagcaccuccuucuaccugaucagcaucuuccugcaccucgugaagaucccgacgcaccgccacgugaucggcaagcccugccccaagccccaccggcugaaccacauggggaucugcuccugcggccuguacaagcacccggggguccccgugaaguggaagcgcugaggacuaguuauaagacugacuagcccgaugggccucccaacgggcccuccuccccuccuugcaccgagauuaaucaaaggcucuuuucagagccaccaaaaaaaaaaaaaaaaaaaaaaaaaaaaaaaaaaaaaaaaaaaaaaaaaaaaaaaaaaaaaaaaagaauu

SEQ ID NO: 37877 - RNA, 1655 nt, Artificial Sequence
  mRNA product Design i-3 (hSL-A64-N5) comprising derived and/or modified sequence from LASV(LASV1000-NIG-2009;Clade II)__AIT17782__GPCmut10 (opt1)
aggagaaagcuuaccaugggccagaucaucaccuucuuccaggaggugccccacgucaucgaggaggugaugaacaucgugcugaucgcccucagccugcuggccauccucaaggggaucuacaacgucgcgaccugcggccuguucgggcugguguccuuccuccugcugugcggccgcagcugcuccacgaccuacaaggggguguacgagcuccagacccuggagcuggacauggccagccucaacaugugcaugccgcuguccugcaccaagaacaacagccaccacuacaucauggucggcaacgagacgggccuggagcucacccugaccaacaccuccaucaucaaccacaaguucugcaaccugagcgacgcccacaagaagaaccucuacgaccacgcccugauguccaucaucagcacguuccaccuguccauccccaacuucaaccaguacgaggccaugagcugcgacuucaacgggggcaagaucuccgugcaguacaaccucagccacaccuacgcgguggacgccgccaaccacugcgggaccaucgccaacggcguccugcagaccuucaugcggauggcguggggcggguccuacaucgcccuggacagcggcaagggguccugggacugcaucaugacgagcuaccaguaccucaucauccagaacaccaccugggaggaccacugccaguucucccgccccagccccaucggcuaccuggggcugcucagccagcggacccgcgacaucuacaucucccggcgccugcugggcacguucaccuggacccucagcgacuccgagggcaacgagacccccgggggcuacugccugacgcgguggaugcugaucgaggccgagcucaagugcuucgggaacaccgccguggccaagugcaacgagaagcacgacgaggaguucugcgacaugcugcgccuguucgacuucugcaagcaggcgaucaagcggcucaagaccgaggcccagaugagcauccagcugaucaacaaggccgugaacgcccugaucaacgaccagcucaucaugaagaaccaccuccgcgacaucaugggcaucccguacugcaacuacuccaaguacugguaccugaaccacaccgucacggggaagaccagccugccccggugcuggcugguguccaacggcagcuaccugaacgagacccacuucuccgacgacaucgagcagcaggccgacaacaugaucaccgagcuccugcagaaggaguacaucgaccgccagggcaagacgccccuggggcugguggaccucuucgucuucagcaccuccuucuaccugaucagcaucuuccugcaccucgugaagaucccgacccaccggcacguggucggcaagcccugccccaagccccaccgccugaaccacauggggaucugcuccugcggccuguacaagcacccgggggugcccgugaaguggaagcggugaggacuaguuauaagacugacuagcccgaugggccucccaacgggcccuccuccccuccuugcaccgagauuaaucaaaggcucuuuucagagccaccaaaaaaaaaaaaaaaaaaaaaaaaaaaaaaaaaaaaaaaaaaaaaaaaaaaaaaaaaaaaaaaaagaauu

SEQ ID NO: 37878 - RNA, 1655 nt, Artificial Sequence
  mRNA product Design i-3 (hSL-A64-N5) comprising derived and/or modified sequence from LASV(LASV221-NIG-2010;Clade II)__AIT17624__GPCmut10 (opt1)
aggagaaagcuuaccaugggccagaucaucaccuucuuccaggaggugccccacgucaucgaggaggugaugaacaucgugcugaucgcccucagccugcuggccauccucaaggggaucuacaacgucgcgaccugcggccuguucgggcugguguccuuccuccugcugugcggccgcagcugcuccacgaccuacaaggggguguacgagcuccagacccuggagcuggacauggccagccucaacaugugcaugccgcuguccugcaccaagaacaacagccaccacuacaucauggucggcaacgagacgggccuggagcucacccugaccaacaccuccaucaucaaccacaaguucugcaaccugagcgacgcccacaagaagaaccucuacgaccacgcccugauguccaucaucagcacguuccaccuguccauccccaacuucaaccaguacgaggccaugagcugcgacuucaacgggggcaagaucuccgugcaguacaaccucagccacaccuacgcgaucgacgccgccaaccacugcgggaccaucgccaacggcgugcugcagaccuucaugcggauggcguggggcggguccuacaucgcccuggacagcggcaagggguccugggacugcaucaugacgagcuaccaguaccucaucauccagaacaccaccugggaggaccacugccaguucucccgccccagccccaucggcuaccuggggcugcucagccagcggacccgcgacaucuacaucucccggcgccugcugggcacguucaccuggacccucagcgacuccgagggcaacgagacccccgggggcuacugccugacgcgguggaugcugaucgaggccgagcucaagugcuucgggaacaccgccgucgccaagugcaacgagaagcacgacgaggaguucugcgacaugcugcgccuguucgacuucugcaagcaggcgauccggcgccucaagaccgaggcccagaugagcauccagcugaucaacaaggccgugaacgcccugaucaacgaccagcucaucaugaagaaccaccuccgggacaucaugggcaucccguacugcaacuacuccaaguacugguaccugaaccacaccgugacggggaagaccagccugccccgcugcuggcuggucuccaacggcagcuaccugaacgagacccacuucuccgacgacaucgagcagcaggccgacaacaugaucaccgagaugcuccagaaggaguacauggaccggcagggcaagacgccccuggggcugguggaccuguucguguucagcaccuccuucuaccucaucagcaucuuccugcaccuggucaagaucccgacccaccgccacgugaucggcaagcccugccccaagccccaccggcucaaccacauggggaucugcuccugcggccuguacaagcacccgggggugcccgucaaguggaagcgcugaggacuaguuauaagacugacuagcccgaugggccucccaacgggcccuccuccccuccuugcaccgagauuaaucaaaggcucuuuucagagccaccaaaaaaaaaaaaaaaaaaaaaaaaaaaaaaaaaaaaaaaaaaaaaaaaaaaaaaaaaaaaaaaaagaauu

SEQ ID NO: 37879 - RNA, 1655 nt, Artificial Sequence
  mRNA product Design i-3 (hSL-A64-N5) comprising derived and/or modified sequence from LASV(LASV237-NIG-2010;Clade II)__AIT17638__GPCmut10 (opt1)
aggagaaagcuuaccaugggccagaucaucaccuucuuccaggaggugccccacgucaucgaggaggugaugaacaucgugcugaucgcccucagccugcuggccauccucaaggggaucuacaacgucgcgaccugcggccuguucgggcugguguccuuccuccugcugugcggccgcagcugcuccacgaccuacaaggggguguacgagcuccagacccuggagcuggacauggccagccucaacaugugcaugccgcuguccugcaccaagaacaacagccaccacuacaucauggucggcaacgagacgggccuggagcucacccugaccaacaccuccaucaucaaccacaaguucugcaaccugagcgacgcccacaagaaggaccucuacgaccacgcccugauguccaucaucagcacguuccaccuguccauccccaacuucaaccaguacgaggccaugagcugcgacuucaacgggggcaagaucuccgugcaguacaaccucagccacaccuacgcgguggacgccgccaaccacugcgggaccaucgccaacggcguccugcagaccuucaugcggauggcguggggcggguccuacaucgcccuggacagcggcaagggguccugggacugcaucaugacgagcuaccaguaccucaucauccagaacaccaccugggaggaccacugccaguucucccgccccagccccaucggcuaccuggggcugcucagccagcggacccgcgacaucuacaucucccggcgccugcugggcacguucaccuggacccucagcgacuccgagggcaacgagacccccgggggcuacugccugacgcgguggaugcugaucgaggccgagcucaagugcuucgggaacaccgccguggccaagugcaacgagaagcacgacgaggaguucugcgacaugcugcgccuguucgacuucugcaagcaggcgauccggcgccucaagaccgaggcccagaugagcauccagcugaucaacaaggccgugaacgcccugaucaacgaccagcucaucaugaagaaccaccuccgggacaucaugggcaucccguacugcaacuacuccaaguacugguaccugaaccacaccgucacggggaagaccagccugccccgcugcuggcugguguccaacggcagcuaccugaacgagacccacuucuccgacgacaucgagcagcaggccgacaacaugaucaccgagcuccugcagaaggaguacauggaccggcagggcaagacgccccuggggcugguggaccucuucgucuucagcaccuccuucuaccugaucagcaucuuccugcaccucaucaagaucccgacccaccgccacaucaccggcaagcccugccccaagccccaccggcugaaccacauggggaucugcuccugcggccuguacaagcacccgggggugcccgugaaguggaagcgcugaggacuaguuauaagacugacuagcccgaugggccucccaacgggcccuccuccccuccuugcaccgagauuaaucaaaggcucuuuucagagccaccaaaaaaaaaaaaaaaaaaaaaaaaaaaaaaaaaaaaaaaaaaaaaaaaaaaaaaaaaaaaaaaaagaauu

SEQ ID NO: 37880 - RNA, 1655 nt, Artificial Sequence
  mRNA product Design i-3 (hSL-A64-N5) comprising derived and/or modified sequence from LASV(LASV253-NIG-2011;Clade II)__AIT17670__GPCmut10 (opt1)
aggagaaagcuuaccaugggccagaucaucaccuucuuccaggaggugccccacgucaucgaggaggugaugaacaucgugcugaucgcccucagccugcuggccauccucaaggggaucuacaacgucgcgaccugcggccuguucgggcugguguccuuccuccugcugugcggccgcagcugcuccacgaccuacaaggggguguacgagcuccagacccuggagcuggacauggccagccucaacaugugcaugccgcuguccugcaccaagaacaacagccaccacuacaucauggucggcaacgagacgggccuggagcucacccugaccaacaccuccaucaucaaccacaaguucugcaaccugagcgacgcccacaagaagaaccucuacgaccacgcccugauguccaucaucagcacguuccaccuguccauccccaacuucaaccaguacgaggccaugagcugcgacuucaacgggggcaagaucuccgugcaguacaaccucagccacaccuacgcgguggacgccgccaaccacugcgggaccaucgccaacggcguccugcagaccuucaugcggauggcguggggcggguccuacaucgcccuggacagcggcaagggguccugggacugcaucaugacgagcuaccaguaccucaucauccagaacaccaccugggaggaccacugccaguucucccgccccagccccaucggcuaccuggggcugcucagccagcggacccgcgacaucuacaucucccggcgccugcugggcacguucaccuggacccucagcgacuccgagggcaacgagacccccgggggcuacugccugacgcgguggaugcugaucgaggccgagcucaagugcuucgggaacaccgccguggccaagugcaacgagaagcacgacgaggaguucugcgacaugcugcgccuguucgacuucugcaagcaggcgauccggcgccucaaggccgaggcccagaugagcauccagcugaucaacaaggccgugaacgcccugaucaacgaccagcucaucaugaagaaccaccuccgggacaucaugggcauccccuacugcaacuacuccaaguacugguaccugaaccacaccgucaccgggcgcacgagccugccccggugcuggcugguguccaacggcagcuaccugaacgagacccacuucuccgacgacaucgagcagcaggcggacaacaugaucaccgagcuccugcagaaggaguacaucgaccgccagggcaagaccccgcuggggcugguggaccucuucgucuucagcacguccuucuaccugaucagcaucuuccugcaccucgugaagaucccgacccaccggcacaucaucggcaagcccugccccaagccccaccgccugaaccacauggggaucugcuccugcggccuguacaagcacccgggggugcccgucaaguggaagcggugaggacuaguuauaagacugacuagcccgaugggccucccaacgggcccuccuccccuccuugcaccgagauuaaucaaaggcucuuuucagagccaccaaaaaaaaaaaaaaaaaaaaaaaaaaaaaaaaaaaaaaaaaaaaaaaaaaaaaaaaaaaaaaaaagaauu

SEQ ID NO: 37881 - RNA, 1655 nt, Artificial Sequence
  mRNA product Design i-3 (hSL-A64-N5) comprising derived and/or modified sequence from LASV(LASV254-NIG-2011;Clade II)__AIT17674__GPCmut10 (opt1)
aggagaaagcuuaccaugggccagaucaucaccuucuuccaggaggugccccacgucaucgaggaggugaugaacaucgugcugaucgcccucagccugcuggccauccucaaggggaucuacaacgucgcgaccugcggccuguucgggcugguguccuuccuccugcugugcggccgcagcugcuccacgaccuacaaggggguguacgagcuccagacccuggagcuggacaugaccaaccucaacaugugcaugccgcugagcugcacgaagaacaacucccaccacuacaucauggucggcaacgagaccggccuggagcucacccugaccaacacgagcaucaucaaccacaaguucugcaaccuguccgacgcccacaagaagaaccucuacaaccacgcccugaugagcaucaucuccaccuuccaccugagcauccccaacuucaaccaguacgaggccauguccugcgacuucaacgggggcaagaucagcgugcaguacaaccucucccacagcuacgccguggacgcggccaaccacugcgggaccaucgccaacggcguccugcagaccuucaugcggauggccuggggcggguccuacaucgcgcuggacagcggcaaggggaacugggacugcaucaugacguccuaccaguaccucaucauccagaacaccaccugggaggaccacugccaguucagccgccccucccccaucggcuaccuggggcugcucagccagcggacccgcgacaucuacaucagccggcgccugcugggcacguucaccuggacccucuccgacagcgagggcaacgagacccccgggggcuacugccugacgcgguggaugcugaucgaggccgagcucaagugcuucgggaacaccgccguggccaagugcaacgagaagcacgacgaggaguucugcgacaugcugcgccuguucgacuucugcaagcaggccauccggcgccucaagaccgaggcgcaggccaacauccagcugaucaacaaggccgugaacgcccugaucaacgaccagcucaucaugaagaaccaccuccgggacaucaugggcaucccguacugcaacuacuccaaguacugguaccugaaccacaccgucacggggaagaccagccugccccgcugcuggcugguguccaacggcagcuaccugaacgagacccacuucuccgacgacaucgagcagcaggccgacaacaugaucaccgagcuccugcagaaggaguacauggaccggcagggcaagacgccccuggggcugguggaccucuucgucuucagcaccuccuucuaccugaucagcaucuuccugcaccucgugaagaucccgacccaccgccacgugaucggcaagcccugccccaagccccaccggcugaaccacauggggaucugcuccugcggccuguacaagcacccggggguccccgugaaguggaagcgcugaggacuaguuauaagacugacuagcccgaugggccucccaacgggcccuccuccccuccuugcaccgagauuaaucaaaggcucuuuucagagccaccaaaaaaaaaaaaaaaaaaaaaaaaaaaaaaaaaaaaaaaaaaaaaaaaaaaaaaaaaaaaaaaaagaauu

SEQ ID NO: 37882 - RNA, 1655 nt, Artificial Sequence
  mRNA product Design i-3 (hSL-A64-N5) comprising derived and/or modified sequence from LASV(Nig08-A19;Clade III)__ADU56618__GPCmut10 (opt1)
aggagaaagcuuaccaugggccagaucgugaccuucuuccaggaggucccccacgugaucgaggaggugaugaacaucguccugaucgcccucagcauccuggccauccugaaggggcucuacaacaucgcgaccugcggccugaucgggcuggugacguuccuccugcuguccggccgcagcugcuccaugaccuacaaggggguguacgagcuccagacccuggagcugaacaugaacacccucaacaugugcaugccgcugagcugcacgaagaacaacucccaccacuacaucauggucggcaacgagaccggccuggagcucacccugaccaacacgagccugcuccaccacaaguucugcaaccuguccgacgcccacaagaagaaccuguacgaccacacccucaugagcaucaucuccaccuuccaccugagcauccccaacuucaaccaguacgaggccauguccugcgacuucaacgggggcaagaucaccgugcaguacaaccugagccacuccuacgccaucgacgccgcgaaccacugcgggacgguggccaacggcguccuccagaccuucaugcggauggccuggggcgggagcuacaucgcccuggacuccggccgcgggaagugggacugcaucaugaccagcuaccaguaccugaucauccagaacaccacgugggaggaccacugccaguucucccggcccagccccaucggcuaccucgggcugcugucccagcgcacccgggacaucuacaucagccgccggcuccugggcaccuucaccuggacgcugagcgacuccgagggcaacgagacccccgggggcuacugccucacccgcuggaugcugaucgaggcggagcugaagugcuucgggaacaccgccguggccaagugcaacgagaagcacgacgaggaguucugcgacaugcuccggcuguucgacuucugcaagcaggccauccgccggcugaaggccgaggcgcagaugagcauccagcucaucaacaaggccgugaacgcccugaucaacgaccagcugaucaugaagaaccaccuccgcgacaucaugggcauccccuacugcaacuacuccaaguacugguaccugaaccacacgagcaccgggcggaccucccugccccgcugcuggcucgucagcaacggcuccuaccugaacgagacccacuucagcgacgacaucgagcagcaggccgacaacaugaucacggagaugcugcagaaggaguaccuggaccggcagggcaagaccccgcucgggcugguggaccuguucguguucuccaccagcuucuaccucaucuccaucuuccugcaccuggucaagaucccgacccaccgccacaucgugggcaagcccugccccaagccccaccggcucaaccacauggggaucugcagcugcggccuguacaagcagccgggggugcccguccgcuggaagcggugaggacuaguuauaagacugacuagcccgaugggccucccaacgggcccuccuccccuccuugcaccgagauuaaucaaaggcucuuuucagagccaccaaaaaaaaaaaaaaaaaaaaaaaaaaaaaaaaaaaaaaaaaaaaaaaaaaaaaaaaaaaaaaaaagaauu

SEQ ID NO: 37883 - RNA, 1658 nt, Artificial Sequence
  mRNA product Design i-3 (hSL-A64-N5) comprising derived and/or modified sequence from LASV(G1180-SLE-2010;Clade IV)__AIT17168__GPCmut10 (opt1)
aggagaaagcuuaccaugggccagaucgugaccuucuuccaggaggucccccacgugaucgaggaggugaugaacaucguccugaucgcccucagcauccuggccgugcugaaggggcucuacaacuucgcgaccugcggccugguggggcugcucacguuccugcugcucugcggccgcuccugcaccgccagccgguacaagggggucuacgagcugcagacccuggagcucaacauggagacccugaacaugugcaugccgcuguccugcacgaagaacaacagccaccacuacaucauggugggcaacgagaccggccucgagcugacccugaccaacacguccaucaucaaccacaaguucugcaaccucagcgacgcccacaagaagaaccuguacgaccacgcccugauguccaucaucagcaccuuccaccucuccauccccaacuucaaccaguacgaggccaugagcugcgacuucaacgggggcaagaucuccgugcaguacaaccugagccacuccuacgcgggggacgccgccaaccacugcggcaccgucgccaacggggugcugcagaccuucaugcgcauggcguggggcggcagcuacaucgcccucgacuccgggcacggcagcugggacugcaucaugacguccuaccaguaccugaucauccagaacaccaccugggaggaccacugccaguucagccggcccucccccaucggguaccugggccuccugagccagcgcacccgggacaucuacaucagccgccggcugcucggcacguucaccuggacccuguccgacagcgaggggaaggacaccccgggcggguacugccugacgcgcuggaugcucaucgaggccgagcugaagugcuucggcaacaccgccguggccaagugcaacgagaagcacgacgaggaguucugcgacaugcugcggcuguucgacuucugcaagcaggcgauccagcgccugaaggccgaggcccagauguccauccagcugaucaacaaggccgucaacgcccucaucaacgaccagcugaucaugaagaaccaccuccgggacaucauggggauccccuacugcaacuacagcaaguacugguaccucaaccacaccaccacgggcaagaccucccugcccaagugcuggcuggugagcaacggcuccuaccucaacgagacccacuucagcgacgacaucgagcagcaggcggacaacaugaucaccgagaugcugcagaaggaguacauggagcgccaggggaagacgccccugggccugguggaccucuucgucuucuccaccagcuucuaccugaucuccaucuuccugcaccucgugaagaucccgacccaccggcacaucgugggcaagagcugccccaagccccaccgccugaaccacauggggaucugcuccugcgggcuguacaagcagcccggcgucccggugaaguggaagcggugaggacuaguuauaagacugacuagcccgaugggccucccaacgggcccuccuccccuccuugcaccgagauuaaucaaaggcucuuuucagagccaccaaaaaaaaaaaaaaaaaaaaaaaaaaaaaaaaaaaaaaaaaaaaaaaaaaaaaaaaaaaaaaaaagaauu

SEQ ID NO: 37884 - RNA, 1658 nt, Artificial Sequence
  mRNA product Design i-3 (hSL-A64-N5) comprising derived and/or modified sequence from LASV(G1442-SLE-2011;Clade IV)__AIT17180__GPCmut10 (opt1)
aggagaaagcuuaccaugggccagaucgugaccuucuuccaggaggucccccacgugaucgaggaggugaugaacaucguccugaucgcccucagcauccuggccgugcugaaggggcucuacaacguggcgaccugcggccugaucgggcuggucaccuuccuccugcugugcggccgcuccugcaccaccacccucuacaaggggguguacgagcugcagacgcuggagcucaacauggagacccugaacaugugcaugccgcugagcugcaccaagaacaacucccaccacuacauccgggugggcaacgagaccggccucgagcugacgcugaccaacaccagcaucaucaaccacaaguucugcaaccucuccgacgcccacaagaagaaccuguacgaccacgcccugaugagcaucaucuccaccuuccaccucagcauccccaacuucaaccaguacgaggccauguccugcgacuucaacgggggcaagaucagcguccaguacaaccugucccacagcuacgccggggacgcggccaaccacugcggcacgguggccaacggggugcugcagaccuucaugcgcauggccuggggcggcuccuacaucgcgcucgacagcgggcggggcaacugggacugcaucaugaccuccuaccaguaccugaucauccagaacaccacgugggacgaccacugccaguucagccgccccucccccaucggguaccugggccuccugagccagcggacccgcgacgucuacaucucccggcgccugcucggcaccuucaccuggacgcugagcgacagcgaggggaaggacaccccgggcggguacugccugacccgguggaugcucaucgaggccgagcugaagugcuucggcaacaccgccguggccaagugcaacgagaagcacgacgaggaguucugcgacaugcugcgccucuucgacuucugcaagcaggccauccagcggcugaaggcggaggcccagauguccauccagcugaucaacaaggccgugaacgcccucaucaacgaccagcugaucaugaagaaccaccuccgcgacaucauggggauccccuacugcaacuacagcaaguacugguaccugaacaacacggccaccggcaagaccucccugcccaagugcuggcugaucagcaacggcuccuaccucaacgagacccacuucagcgacgacaucgagcaggaggcggacaacaugaucacggagaugcugcagaaggaguacauggagcggcaggggaagacgccccugggccuggucgaccucuucguguucuccaccagcuucuaccugaucuccaucuuccugcaccucgugaagaucccgacccaccgccacaucgucggcaagagcugccccaagccccaccggcugaaccacauggggaucugcuccugcgggcuguacaagcagcccggcgugccggugcgcuggaagcggugaggacuaguuauaagacugacuagcccgaugggccucccaacgggcccuccuccccuccuugcaccgagauuaaucaaaggcucuuuucagagccaccaaaaaaaaaaaaaaaaaaaaaaaaaaaaaaaaaaaaaaaaaaaaaaaaaaaaaaaaaaaaaaaaagaauu

SEQ ID NO: 37885 - RNA, 1658 nt, Artificial Sequence
  mRNA product Design i-3 (hSL-A64-N5) comprising derived and/or modified sequence from LASV(G3010-SLE-2013;Clade IV)__AIT17344__GPCmut10 (opt1)
aggagaaagcuuaccaugggccagaucgugaccuucuuccaggaggucccccacgugaucgaggaggugaugaacaucguccugaucgcccucagcauccuggccgugcugaaggggcucuacaacuucgcgaccugcggccugguggggcuggucacguuccuccugcugugcggccgcuccugcaccaccagccucuacaaggggguguacgagcugcagacccuggagcucaacauggagacgcugaacaugugcaugccgcuguccugcaccaagaacaacagccaccacuacaucauggugggcaacgagaccggccucgagcugacccugacgaacaccuccaucaucaaccacaaguucugcaaccucagcgacgcccacaagaagaaccuguacaaccacgcccugauguccaucaucagcaccuuccaccucuccauccccaacuucaaccaguacgaggccaugagcugcgacuucaacgggggcaagaucuccguccaguacaaccugagccacuccuacgccggggacgcggccagccacugcggcaccguggccaacggggugcugcagacguucaugcggauggccuggggcggcuccuacaucgcgcucgacagcggguacggcaagugggacugcaucaugaccuccuaccaguaccugaucauccagaacaccaccugggaggaccacugccaguucagccgccccucccccaucggguaccugggccuccugagccagcggacgcgcgacaucuacaucagccggcgccugcucggcaccuucaccuggacccuguccgacagcgaggggaaggacacgccgggcggguacugccugacccgguggaugcucaucgaggccgagcugaagugcuucggcaacaccgccgucgccaagugcaacgagaagcacgacgaggaguucugcgacaugcugcgccucuucgacuucugcaagcaggccauccagcggcugaagaccgaggcgcagauguccauccagcugaucaacaaggccgugaacgcccucaucaacgaccagcugaucaugaagaaccaccuccgcgacaucauggggauccccuacugcaacuacagcaaguacugguaccugaaccacacgaccaccggcaagaccucccugcccaagugcuggcuggugagcaacggcuccuaccucaacgagacgcacuucagcgacgacaucgagcagcaggccgacaacaugaucaccgagaugcugcagaaggaguacauggagcggcaggggaagacgccccugggccuggucgaccucuucguguucuccaccagcuucuaccugaucuccaucuuccugcaccucgugaagaucccgacccaccgccacaucgucggcaagagcugccccaagccccaccggcugaaccacauggggaucugcuccugcgggcuguacaagcagcccggcgugccggugcgcuggaagcggugaggacuaguuauaagacugacuagcccgaugggccucccaacgggcccuccuccccuccuugcaccgagauuaaucaaaggcucuuuucagagccaccaaaaaaaaaaaaaaaaaaaaaaaaaaaaaaaaaaaaaaaaaaaaaaaaaaaaaaaaaaaaaaaaagaauu

SEQ ID NO: 37886 - RNA, 1658 nt, Artificial Sequence
  mRNA product Design i-3 (hSL-A64-N5) comprising derived and/or modified sequence from LASV(G502-SLE-2009;Clade IV)__AIT17126__GPCmut10 (opt1)
aggagaaagcuuaccaugggccagaucgugaccuucuuccaggaggucccccacgugaucgaggaggugaugaacaucguccugaucgcccucagcauccuggccgugcugaaggggcucuacaacuucgcgaccugcggccugguggggcugcucacguuccugcugcucugcggccgcuccugcaccaccgggcuguacaagggcgucuacgagcugcagacccucgagcugaacauggagacgcugaacaugugcaugccgcucagcugcaccaagaacaacucccaccacuacaucauggugggcaacgagaccgggcuggagcugacccucacgaacaccagcaucaucaaccacaaguucugcaaccuguccgacgcccacaagaagaaccuguacgaccacgcccucaugagcaucaucuccaccuuccaccugagcauccccaacuucaaccaguacgaggccauguccugcgacuucaacggcgggaagaucagcgugcaguacaaccugucccacagcuacgccggcgacgcggccgaccacugcgggaccgucgccaacggcgugcuccagacguucaugcggauggccuggggcggguccuacaucgcgcuggacagcggccgcgggcggugggacugcaucaugaccuccuaccaguaccugaucauccagaacaccaccugggaggaccacugccaguucagccgccccucccccaucggcuaccucggccugcugagccagcggacgcgcgacaucuacaucucccggcgccuccuggggaccuucaccuggacccugagcgacagcgagggcaaggacacgcccgggggcuacugccucacccgguggaugcugaucgaggccgagcugaagugcuucgggaacaccgccguggccaagugcaacgagaagcacgacgaggaguucugcgacaugcuccgccuguucgacuucugcaagcaggccauccagcggcugaaggcggaggcccagauguccauccagcucaucaacaaggccgucaacgcccugaucaacgaccagcuggugaugaagaaccaccuccgcgacaucaugggcauccccuacugcaacuacagccgguacugguaccugaaccacaccacgaccggccgcaccucccugcccaagugcuggcucgugagcaacggguccuaccugaacgagacccacuucagcgacgacaucgagcagcaggccgacaacaugaucacggagaugcugcagaaggaguacauggagcggcagggcaagaccccgcuggggcucgucgaccuguucguguucuccaccagcuucuaccugaucuccaucuuccuccaccuggugaagaucccgacccaccgccacaucgucggcaagagcugccccaagccccaccggcugaaccacauggggaucugcuccugcggccucuacaagcagcccggcgugccggugaaguggaagcgcugaggacuaguuauaagacugacuagcccgaugggccucccaacgggcccuccuccccuccuugcaccgagauuaaucaaaggcucuuuucagagccaccaaaaaaaaaaaaaaaaaaaaaaaaaaaaaaaaaaaaaaaaaaaaaaaaaaaaaaaaaaaaaaaaagaauu

SEQ ID NO: 37887 - RNA, 1658 nt, Artificial Sequence
  mRNA product Design i-3 (hSL-A64-N5) comprising derived and/or modified sequence from LASV(G733-SLE-2010;Clade IV)__AIT17154__GPCmut10 (opt1)
aggagaaagcuuaccaugggccagaucgugaccuucuuccaggaggucccccacgugaucgaggaggugaugaacaucguccugaucgcccucagcauccuggccgugcugaaggggcucuacaacuucgcgaccugcggcaucguggggcuggucuccuuccugcuccugugcggccgcagcugcacgaccucccuguacaaggggguguacgagcuccagacccuggagcugaacauggagacccucaacaugugcaugccgcugagcugcacgaagaacaacucccaccacuacaucauggugggcaacgagaccggccuggagcucacccugaccaacacgagcaucaucaaccacaaguucugcaaccuguccgacgcccacaagaagaaccucuacgaccacgcccugaugagcaucaucuccaccuuccaccugagcauccccaacuucaaccaguacgaggccauguccugcgacuucaacgggggcaagaucagcguccaguacaaccucucccacagcuacgccggggacgcggccaaccacugcggcaccaucgccaacggggugcugcagaccuucaugcggauggccuggggcggcuccuacaucgcgcuggacagcgggcgcgaccggugggacugcaucaugacguccuaccaguaccucaucauccagaacaccaccugggaggaccacugccaguucagccgccccucccccaucggcuaccuggggcugcucagccagcggacccgcgacaucuacaucagccggcgccugcugggcacguucaccuggacccucuccgacagcgagggcaaggacacccccgggggcuacugccugacgcgguggaugcugaucgaggccgagcucaagugcuucgggaacaccgccguggccaagugcaacgagaagcacgacgaggaguucugcgacaugcugcgccuguucgacuucugcaagcaggccauccagcggcucaaggcggaggcccagauguccauccagcugaucaacaaggccgucaacgcccugaucaacgaccagcucaucaugaagaaccaccuccgcgacaucaugggcaucccguacugcaacuacagcaaguacugguaccugaaccacaccaccacggggaagaccucccugcccaagugcuggcuggugagcaacggcuccuaccugaacgagacccacuucagcgacgacaucgagcagcaggccgacaacaugaucaccgagaugcuccagaaggaguacauggagcggcagggcaagacgccccuggggcugguggaccuguucgucuucuccaccagcuucuaccucaucuccaucuuccugcaccuggugaagaucccgacccaccgccacguggucggcaagagcugccccaagccccaccggcucaaccacauggggaucugcuccugcggccuguacgggcagcccggcgugccggugaaguggaagcgcugaggacuaguuauaagacugacuagcccgaugggccucccaacgggcccuccuccccuccuugcaccgagauuaaucaaaggcucuuuucagagccaccaaaaaaaaaaaaaaaaaaaaaaaaaaaaaaaaaaaaaaaaaaaaaaaaaaaaaaaaaaaaaaaaagaauu

SEQ ID NO: 37888 - RNA, 1658 nt, Artificial Sequence
  mRNA product Design i-3 (hSL-A64-N5) comprising derived and/or modified sequence from MOPV/LASV reassortant(IGS-1;Clade IV)__AFY05576__GPCmut10 (opt1)
aggagaaagcuuaccaugggccagaucgugaccuucuuccaggaggucccccacgugaucgaggaggugaugaacaucguccugaucgcccucagcgugcuggccgugcugaaggggcucuacaacuucgcgaccugcggccuggucgggcuggugaccuuccuccugcugugcggccgcuccugcaccaccagccucuacaaggggguguacgagcugcagacccuggagcucaacauggagacgcugaacaugugcaugccgcuguccugcaccaagaacaacagccaccacuacaucauggucggcaacgagaccggccucgagcugacccugacgaacaccuccaucaucaaccacaaguucugcaaccucagcgacgcccacaagaagaaccuguacgaccacgcccugauguccaucaucagcaccuuccaccucuccauccccaacuucaaccaguacgaggccaugagcugcgacuucaacgggggcaagaucuccgugcaguacaaccugagccacuccuacgccggggacgcggccaaccacugcggcaccguggccaacgggguccugcagacguucaugcggauggccuggggcggcagcuacaucgcgcucgacuccgggcgcggcaacugggacugcaucaugaccagcuaccaguaccugaucauccagaacaccaccugggaggaccacugccaguucucccggcccagccccaucggguaccugggccuccugucccagcgcacgcgggacaucuacaucagccgccggcugcucggcaccuucaccuggacccugagcgacuccgagggggaggacacgccgggcggguacugccugacccgcuggaugcucaucgaggccgagcugaagugcuucggcaacaccgccguggccaagugcaacgagaagcacgacgaggaguucugcgacaugcugcggcuguucgacuucugcaagcaggccauccagcgccugaaggcggaggcccagaugagcauccagcugaucaacaaggccgugaacgcccucaucaacgaccagcugaucaugaagaaccaccuccgggacaucauggggauccccuacugcaacuacuccaaguacugguaccucaaccacaccacgaccggccgcaccagccugcccaagugcuggcuggucuccaacggcagcuaccucaacgagacccacuucuccgacgacaucgagcagcaggccgacaacaugaucacggagaugcugcagaaggaguacauggagcggcaggggaagacgccccugggccugguggaccucuucguguucagcaccuccuucuaccugaucagcaucuuccugcaccucgucaagaucccgacccaccgccacaucguggggaaguccugccccaagccccaccggcugaaccacaugggcaucugcagcugcgggcuguacaagcagcccggcgugccggucaaguggaagcgcugaggacuaguuauaagacugacuagcccgaugggccucccaacgggcccuccuccccuccuugcaccgagauuaaucaaaggcucuuuucagagccaccaaaaaaaaaaaaaaaaaaaaaaaaaaaaaaaaaaaaaaaaaaaaaaaaaaaaaaaaaaaaaaaaagaauu

SEQ ID NO: 37889 - RNA, 1658 nt, Artificial Sequence
  mRNA product Design i-3 (hSL-A64-N5) comprising derived and/or modified sequence from LASV(LM765-SLE-2012;Clade IV)__AIT17814__GPCmut10 (opt1)
aggagaaagcuuaccaugggccagaucgugaccuucuuccaggaggucccccacgugaucgaggaggugaugaacaucguccugaucgcccucagcauccuggccgugcugaaggggcucuacaacuucgcgaccugcggccugguggggcuggucacguuccuccugcugugcggccgcuccugcaccaccagccucuacaaggggguguacgagcugcagacccuggagcucaacauggagacgcugaacaugugcaugccgcuguccugcaccaagaacaacagccaccacuacaucauggugggcaacgagaccggccucgagcugacccugacgaacaccuccaucaucgaccacaaguucugcaaccucagcgacgcccaccggaagaaccuguacgaccacgcccugauguccaucaucagcaccuuccaccucuccauccccaacuucaaccaguacgaggccaugagcugcgacuucaacgggggcaagaucuccguccaguacaaccugagccacuccuacgccaaggacgcggccgaccacugcgggaccguggccaacggcgugcugcagacguucaugcgcauggccuggggcgggagcuacaucgcgcucgacuccggccgggggcgcugggacugcaucaugaccagcuaccaguaccugaucauccagaacaccaccugggaggaccacugccaguucucccggcccagccccaucggcuaccuggggcuccugucccagcgcacgcgggacaucuacaucagccgccggcugcucggcaccuucaccuggacccugagcgacuccgagggcaaggacacgcccgggggcuacugccugacccgcuggaugcucaucgaggccgagcugaagugcuucgggaacaccgccgucgccaagugcaacgagaagcacgacgaggaguucugcgacaugcugcggcuguucgacuucugcaagcaggccauccagcgccugaaggcggaggcccagaugagcauccagcugaucaacaaggccgugaacgcccucaucaacgaccagcugaucaugaagaaccaccuccgggacaucaugggcauccccuacugcaacuacuccaaguacugguaccucaaccacaccacgaccgggaagaccagccugcccaagugcuggcugguguccaacggcagcuaccucaacgagacccacuucuccgacgacaucgagcagcaggccgacaacaugaucacggagaugcugcagaaggaguacauggagcgccagggcaagaccccgcuggggcuggucgaccucuucguguucagcaccuccuucuaccugaucagcaucuuccugcaccucgugaagaucccgacccaccggcacaucgucggcaagcccugccccaagccccaccgccugaaccacauggggaucugcuccugcggccuguacaagcagccgggggugcccgugaaguggaagcggugaggacuaguuauaagacugacuagcccgaugggccucccaacgggcccuccuccccuccuugcaccgagauuaaucaaaggcucuuuucagagccaccaaaaaaaaaaaaaaaaaaaaaaaaaaaaaaaaaaaaaaaaaaaaaaaaaaaaaaaaaaaaaaaaagaauu

SEQ ID NO: 37890 - RNA, 1658 nt, Artificial Sequence
  mRNA product Design i-3 (hSL-A64-N5) comprising derived and/or modified sequence from LASV(LM776-SLE-2012;Clade IV)__AIT17824__GPCmut10 (opt1)
aggagaaagcuuaccaugggccagaucgugaccuucuuccaggaggucccccacgugaucgaggaggugaugaacaucguccugaucgcccucagcauccuggccgugcugaaggggcucuacaacuucgcgaccugcggccugguggggcuggucaccuuccuccugcugugcggccgcuccugcaccaccagcguguacaaggggguguacgagcuccagacccuggagcugaacauggagacgcucaacaugugcaugccgcuguccugcaccaagaacaacagccaccacuacaucauggucggcaacgagaccggccuggagcucacccugacgaacaccuccaucaucaaccacaaguucugcaaccugagcgacgcccacaagaagaaccucuacgaccacgcccugauguccaucaucagcaccuuccaccuguccauccccaacuucaaccaguacgaggccaugagcugcgacuucaacgggggcaagaucuccgugcaguacaaccucagccacuccuacgccggggacgcggccaaccacugcggcaccguggccaacgggguccugcagacguucaugcggauggccuggggcggcagcuacaucgcgcuggacuccgggcacggcaagugggacugcaucaugaccagcuaccaguaccucaucauccagaacaccaccugggaggaccacugccaguucucccgccccagccccaucggguaccugggccugcucucccagcggacgcgcgacaucuacaucagccggcgccugcugggcaccuucaccuggacccucagcgacuccgaggggaaggacacgccgggcggguacugccugacccgguggaugcugaucgaggccgagcucaagugcuucggcaacaccgccguggccaagugcaacgagaagcacgacgaggaguucugcgacaugcugcgccuguucgacuucugcaagcaggccauccagcggcucaaggcggaggcccagaugagcauccagcugaucaacaaggccgugaacgcccugaucaacgaccagcucaucaugaagaaccaccuccgcgacaucauggggauccccuacugcaacuacuccaaguacugguaccugaaccacaccacgaccggcaagaccagccugcccaagugcuggcuggucuccaacggcagcuaccugaacgagacccacuucuccgacgacaucgagcagcaggccgacaacaugaucacggagaugcuccagaaggaguacauggagcggcaggggaagacgccccugggccugguggaccuguucguguucagcaccuccuucuaccucaucagcaucuuccugcaccuggucaagaucccgacccaccgccacaucguggggaaguccugccccaagccccaccggcucaaccacaugggcaucugcagcugcgggcuguacaagcagcccggcgugccgguccgcuggaagcggugaggacuaguuauaagacugacuagcccgaugggccucccaacgggcccuccuccccuccuugcaccgagauuaaucaaaggcucuuuucagagccaccaaaaaaaaaaaaaaaaaaaaaaaaaaaaaaaaaaaaaaaaaaaaaaaaaaaaaaaaaaaaaaaaagaauu

SEQ ID NO: 37891 - RNA, 1658 nt, Artificial Sequence
  mRNA product Design i-3 (hSL-A64-N5) comprising derived and/or modified sequence from LASV(Mad39;Clade IV)__ANH09722__GPCmut10 (opt1)
aggagaaagcuuaccaugggccagaucgugaccuucuuccaggaggucccccacgugaucgaggaggugaugaacaucguccugaucgcccucagcauccuggccgugcugaaggggcucuacaacguggcgaccugcggccugaucgggcuggucacguuccuccugcugugcggccgcuccugcaccaccacccucuacaaggggguguacgagcugcaggcccuggagcucaacauggagacgcugaacaugugcaugccgcugagcugcaccaagaacaacucccaccacuacauccgggugggcaacgagaccggccucgagcugacccugacgaacaccagccucaucaaccacaaguucugcaaccuguccgacgcccacaagaagaaccuguacgaccacgcccucaugagcaucaucuccaccuuccaccugagcauccccaacuucaaccaguacgaggccauguccugcgacuucaacgacgggaagaucagcguccaguacaaccugucccacaccuacgcgggcgacacggccaaccacugcgggaccguggccaacggcgugcuccagaccuucaugcgcauggccuggggcgggagcuacaucgcgcuggacuccggccgcgggggcugggacugcaucaugaccagcuaccaguaccugaucauccagaacacgaccugggaggaccacugccaguucucccggcccagccccaucggguaccucggccugcugucccagcggacccgcgacaucuacaucagccggcgccuccugggcaccuucacguggacccuguccgacagcgaggggaaggacaccccgggcggguacugccucacccgguggaugcugaucgaggccgagcugaagugcuucggcaacacggccgucgccaagugcaacgagaagcacgacgaggaguucugcgacaugcuccgccuguucgacuucugcaagcaggccauccagcggcugaaggcggaggcccagaugagcauccagcucaucaacaaggccgugaacgcccugaucaacgaccagcugaucaugaagaaccaccuccgcgacaucauggggauccccuacugcaacuacuccaaguacugguaccugaaccacaccgugaccggcaagaccagccugcccaagugcuggcucgucuccaacggcagcuaccugaacgagacgcacuucuccgacgacaucgagcagcaggccgacaacaugaucaccgagaugcugcagaaggaguacauggagcggcaggggaagacgccccugggccucguggaccuguucguguucagcaccuccuucuaccugaucagcaucuuccuccaccuggucaagaucccgacccaccgccacgugguggggaagcccugccccaagccccaccggcugaaccacaugggcaucugcuccugcggguucuacaagcagccgggcguccccgugcgcuggaagcggugaggacuaguuauaagacugacuagcccgaugggccucccaacgggcccuccuccccuccuugcaccgagauuaaucaaaggcucuuuucagagccaccaaaaaaaaaaaaaaaaaaaaaaaaaaaaaaaaaaaaaaaaaaaaaaaaaaaaaaaaaaaaaaaaagaauu

SEQ ID NO: 37892 - RNA, 1658 nt, Artificial Sequence
  mRNA product Design i-3 (hSL-A64-N5) comprising derived and/or modified sequence from LASV(Z0947-SLE-2011;Clade IV)__AIT17840__GPCmut10 (opt1)
aggagaaagcuuaccaugggccagaucgugaccuucuuccaggaggucccccacgugaucgaggaggugaugaacaucguccugaucgcccucagcauccuggccgugcugaaggggcucuacaacuucgcgaccugcggccugguggggcuggucacguuccuccugcugugcggccgcuccugcaccaucagccucuacaaggggguguacgagcugcagacccuggagcucaacauggagacccugaacaugugcaugccgcuguccugcacgaagaacaacagccaccacuacaucauggugggcaacgagaccggccucgagcugacccugaccaacacguccaucaucaaccacaaguucugcaaccucagcgacgcccacaagaagaaccuguacgaccacgcccugauguccaucaucagcaccuuccaccucuccauccccaacuucaaccaguacgaggccaugagcugcgacuucaacgggggcaagaucuccguccaguacaaccugagccacuccuacgccggggacgcggccaaccacugcggcaccguggccaacggggugcugcagaccuucaugcggauggccuggggcggcagcuacaucgcgcucgacuccgggcgcgaccggugggacugcaucaugacgagcuaccaguaccugaucauccagaacaccaccugggaggaccacugccaguucucccgccccagccccaucggcuaccuggggcuccugucccagcggacccgcgacaucuacaucagccggcgccugcucggcacguucaccuggacccugagcgacuccgagggcaaggacacccccgggggcuacugccugacgcgguggaugcucaucgaggccgagcugaagugcuucgggaacaccgccgucgccaagugcaacgagaagcacgacgaggaguucugcgacaugcugcgccucuucgacuucugcaagcaggccauccagcggcugaaggcggaggcccagaugagcauccagcugaucaacaaggccgugaacgcccucaucaacgaccagcugaucaugaagaaccaccuccgcgacaucaugggcaucccguacugcaacuacuccaaguacugguaccugaaccacaccaccacggggaagaccagccugcccaagugcuggcugguguccaacggcagcuaccucaacgagacccacuucuccgacgacaucgagcagcaggccgacaacaugaucaccgagaugcugcagaaggaguacauggagcggcagggcaagacgccccuggggcuggucgaccucuucguguucagcaccuccuucuaccugaucagcaucuuccugcaccucgugaagaucccgacccaccgccacaucgucggcaagcccugccccaagccccaccggcugaaccacauggggaucugcuccugcggccuguacaagcagccgggggugcccgugaaguggaagcgcugaggacuaguuauaagacugacuagcccgaugggccucccaacgggcccuccuccccuccuugcaccgagauuaaucaaaggcucuuuucagagccaccaaaaaaaaaaaaaaaaaaaaaaaaaaaaaaaaaaaaaaaaaaaaaaaaaaaaaaaaaaaaaaaaagaauu

SEQ ID NO: 37893 - RNA, 1658 nt, Artificial Sequence
  mRNA product Design i-3 (hSL-A64-N5) comprising derived and/or modified sequence from LASV(Josiah;Clade IV)__NP_694870__GPCmut10 (opt4)
aggagaaagcuuaccaugggccagaucgugaccuucuuccaggaggugccccacgugaucgaggaggugaugaacaucgugcugaucgcccugagcgugcuggccgugcugaagggccuguacaacuucgccaccugcggccuggugggccuggugaccuuccugcugcugugcggcagaagcugcaccaccagccuguacaagggcguguacgagcugcagacccuggagcugaacauggagacccugaacaugugcaugccccugagcugcaccaagaacaacagccaccacuacaucauggugggcaacgagaccggccuggagcugacccugaccaacaccagcaucaucaaccacaaguucugcaaccugagcgacgcccacaagaagaaccuguacgaccacgcccugaugagcaucaucagcaccuuccaccugagcauccccaacuucaaccaguacgaggccaugagcugcgacuucaacggcggcaagaucagcgugcaguacaaccugagccacagcuacgccggcgacgccgccaaccacugcggcaccguggccaacggcgugcugcagaccuucaugagaauggccuggggcggcagcuacaucgcccuggacagcggcagaggcaacugggacugcaucaugaccagcuaccaguaccugaucauccagaacaccaccugggaggaccacugccaguucagcagacccagccccaucggcuaccugggccugcugagccagagaaccagagacaucuacaucagcagaagacugcugggcaccuucaccuggacccugagcgacagcgagggcaaggacacccccggcggcuacugccugaccagauggaugcugaucgaggccgagcugaagugcuucggcaacaccgccguggccaagugcaacgagaagcacgacgaggaguucugcgacaugcugagacuguucgacuucugcaagcaggccauccagagacugaaggccgaggcccagaugagcauccagcugaucaacaaggccgugaacgcccugaucaacgaccagcugaucaugaagaaccaccugagagacaucaugggcauccccuacugcaacuacagcaaguacugguaccugaaccacaccaccaccggcagaaccagccugcccaagugcuggcuggugagcaacggcagcuaccugaacgagacccacuucagcgacgacaucgagcagcaggccgacaacaugaucaccgagaugcugcagaaggaguacauggagagacagggcaagaccccccugggccugguggaccuguucguguucagcaccagcuucuaccugaucagcaucuuccugcaccuggugaagauccccacccacagacacaucgugggcaagagcugccccaagccccacagacugaaccacaugggcaucugcagcugcggccuguacaagcagcccggcgugcccgugaaguggaagagaugaggacuaguuauaagacugacuagcccgaugggccucccaacgggcccuccuccccuccuugcaccgagauuaaucaaaggcucuuuucagagccaccaaaaaaaaaaaaaaaaaaaaaaaaaaaaaaaaaaaaaaaaaaaaaaaaaaaaaaaaaaaaaaaaagaauu

SEQ ID NO: 37894 - RNA, 1655 nt, Artificial Sequence
  mRNA product Design i-3 (hSL-A64-N5) comprising derived and/or modified sequence from LASV(LP;Clade I)__AAF86701__GPCmut10 (opt4)
aggagaaagcuuaccaugggccagaucaucaccuucuuccaggaggugccccacgugaucgaggaggugaugaacaucgugcugaucgcccugagccugcuggccauccugaagggccuguacaacaucgccaccugcggcaucaucggccugguggccuuccuguuccugugcggcaagagcugcagccugacccugaagggcggcuacgagcugcagacccuggagcugaacauggagacccugaacaugugcaugccccugagcugcaccaagaacagcagccaccacuacaucagagugggcaacgagaccggccuggagcugacccugaccaacaccagcaucaucaaccacaaguucugcaaccugagcgacgcccacaagaagaaccuguacgaccacgcccugaugagcaucaucagcaccuuccaccugagcauccccaacuucaaccaguacgaggccaugagcugcgacuucaacggcggcaagaucagcgugcaguacaaccugagccacagcuacgccggcgacgccgccgagcacugcggcaccguggccaacggcgugcugcagaccuucaugagaauggccuggggcggcagauacaucgcccuggacagcggcaagggcaacugggacugcaucaugaccagcuaccaguaccugaucauccagaacaccaccugggaggaccacugccaguucagcagacccagccccaucggcuaccugggccugcugagccagagaaccagagacaucuacaucagcagaagacugcugggcaccuucaccuggacccugagcgacagcgagggcaacgagacccccggcggcuacugccugaccagauggaugcugaucgaggccgagcugaagugcuucggcaacaccgccguggccaagugcaacgagaagcacgacgaggaguucugcgacaugcugagacuguucgacuucugcaagcaggccaucagaagacugaaggccgaggcccagaugagcauccagcugaucaacaaggccgugaacgcccugaucaacgaccagcugaucaugaagaaccaccugagagacaucaugggcauccccuacugcaacuacagcaaguacugguaccugaaccacaccagcagcggcagaaccagccugcccaagugcuggcugaucagcaacggcagcuaccugaacgagacccaguucagcgacgacaucgagcagcaggccgacaacaugaucaccgagaugcugcagaaggaguacaucgagagacagggcaagaccccccugggccugguggacaucuucaucuucagcaccagcuucuaccugaucagcaucuuccugcaccugaucaagauccccacccacagacacaucgugggcaagcccugccccaagccccacagacugaaccacaugggcgugugcagcugcggccuguacaagcaccccggcgugcccaccaaguggaagagaugaggacuaguuauaagacugacuagcccgaugggccucccaacgggcccuccuccccuccuugcaccgagauuaaucaaaggcucuuuucagagccaccaaaaaaaaaaaaaaaaaaaaaaaaaaaaaaaaaaaaaaaaaaaaaaaaaaaaaaaaaaaaaaaaagaauu

SEQ ID NO: 37895 - RNA, 1655 nt, Artificial Sequence
  mRNA product Design i-3 (hSL-A64-N5) comprising derived and/or modified sequence from LASV(803213;Clade II)__AAF86703__GPCmut10 (opt4)
aggagaaagcuuaccaugggccagaucaucaccuucuuccaggaggugccccacgugaucgaggaggugaugaacaucgugcugaucgcccugagccugcuggccauccugaagggcaucuacaacguggccaccugcggccuguucggccugaucagcuuccugcugcugugcggcagaagcugcagcgugaccuacaagggcguguacgagcugcagacccuggagcugaacauggccaaccugaacaugugcaugccccugagcugcaccaagaacaacagccaccacuacaucauggugggcaacgagaccggccuggagcugacccugaccaacaccagcaucaucaaccacaaguucugcaaccugagcgacgcccacaagaagaaccuguacgaccacgcccugaugagcaucaucagcaccuuccaccugagcauccccaacuucaaccaguacgaggccaugagcugcgacuucaacggcggcaagaucagcgugcaguacaaccugagccacagcuucgccguggacgccgccaaccacugcggcaccaucgccaacggcgugcugcagaccuucaugagaauggccuggggcggcagcuacaucgcccuggacagcggcaagggcaacugggacugcaucaugaccagcuaccaguaccugaucauccagaacaccaccugggaggaccacugccaguucagcagacccagccccaucggcuaccugggccugcugagccagagaaccagagacaucuacaucagcagaagacugcugggcaccuucaccuggacccugagcgacagcgagggcaacgaggcccccggcggcuacugccugaccagauggaugcugaucgaggccgagcugaagugcuucggcaacaccgccguggccaagugcaacgagaagcacgacgaggaguucugcgacaugcugagacuguucgacuucugcaagcaggccaucaagagacugaagaccgaggcccagaugagcauccagcugaucaacaaggccgugaacgcccugaucaacgaccagcugaucaugaagaaccaccugagagacaucaugggcauccccuacugcaacuacagcagauacugguaccugaaccacaccgugaccggcaagaccagccugcccagaugcuggcuggugagcaacggcagcuaccugaacgagacccacuucagcgacgacaucgagcagcaggccgacaacaugaucaccgagaugcugcagaaggaguacauggacagacagggcaagaccccccugggccugguggaccuguucguguucagcaccagcuucuaccugaucagcaucuuccugcaccuggugaagauccccacccacagacacaucgugggcaagcccugccccaagccccacagacugaaccacaugggcaucugcagcugcggccuguacaagcaccccggcgugcccgugaaguggaagagaugaggacuaguuauaagacugacuagcccgaugggccucccaacgggcccuccuccccuccuugcaccgagauuaaucaaaggcucuuuucagagccaccaaaaaaaaaaaaaaaaaaaaaaaaaaaaaaaaaaaaaaaaaaaaaaaaaaaaaaaaaaaaaaaaagaauu

SEQ ID NO: 37896 - RNA, 1655 nt, Artificial Sequence
  mRNA product Design i-3 (hSL-A64-N5) comprising derived and/or modified sequence from LASV(GA391;Clade III)__CAA36645__GPCmut10 (opt4)
aggagaaagcuuaccaugggccagaucgugaccuucuuccaggaggugccccacgugaucgaggaggugaugaacaucgugcugaucgcccugagcauccuggccauccugaagggccuguacaacguggccaccugcggccugaucggccuggugaccuuccugcugcugagcggcagaagcugcagccugaucuacaagggcaccuacgagcugcagacccuggagcugaacauggagacccugaacaugugcaugccccugagcugcaccaagaacaacagccaccacuacaucagagugggcaacgagaccggccuggagcugacccugaccaacaccagcauccugaaccacaaguucugcaaccugagcgacgcccacaagagaaaccuguacgaccacagccugaugagcaucaucagcaccuuccaccugagcauccccaacuucaaccaguacgaggccaugagcugcgacuucaacggcggcaagaucaccgugcaguacaaccugagccacagcuucgccguggacgccgccggccacugcggcacccuggccaacggcgugcugcagaccuucaugagaauggccuggggcggcagcuacaucgcccuggacagcggcagaggcaacugggacugcaucaugaccagcuaccaguaccugaucauccagaacaccaccugggacgaccacugccaguucagcagacccagccccaucggcuaccugggccugcugagccagagaaccagagacaucuacaucagcagaagacugcugggcaccuucaccuggacccugagcgacagcgagggcaacgagacccccggcggcuacugccugaccagauggaugcugaucgaggccgagcugaagugcuucggcaacaccgccguggccaagugcaacgagaagcacgacgaggaguucugcgacaugcugagacuguucgacuucugcaagcaggccaucagaagacugaagaccgaggcccagaugagcauccagcugaucaacaaggccgugaacgcccugaucaacgaccagcugaucaugaagaaccaccugagagacaucaugggcauccccuacugcaacuacagcagauacugguaccugaaccacaccagcaccggcaagaccagccugcccagaugcuggcugaucagcaacggcagcuaccugaacgagaccaaguucagcgacgacaucgagcagcaggccgacaacaugaucaccgagaugcugcagaaggaguacaucgacagacagggcaagaccccccugggccugguggaccuguucguguucagcaccagcuucuaccugaucagcaucuuccugcaccuggugaagauccccacccacagacacaucgugggcaagcccugccccaagccccacagacugaaccacaugggcaucugcagcugcggccuguacaagcagcccggcgugcccgugagauggaagagaugaggacuaguuauaagacugacuagcccgaugggccucccaacgggcccuccuccccuccuugcaccgagauuaaucaaaggcucuuuucagagccaccaaaaaaaaaaaaaaaaaaaaaaaaaaaaaaaaaaaaaaaaaaaaaaaaaaaaaaaaaaaaaaaaagaauu

SEQ ID NO: 37897 - RNA, 1658 nt, Artificial Sequence
  mRNA product Design i-3 (hSL-A64-N5) comprising derived and/or modified sequence from LASV(AV;Clade V)__CCA30314__GPCmut10 (opt4)
aggagaaagcuuaccaugggccagaucgugaccuucuuccaggaggugccccacgugaucgaggaggugaugaacaucgugcugaucgcccugagcauccuggccgugcugaagggccuguacaacaucgccaccugcggccugaucggccugaucaccuuccugcugcugugcggcagaagcugcagcagcaaccuguacaagggcguguacgagcugcagagccuggaccugaacauggagacccugaacaugugcaugccccugagcugcaccaagaacaacagccaccacuacaucagagugggcaacgacaccggccuggagcugacccugaccaacaccagcauccugaaccacaaguucugcaaccugagcgacgcccacaagaaggaccuguacgaccacgcccugaugagcaucaucagcaccuuccaccugagcauccccaacuucaaccaguacgaggccaugagcugcgacuucaacggcggcaagaucagcgugcaguacaaccugagccacagcuacgccaucgacgccgccaaccacugcggcaccguggccaacggcauccugcagaccuucaugagaauggccuggggcggcagcuacaucgcccuggacagcggcagaggcaacugggacugcaucaugaccagcuaccaguaccugaucauccagaacaccaccugggagaaccacugccaguucagcagacccagccccaucggcuaccugggccugcugagccagagaaccagagacaucuacaucagcagaagacugcugggcaccuucaccuggacccugagcgacagcgagggcaacgccacccccggcggcuacugccugaccagauggaugcugaucgaggccgagcugaagugcuucggcaacaccgccguggccaagugcaacgagaagcacgacgaggaguucugcgacaugcugagacuguucgacuucugcaagcaggccaucagcagacugaagagcgaggcccagaugagcauccagcugaucaacaaggccgugaacgcccugaucaacgaccagcugaucaugaagaaccaccugagagacaucaugggcauccccuacugcaacuacagcaaguacugguaccugaaccacaccaucaccggcaagaccagccugcccaagugcuggcuggugagcaacggcagcuaccugaacgagacccacuucagcgacgacaucgagcagcaggccgacaacaugaucaccgagaugcugcagaaggaguacauggagagacagggcaagaccccccugggccugguggaccuguucguguucagcaccagcuucuaccugaucagcaucuuccugagacuggugaagauccccacccacagacacaucgugggcaagcccugccccaagccccacagacugaaccacaugggcaucugcagcugcggccuguacaagcagcccggcgugcccgugagauggaagagaugaggacuaguuauaagacugacuagcccgaugggccucccaacgggcccuccuccccuccuugcaccgagauuaaucaaaggcucuuuucagagccaccaaaaaaaaaaaaaaaaaaaaaaaaaaaaaaaaaaaaaaaaaaaaaaaaaaaaaaaaaaaaaaaaagaauu

SEQ ID NO: 37898 - RNA, 1655 nt, Artificial Sequence
  mRNA product Design i-3 (hSL-A64-N5) comprising derived and/or modified sequence from LASV(Togo/2016/7082;Clade VI)__AMR44577__GPCmut10 (opt4)
aggagaaagcuuaccaugggccagaucaucaccuucuuccaggaggugccccacgugaucgaggaggugaugaacaucgugcugaucgcccugagccugcuggccauccugaagggcguguacaacguggccaccugcggcaucaucggccuggugaccuuccuguuccugugcggcagaagcugcagccugaucuacaagggcagcuacgagcugcagacccuggagcugaacauggagacccugaacaugugcaugccccugagcugcaccaagaacagcagccaccacuacaucagagugggcaacgagaccggccuggagcugacccugaccaacaccagcaucaucaaccacaaguucugcaaccugagcgacgcccacaagagaaaccuguacgaccacgcccugaugagcauccugagcaccuuccaccugagcauccccaacuucaaccaguacgaggccaugagcugcgacuucaacggcggcaagaucagcgugcaguacaaccugagccacgccuacgccguggacgccgccgagcacugcggcaccguggccaacggcgugcugcagaccuucaugagaauggccuggggcggcagcuacaucgcccuggacagcggcagaggcaacugggacugcaucaugaccagcuaccaguaccugaucauccagaacaccaccugggaggaccacugccaguucagcagacccagccccaucggcuaccugggccugcugagccagagaaccagagacaucuacaucagcagaagacugcugggcaccuucaccuggacccugagcgacagcgagggcaacgagacccccggcggcuacugccugaccagauggaugcugaucgaggccgagcugaagugcuucggcaacaccgccguggccaagugcaacgagaagcacgacgaggaguucugcgacaugcugagacuguucgacuucugcaagcaggccauccagagacugaagagcgaggcccagaugagcauccagcugaucaacaaggccgugaacgcccugaucaacgaccagcugaucaugaagaaccaccugagagacaugaugggcauccccuacugcaacuacagcaaguacugguaccugaaccacaccagcagcggcagaaccagccugcccaagugcuggcuggugagcaacggcagcuaccugaacgagacccacuucagcgacgacaucgagcagcaggccgacaacaugaucaccgagaugcugcagaaggaguacaucgacagacagggcaagaccccccugggccugguggaccuguucguguucagcaccagcuucuaccugaucagcaucuuccugcaccugaucaagauccccacccacagacacaucgugggcaagcccugccccaagccccacagacugaaccacaugggcaucugcagcugcggccuguacaagcagcccggcgugcccaccagauggaagagaugaggacuaguuauaagacugacuagcccgaugggccucccaacgggcccuccuccccuccuugcaccgagauuaaucaaaggcucuuuucagagccaccaaaaaaaaaaaaaaaaaaaaaaaaaaaaaaaaaaaaaaaaaaaaaaaaaaaaaaaaaaaaaaaaagaauu

SEQ ID NO: 37899 - RNA, 1655 nt, Artificial Sequence
  mRNA product Design i-3 (hSL-A64-N5) comprising derived and/or modified sequence from LASV(KAK-428;Clade n.d. (VII))__ANH09740__GPCmut10 (opt4)
aggagaaagcuuaccaugggccagaucgugaccuucuuccaggaggugccccacgugaucgaggaggugaugaacaucgugcugaucgcccugagccugcuggccauccugaagggccuguacaacuucgccaccugcggcgugaucggccugaucaccuuccugcugcugugcggcagaagcugcagcgccaccuacaagggccaguacgagcugcagacccuggagcugaacauggagagccugaacaugugcaugccccugagcugcaccaagaacaacagccaccacuacaucagagccggcaacaacaccggccuggagcugacccugaccaacaccagcaucaucagccacaaguucugcaaccugagcgacgcccacaagaagaaccuguacgaccacacccugaugagcaucaucaccaccuuccaccugagcauccccaacuucaaccaguacgaggccaugagcugcgacuucaacggcggcaagaucagcauccaguacaaccugagccacagcuacgccggcgacgccgcccagcacugcggcaccguggccaacggcgugcugcagaccuucaugagaauggccuggggcggcagcuaccuggcccuggacagcggcagaagaggcugggacugcaucaucagcagcuaccaguaccugaucauccagaacaccaccugggacgaccacugccaguucagcagacccagccccaucggcuaccugggcuucgugagccagaagaccagagacaucuacaucagcagaagacugcugggcaccuucaccuggacccugagcgacagcgagggccacgacaugcccggcggcuacugccugaccagauggaugcugaucgaggccgaccugaagugcuucggcaacaccgccguggccaagugcaacgagaagcacgacgaggaguucugcgacauguggagacuguucgacuucugcaagcaggccauccagagacugaaggccgaggcccagaugaacauccagcugaucaacaaggccgugaacgcccugaucaacgaccagcugaugaugaagaaccaccugagagacaucaugggcauccccuacugcaacuacagcaaguucugguaccugaacaacaccaccaccggcagaaccagccugcccagaugcuggcugaucagcaacggcagcuaccugaacgagacccacuucagcgacgacaucgagcagcaggccgacaacaugaucaccgagaugcugcagaaggaguacauggacagacagggcaagaccccccugggccugguggaccuguucguguucagcaccagcuucuaccugaucaccaucuuccugcaccuggugaagauccccacccacagacacaucgugggcaagcccugccccaagccccacagacugaaccacaugggcaucugcagcugcggccuguacaagcagcccggcgugcccgugagauggaagagaugaggacuaguuauaagacugacuagcccgaugggccucccaacgggcccuccuccccuccuugcaccgagauuaaucaaaggcucuuuucagagccaccaaaaaaaaaaaaaaaaaaaaaaaaaaaaaaaaaaaaaaaaaaaaaaaaaaaaaaaaaaaaaaaaagaauu

SEQ ID NO: 37900 - RNA, 1655 nt, Artificial Sequence; identical to SEQ ID NO: 37894
  mRNA product Design i-3 (hSL-A64-N5) comprising derived and/or modified sequence from LASV(Pinneo-NIG-1969;Clade I)__AIT17836__GPCmut10 (opt4)

SEQ ID NO: 37901 - RNA, 1655 nt, Artificial Sequence
  mRNA product Design i-3 (hSL-A64-N5) comprising derived and/or modified sequence from LASV(ISTH0009-NIG-2011;Clade II)__AIT17404__GPCmut10 (opt4)
aggagaaagcuuaccaugggccagaucaucaccuucuuccaggaggugccccacgugaucgaggaggugaugaacaucgugcugaucgcccugagccugcuggccauccugaagggcaucuacaacguggccaccugcggccuguucggccuggugagcuuccugcugcugugcggcagaagcugcagcaccaccuacaagggcguguacgagcugcagacccuggagcuggacauggccagccugaacaugugcaugccccugagcugcaccaagaacaacagccaccacuacaucauggugggcaacgagaccggccuggagcugacccugaccaacaccagcaucaucaaccacaaguucugcaaccugagcgacgcccacaagaagaaccuguacgaccacgcccugaugagcaucaucagcaccuuccaccugagcauccccaacuucaaccaguacgaggccaugagcugcgacuucaacggcggcaagaucagcgugcaguacaaccugagccacgccuacgccguggacgccgccaaccacugcggcaccaucgccaacggcgugcugcagaccuucaugagaauggccuggggcggcagcuacaucgcccuggacagcggcaagggcagcugggacugcaucaugaccagcuaccaguaccugaucauccagaacaccaccugggaggaccacugccaguucagcagacccagccccaucggcuaccugggccugcugagccagagaaccagagacaucuacaucagcagaagacugcugggcaccuucaccuggacccugagcgacagcgagggcaacgagacccccggcggcuacugccugaccagauggaugcugaucgaggccgagcugaagugcuucggcaacaccgccguggccaagugcaacgagaagcacgacgaggaguucugcgacaugcugagacuguucgacuucugcaagcaggccaucagaagacugaagaccgaggcccagaugagcauccagcugaucaacaaggccgugaacgcccugaucaacgaccagcugaucaugaagaaccaccugagagacaucaugggcauccccuacugcaacuacagcaaguacugguaccugaaccacaccgugaccggcaagaccagccugcccagaugcuggcuggugagcaacggcagcuaccugaacgagacccacuucagcgacgacaucgagcagcaggccgacaacaugaucaccgagcugcugcagaaggaguacauggacagacagggcaagaccccccugggccugguggaccuguucguguucagcaccagcuucuaccugaucagcaucuuccugcaccugaucaagauccccacccacagacacaucaccggcaagcccugccccaagccccacagacugaaccacaugggcaucugcagcugcggccuguacaagcaccccggcgugcccgugaaguggaagagaugaggacuaguuauaagacugacuagcccgaugggccucccaacgggcccuccuccccuccuugcaccgagauuaaucaaaggcucuuuucagagccaccaaaaaaaaaaaaaaaaaaaaaaaaaaaaaaaaaaaaaaaaaaaaaaaaaaaaaaaaaaaaaaaaagaauu

SEQ ID NO: 37902 - RNA, 1655 nt, Artificial Sequence
  mRNA product Design i-3 (hSL-A64-N5) comprising derived and/or modified sequence from LASV(ISTH2010-NIG-2012;Clade II)__AIT17482__GPCmut10 (opt4)
aggagaaagcuuaccaugggccagaucaucaccuucuuccaggaggugccccacgugaucgaggaggugaugaacaucgugcugaucgcccugagccugcuggccauccugaagggcaucuacaacguggccaccugcggccuguucggccuggugagcuuccugcugcugugcggcagaagcugcagcaccaccuacaagggcguguacgagcugcagacccuggagcuggacauggccagccugaacaugugcaugccccugagcugcaccaagaacaacagccaccacuacaucauggugggcaacgagaccggccuggagcugacccugaccaacaccagcaucaucaaccacaaguucugcaaccugagcgacgcccacaagaagaaccuguacgaccacgcccugaugagcaucaucagcaccuuccaccugagcauccccaacuucaaccaguacgaggccaugagcugcgacuucaacggcggcaagaucagcgugcaguacaaccugagccacgccuacgccguggacgccgccaaccacugcggcaccaucgccaacggcgugcugcagaccuucaugagaauggccuggggcggcagcuacaucgcccuggacagcggcaagggcagcugggacugcaucaugaccagcuaccaguaccugaucauccagaacaucaccugggaggaccacugccaguucagcagacccagccccaucggcuaccugggccugcugagccagagaaccagagacaucuacaucagcagaagacugcugggcaccuucaccuggacccugagcgacagcgagggcaacgagacccccggcggcuacugccugaccagauggaugcugaucgaggccgagcugaagugcuucggcaacaccgccguggccaagugcaacgagaagcacgacgaggaguucugcgacaugcugagacuguucgacuucugcaagcaggccaucagaagacugaagaccgaggcccagaugagcauccagcugaucaacaaggccgugaacgcccugaucaacgaccagcugaucaugaagaaccaccugagagacaucaugggcauccccuacugcaacuacagcaaguacugguaccugaaccacaccgugaccggcaagaccagccugcccagaugcuggcuggugagcaacggcagcuaccugaacgagacccacuucagcgacgacaucgagcagcaggccgacaacaugaucaccgagcugcugcagaaggaguacaucgacagacagggcaagaccccccugggccugguggaccuguucguguucagcaccagcuucuaccugaucagcaucuuccugcaccuggugaagauccccacccacagacacguggugggcaagcccugccccaagccccacagacugaaccacaugggcaucugcagcugcggccuguacaagcaccccggcgugcccgugaaguggaagagaugaggacuaguuauaagacugacuagcccgaugggccucccaacgggcccuccuccccuccuugcaccgagauuaaucaaaggcucuuuucagagccaccaaaaaaaaaaaaaaaaaaaaaaaaaaaaaaaaaaaaaaaaaaaaaaaaaaaaaaaaaaaaaaaaagaauu

SEQ ID NO: 37903 - RNA, 1655 nt, Artificial Sequence
  mRNA product Design i-3 (hSL-A64-N5) comprising derived and/or modified sequence from LASV(Lassa virus/H.sapiens-wt/NGA/2015/ISTH_0543;Clade II)__AVO03639__GPCmut10 (opt4)
aggagaaagcuuaccaugggccagaucaucaccuucuuccaggaggugccccacgugaucgaggaggugaugaacaucgugcugaucgcccugagccugcuggccauccugaagggcaucuacaacguggccaccugcggccuguucggccuggugagcuuccugcugcugugcggcagaagcugcagcaccaccuacaagggcguguacgagcugcagacccuggagcuggacauggccaaccugaacaugugcaugccccugagcugcaccaagaacaacagccaccacuacaucauggugggcaacgagaccggccuggagcugacccugaccaacaccagcaucaucaaccacaaguucugcaaccugagcgacgcccacaagaagaaccuguacgaccacgcccugaugagcaucaucagcaccuuccaccugagcauccccaacuucaaccaguacgaggccaugagcugcgacuucaacggcggcaagaucagcgugcaguacaaccugagccacaccuacgccguggacgccgccaaccacugcggcaccaucgccaacggcgugcugcagaccuucaugagaauggccuggggcggcagcuacaucgcccuggacagcggcaagggcagcugggacugcaucaugaccagcuaccaguaccuggugauccagaacaccaccugggaggaccacugccaguucagcagacccagccccaucggcuaccugggccugcugagccagagaaccagagacaucuacaucagcagaagacugcugggcaccuucaccuggacccugagcgacagcgagggcaacgagacccccggcggcuacugccugaccagauggaugcugaucgaggccgagcugaagugcuucggcaacaccgccguggccaagugcaacgagaagcacgacgaggaguucugcgacaugcugagacuguucgacuucugcaagcaggccaucagaagacugaagaccgaggcccagaugagcauccagcugaucaacaaggccgugaacgcccugaucaacgaccagcugaucaugaagaaccaccugagagacaucaugggcauccccuacugcaacuacagcaaguacugguaccugaaccacaccgugaccggcaagaccagccugcccagaugcuggcuggugagcaacggcagcuaccugaacgagacccacuucagcgacgacaucgagcagcaggccgacaacaugaucaccgagcugcugcagaaggaguacaucgacagacagggcaagaccccccugggccugguggaccuguucguguucagcaccagcuucuaccugaucagcaucuuccugcaccuggugaagauccccacccacagacacaucaccggcaagcccugccccaagccccacagacugaaccacaugggcaucugcagcugcggccuguacaagcaccccggcgugcccgugaaguggaagagaugaggacuaguuauaagacugacuagcccgaugggccucccaacgggcccuccuccccuccuugcaccgagauuaaucaaaggcucuuuucagagccaccaaaaaaaaaaaaaaaaaaaaaaaaaaaaaaaaaaaaaaaaaaaaaaaaaaaaaaaaaaaaaaaaagaauu

SEQ ID NO: 37904 - RNA, 1655 nt, Artificial Sequence
  mRNA product Design i-3 (hSL-A64-N5) comprising derived and/or modified sequence from LASV(Lassa virus/H.sapiens-wt/NGA/2016/ISTH_0009;Clade II)__AVO03571__GPCmut10 (opt4)
aggagaaagcuuaccaugggccagaucaucaccuucuuccaggaggugccccacgugaucgaggaggugaugaacaucgugcugaucgcccugagccugcuggccauccugaagggcaucuacaacguggccaccugcggccugcugggccuggugagcuuccugcugcugugcggcagaagcugcagcaccaccuacaagggcguguacgagcugcagacccuggagcuggacauggccagccugaacaugugcaugccccugagcugcaccaagaacaacagccaccacuacaucauggugggcaacgagaccggccuggagcugacccugaccaacaccagcaucaucaaccacaaguucugcaaccugagcgacgcccacaagaagaaccuguacgaccacgcccugaugagcaucaucagcaccuuccaccugagcauccccaacuucaaccaguacgaggccaugagcugcgacuucaacggcggcagaaucagcgugcaguacaaccugagccacagcuacgccguggacgccgccaaccacugcggcaccaucgccaacggcgugcugcagaccuucaugagaauggccuggggcggcagcuacaucgcccuggacagcggcaagggcagcugggacugcaucaugaccagcuaccaguaccugaucauccagaacaccaccugggaggaccacugccaguucagcagacccagccccaucggcuaccugggccugcugagccagagaaccagagacaucuacaucagcagaagacugcugggcaccuucaccuggacccugagcgacagcgagggcaacgagacccccggcggcuacugccugaccagauggaugcugaucgaggccgagcugaagugcuucggcaacaccgccguggccaagugcaacgagaagcacgacgaggaguucugcgacaugcugagacuguucgacuucugcaagcaggccaucagaagacugaagaccgaggcccagaugagcauccagcugaucaacaaggccgugaacgcccugaucaacgaccagcugaucaugaagaaccaccugagagacaucaugggcauccccuacugcaacuacagcaaguacugguaccugaaccacaccgugaccggcaagaccagccugcccagaugcuggcuggugagcaacggcagcuaccugaacgagacccacuucagcgacgacaucgagcagcaggccgacaacaugaucaccgagcugcugcagaaggaguacaucgacagacagggcaagaccccccugggccugguggaccuguucguguucagcaccagcuucuaccugaucagcaucuuccugcaccuggugaagauccccacccacagacacaucaccggcaagcccugccccaagccccacagacugaaccacaugggcaucugcagcugcggccuguacaaccaccccggcgugcccgugaaguggaagagaugaggacuaguuauaagacugacuagcccgaugggccucccaacgggcccuccuccccuccuugcaccgagauuaaucaaaggcucuuuucagagccaccaaaaaaaaaaaaaaaaaaaaaaaaaaaaaaaaaaaaaaaaaaaaaaaaaaaaaaaaaaaaaaaaagaauu

SEQ ID NO: 37905 - RNA, 1655 nt, Artificial Sequence
  mRNA product Design i-3 (hSL-A64-N5) comprising derived and/or modified sequence from LASV(Lassa virus/H.sapiens-wt/NGA/2016/ISTH_0017;Clade II)__AVO03567__GPCmut10 (opt4)
aggagaaagcuuaccaugggccagaucaucaccuucuuccaggaggugccccacgugaucgaggaggugaugaacaucgugcugaucgcccugagccugcuggccauccugaagggcaucuacaacguggccaccugcggccuguucggccuggugagcuuccugcugcugugcggcagaagcugcagcaccaccuacaagggcguguacgagcugcagacccuggagcuggacauggccagccugaacaugugcaugccccugagcugcaccaagaacaacagccaccacuacaucauggugggcaacgagaccggccuggagcugacccugaccaacaccagcaucaucaaccacaaguucugcaaccugagcgacgcccacaagaagaaccuguacgaccacgcccugaugagcaucaucagcaccuuccaccugagcauccccaacuucaaccaguacgaggccaugagcugcgacuucaacggcggcaagaucagcgugcaguacaaccugagccacaccuacgccaucgacgccgccaaccacugcggcaccaucgccaacggcgugcugcagaccuucaugagaauggccuggggcggcagcuacaucgcccuggacagcggcaagggcagcugggacugcaucaugaccagcuaccaguaccugaucauccagaacaccaccugggaggaccacugccaguucagcagacccagccccaucggcuaccugggccugcugagccagagaaccagagacaucuacaucagcagaagacugcugggcaccuucaccuggacccugagcgacagcgagggcaacgagacccccggcggcuacugccugaccagauggaugcugaucgaggccgagcugaagugcuucggcaacaccgccguggccaagugcaacgagaagcacgacgaggaguucugcgacaugcugagacuguucgacuucugcaagcaggccaucagaagacugaagaccgaggcccagaugagcauccagcugaucaacaaggccgugaacgcccugaucaacgaccagcugaucaugaagaaccaccugagagacaucaugggcauccccuacugcaacuacagcaaguacugguaccugaaccacaccgugaccggcaagaccagccugcccagaugcuggcuggugagcaacggcagcuaccugaacgagacccacuucagcgacgacaucgagcagcaggccgacaacaugaucaccgagcugcugcagaaggaguacauggacagacagggcaagaccccccugggccugguggaccuguucguguucagcaccagcuucuaccugaucagcaucuuccugcaccuggugagaauccccacccacagacacgugaucggcaagcccugccccaagccccacagacugaaccacaugggcaucugcagcugcggccuguacaagcaccccggcgugcccgugaaguggaagagaugaggacuaguuauaagacugacuagcccgaugggccucccaacgggcccuccuccccuccuugcaccgagauuaaucaaaggcucuuuucagagccaccaaaaaaaaaaaaaaaaaaaaaaaaaaaaaaaaaaaaaaaaaaaaaaaaaaaaaaaaaaaaaaaaagaauu

SEQ ID NO: 37906 - RNA, 1655 nt, Artificial Sequence
  mRNA product Design i-3 (hSL-A64-N5) comprising derived and/or modified sequence from LASV(Lassa virus/H.sapiens-wt/NGA/2018/ISTH_0959;Clade II)__AVV65099__GPCmut10 (opt4)
aggagaaagcuuaccaugggccagaucaucaccuucuuccaggaggugccccacgugaucgaggaggugaugaacaucgugcugaucgcccugagccugcuggccauccugaagggcaucuacaacguggugaccugcggccuguucggccuggugagcuuccugcugcugugcggcagaagcugcagcaccaccuacaagggcguguacgagcugcagacccuggagcuggacauggccagccugaacaugugcaugccccugagcugcaccaagaacaacagccaccacuacaucauggugggcaacgagaccggccuggagcugacccugaccaacaccagcaucaucaaccacaaguucugcaaccugagcgacgcccacaagaagaaccuguacgaccacgcccugaugagcaucaucagcaccuuccaccugagcauccccaacuucaaccaguacgaggccaugagcugcgacuucaacggcggcaagaucagcgugcaguacaaccugagccacgccuacgccaucgacgccgccaaccacugcggcaccaucgccaacggcgugcugcagaccuucaugagaauggccuggggcggcagcuacaucgcccuggacagcggcaagggcagcugggacugcaucaugaccagcuaccaguaccugaucauccagaacaccaccugggaggaccacugccaguucagcagacccagccccaucggcuaccugggccugcugagccagagaaccagagacaucuacaucagcagaagacugcugggcaccuucaccuggacccugagcgacagcgagggcaacgagacccccggcggcuacugccugaccagauggaugcugaucgaggccgagcugaagugcuucggcaacaccgccguggccaagugcaacgagaagcacgacgaggaguucugcgacaugcugagacuguucgacuucugcaagcaggccaucagaagacugaagaccgaggcccagaugagcauccagcugaucaacaaggccgugaacgcccugaucaacgaccagcugaucaugaagaaccaccugagagacaucaugggcauccccuacugcaacuacagcaaguacugguaccugaaccacaccgugaccggcaagaccagccugcccagaugcuggcuggugagcaacggcagcuaccugaacgagacccacuucagcgacgacaucgagcagcaggccgacaacaugaucaccgagcugcugcagaaggaguacaucgacagacagggcaagaccccccugggccugguggaccuguucguguucagcaccagcuucuaccugaucagcaucuuccugcaccuggugaagauccccacccacagacacgugaucggcaagcccugccccaagccccacagacugaaccacaugggcaucugcagcugcggccuguacaagcaccccggcgugcccgugaaguggaagagaugaggacuaguuauaagacugacuagcccgaugggccucccaacgggcccuccuccccuccuugcaccgagauuaaucaaaggcucuuuucagagccaccaaaaaaaaaaaaaaaaaaaaaaaaaaaaaaaaaaaaaaaaaaaaaaaaaaaaaaaaaaaaaaaaagaauu

SEQ ID NO: 37907 - RNA, 1655 nt, Artificial Sequence
  mRNA product Design i-3 (hSL-A64-N5) comprising derived and/or modified sequence from LASV(LASV003-NIG-2008;Clade II)__AIT17580__GPCmut10 (opt4)
aggagaaagcuuaccaugggccagaucaucaccuucuuccaggaggugccccacgugaucgaggaggugaugaacaucgugcugaucgcccugagccugcuggccauccugaagggcaucuacaacguggccaccugcggccuguucggccuggugagcuuccugcugcugugcggcagaagcugcagcaccaccuacaagggcguguacgagcugcagacccuggagcuggacauggccagccugaacaugugcaugccccugagcugcaccaagaacaacagccaccacuacaucauggugggcaacgagaccggccuggagcugacccugaccaacaccagcaucaucaaccacaaguucugcaaccugagcgacgcccacaagaagaaccuguacgaccacgcccugaugagcaucaucagcaccuuccaccugagcauccccaacuucaaccaguacgaggccaugagcugcgacuucaacggcggcaagaucagcgugcaguacaaccugagccacaccuacgccguggacgccgccaaccacugcggcaccaucgccaacggcgugcugcagaccuucaugagaauggccuggggcggcagcuacaucgcccuggacagcggcaagggcagcugggacugcaucaugaccagcuaccaguaccugaucauccagaacaccaccugggaggaccacugccaguucagcagacccagccccaucggcuaccugggccugcugagccagagaaccagagacaucuacaucagcagaagacugcugggcaccuucaccuggacccugagcgacagcgagagcaacgagacccccggcggcuacugccugaccagauggaugcugaucgaggccgagcugaagugcuucggcaacaccgccguggccaagugcaacgagaagcacgacgaggaguucugcgacaugcugagacuguucgacuucugcaagcaggccaucagaagacugaaggccgaggcccagaugagcauccagcugaucaacaaggccgugaacgcccugaucaacgaccagcugaucaugaagaaccaccugagagacaucaugggcauccccuacugcaacuacagcaaguacugguaccugaaccacaccgugaccggcagaaccagccugcccagaugcuggcuggugagcaacggcagcuaccugaacgagacccacuucagcgacgacaucgagcagcaggccgacaacaugaucaccgagcugcugcagaaggaguacauggacagacagggcaagaccccccugggccugguggaccuguucguguucagcaccagcuucuaccugaucagcaucuuccugcaccuggugaagauccccacccacagacacgugaucggcaagcccugccccaagccccacagacugaaccacaugggcaucugcagcugcggccuguacaagcaccccggcgugcccgugaaguggaagagaugaggacuaguuauaagacugacuagcccgaugggccucccaacgggcccuccuccccuccuugcaccgagauuaaucaaaggcucuuuucagagccaccaaaaaaaaaaaaaaaaaaaaaaaaaaaaaaaaaaaaaaaaaaaaaaaaaaaaaaaaaaaaaaaaagaauu

SEQ ID NO: 37908 - RNA, 1655 nt, Artificial Sequence
  mRNA product Design i-3 (hSL-A64-N5) comprising derived and/or modified sequence from LASV(LASV035-NIG-2009;Clade II)__AIT17588__GPCmut10 (opt4)
aggagaaagcuuaccaugggccagaucaucaccuucuuccaggaggugccccacgugaucgaggaggugaugaacaucgugcugaucgcccugagccugcuggccauccugaagggcaucuacaacguggccaccugcggccuguucggccuggugagcuuccugcugcugugcggcagaagcugcagcaccaccuacaagggcguguacgagcugcagacccuggagcuggacauggccagccugaacaugugcaugccccugagcugcaccaagaacaacagccaccacuacaucauggugggcaacgagaccggccuggagcugacccugaccaacaccagcaucaucaaccacaaguucugcaaccugagcgacgcccacaagaagaaccuguacgaccacgcccugaugagcaucaucagcaccuuccaccugagcauccccaacuucaaccaguacgaggccaugagcugcgacuucaacggcggcaagaucagcgugcaguacaaccugagccacgccuacgccguggacgccgccaaccacugcggcaccaucgccaacggcgugcugcagaccuucaugagaauggccuggggcggcagcuacaucgcccuggacagcggcaagggcagcugggacugcaucaugaccagcuaccaguaccugaucauccagaacaccaccugggaggaccacugccaguucagcagacccagccccaucggcuaccugggccugcugagccagagaaccagagacaucuacaucagcagaagacugcugggcaccuucaccuggacccugagcgacagcgagggcaacgagacccccggcggcuacugccugaccagauggaugcugaucgaggccgagcugaagugcuucggcaacaccgccguggccaagugcaacgagaagcacgacgaggaguucugcgacaugcugagacuguucgacuucugcaagcaggccaucagaagacugaaggccgaggcccagaugagcauccagcugaucaacaaggccgugaacgcccugaucaacgaccagcugaucaugaagaaccaccugagagacaucaugggcauccccuacugcaacuacagcaaguacugguaccugaaccacaccgugaccggcaagaccagccugcccagaugcuggcuggugagcaacggcagcuaccugaacgagacccacuucagcgacgacaucgagcagcaggccgacaacaugaucaccgagcugcugcagaaggaguacaucgacagacagggcaagaccccccugggccugguggaccuguucguguucagcaccagcuucuaccugaucagcaucuuccugcaccuggugaagauccccacccacagacacgugaucggcaagcccugccccaagccccacagacugaaccacaugggcaucugcagcugcggccuguacaagcaccccggcgugcccgugaaguggaagagaugaggacuaguuauaagacugacuagcccgaugggccucccaacgggcccuccuccccuccuugcaccgagauuaaucaaaggcucuuuucagagccaccaaaaaaaaaaaaaaaaaaaaaaaaaaaaaaaaaaaaaaaaaaaaaaaaaaaaaaaaaaaaaaaaagaauu

SEQ ID NO: 37909 - RNA, 1655 nt, Artificial Sequence
  mRNA product Design i-3 (hSL-A64-N5) comprising derived and/or modified sequence from LASV(LASV1000-NIG-2009;Clade II)__AIT17782__GPCmut10 (opt4)
aggagaaagcuuaccaugggccagaucaucaccuucuuccaggaggugccccacgugaucgaggaggugaugaacaucgugcugaucgcccugagccugcuggccauccugaagggcaucuacaacguggccaccugcggccuguucggccuggugagcuuccugcugcugugcggcagaagcugcagcaccaccuacaagggcguguacgagcugcagacccuggagcuggacauggccagccugaacaugugcaugccccugagcugcaccaagaacaacagccaccacuacaucauggugggcaacgagaccggccuggagcugacccugaccaacaccagcaucaucaaccacaaguucugcaaccugagcgacgcccacaagaagaaccuguacgaccacgcccugaugagcaucaucagcaccuuccaccugagcauccccaacuucaaccaguacgaggccaugagcugcgacuucaacggcggcaagaucagcgugcaguacaaccugagccacaccuacgccguggacgccgccaaccacugcggcaccaucgccaacggcgugcugcagaccuucaugagaauggccuggggcggcagcuacaucgcccuggacagcggcaagggcagcugggacugcaucaugaccagcuaccaguaccugaucauccagaacaccaccugggaggaccacugccaguucagcagacccagccccaucggcuaccugggccugcugagccagagaaccagagacaucuacaucagcagaagacugcugggcaccuucaccuggacccugagcgacagcgagggcaacgagacccccggcggcuacugccugaccagauggaugcugaucgaggccgagcugaagugcuucggcaacaccgccguggccaagugcaacgagaagcacgacgaggaguucugcgacaugcugagacuguucgacuucugcaagcaggccaucaagagacugaagaccgaggcccagaugagcauccagcugaucaacaaggccgugaacgcccugaucaacgaccagcugaucaugaagaaccaccugagagacaucaugggcauccccuacugcaacuacagcaaguacugguaccugaaccacaccgugaccggcaagaccagccugcccagaugcuggcuggugagcaacggcagcuaccugaacgagacccacuucagcgacgacaucgagcagcaggccgacaacaugaucaccgagcugcugcagaaggaguacaucgacagacagggcaagaccccccugggccugguggaccuguucguguucagcaccagcuucuaccugaucagcaucuuccugcaccuggugaagauccccacccacagacacguggugggcaagcccugccccaagccccacagacugaaccacaugggcaucugcagcugcggccuguacaagcaccccggcgugcccgugaaguggaagagaugaggacuaguuauaagacugacuagcccgaugggccucccaacgggcccuccuccccuccuugcaccgagauuaaucaaaggcucuuuucagagccaccaaaaaaaaaaaaaaaaaaaaaaaaaaaaaaaaaaaaaaaaaaaaaaaaaaaaaaaaaaaaaaaaagaauu

SEQ ID NO: 37910 - RNA, 1655 nt, Artificial Sequence
  mRNA product Design i-3 (hSL-A64-N5) comprising derived and/or modified sequence from LASV(LASV221-NIG-2010;Clade II)__AIT17624__GPCmut10 (opt4)
aggagaaagcuuaccaugggccagaucaucaccuucuuccaggaggugccccacgugaucgaggaggugaugaacaucgugcugaucgcccugagccugcuggccauccugaagggcaucuacaacguggccaccugcggccuguucggccuggugagcuuccugcugcugugcggcagaagcugcagcaccaccuacaagggcguguacgagcugcagacccuggagcuggacauggccagccugaacaugugcaugccccugagcugcaccaagaacaacagccaccacuacaucauggugggcaacgagaccggccuggagcugacccugaccaacaccagcaucaucaaccacaaguucugcaaccugagcgacgcccacaagaagaaccuguacgaccacgcccugaugagcaucaucagcaccuuccaccugagcauccccaacuucaaccaguacgaggccaugagcugcgacuucaacggcggcaagaucagcgugcaguacaaccugagccacaccuacgccaucgacgccgccaaccacugcggcaccaucgccaacggcgugcugcagaccuucaugagaauggccuggggcggcagcuacaucgcccuggacagcggcaagggcagcugggacugcaucaugaccagcuaccaguaccugaucauccagaacaccaccugggaggaccacugccaguucagcagacccagccccaucggcuaccugggccugcugagccagagaaccagagacaucuacaucagcagaagacugcugggcaccuucaccuggacccugagcgacagcgagggcaacgagacccccggcggcuacugccugaccagauggaugcugaucgaggccgagcugaagugcuucggcaacaccgccguggccaagugcaacgagaagcacgacgaggaguucugcgacaugcugagacuguucgacuucugcaagcaggccaucagaagacugaagaccgaggcccagaugagcauccagcugaucaacaaggccgugaacgcccugaucaacgaccagcugaucaugaagaaccaccugagagacaucaugggcauccccuacugcaacuacagcaaguacugguaccugaaccacaccgugaccggcaagaccagccugcccagaugcuggcuggugagcaacggcagcuaccugaacgagacccacuucagcgacgacaucgagcagcaggccgacaacaugaucaccgagaugcugcagaaggaguacauggacagacagggcaagaccccccugggccugguggaccuguucguguucagcaccagcuucuaccugaucagcaucuuccugcaccuggugaagauccccacccacagacacgugaucggcaagcccugccccaagccccacagacugaaccacaugggcaucugcagcugcggccuguacaagcaccccggcgugcccgugaaguggaagagaugaggacuaguuauaagacugacuagcccgaugggccucccaacgggcccuccuccccuccuugcaccgagauuaaucaaaggcucuuuucagagccaccaaaaaaaaaaaaaaaaaaaaaaaaaaaaaaaaaaaaaaaaaaaaaaaaaaaaaaaaaaaaaaaaagaauu

SEQ ID NO: 37911 - RNA, 1655 nt, Artificial Sequence
  mRNA product Design i-3 (hSL-A64-N5) comprising derived and/or modified sequence from LASV(LASV237-NIG-2010;Clade II)__AIT17638__GPCmut10 (opt4)
aggagaaagcuuaccaugggccagaucaucaccuucuuccaggaggugccccacgugaucgaggaggugaugaacaucgugcugaucgcccugagccugcuggccauccugaagggcaucuacaacguggccaccugcggccuguucggccuggugagcuuccugcugcugugcggcagaagcugcagcaccaccuacaagggcguguacgagcugcagacccuggagcuggacauggccagccugaacaugugcaugccccugagcugcaccaagaacaacagccaccacuacaucauggugggcaacgagaccggccuggagcugacccugaccaacaccagcaucaucaaccacaaguucugcaaccugagcgacgcccacaagaaggaccuguacgaccacgcccugaugagcaucaucagcaccuuccaccugagcauccccaacuucaaccaguacgaggccaugagcugcgacuucaacggcggcaagaucagcgugcaguacaaccugagccacaccuacgccguggacgccgccaaccacugcggcaccaucgccaacggcgugcugcagaccuucaugagaauggccuggggcggcagcuacaucgcccuggacagcggcaagggcagcugggacugcaucaugaccagcuaccaguaccugaucauccagaacaccaccugggaggaccacugccaguucagcagacccagccccaucggcuaccugggccugcugagccagagaaccagagacaucuacaucagcagaagacugcugggcaccuucaccuggacccugagcgacagcgagggcaacgagacccccggcggcuacugccugaccagauggaugcugaucgaggccgagcugaagugcuucggcaacaccgccguggccaagugcaacgagaagcacgacgaggaguucugcgacaugcugagacuguucgacuucugcaagcaggccaucagaagacugaagaccgaggcccagaugagcauccagcugaucaacaaggccgugaacgcccugaucaacgaccagcugaucaugaagaaccaccugagagacaucaugggcauccccuacugcaacuacagcaaguacugguaccugaaccacaccgugaccggcaagaccagccugcccagaugcuggcuggugagcaacggcagcuaccugaacgagacccacuucagcgacgacaucgagcagcaggccgacaacaugaucaccgagcugcugcagaaggaguacauggacagacagggcaagaccccccugggccugguggaccuguucguguucagcaccagcuucuaccugaucagcaucuuccugcaccugaucaagauccccacccacagacacaucaccggcaagcccugccccaagccccacagacugaaccacaugggcaucugcagcugcggccuguacaagcaccccggcgugcccgugaaguggaagagaugaggacuaguuauaagacugacuagcccgaugggccucccaacgggcccuccuccccuccuugcaccgagauuaaucaaaggcucuuuucagagccaccaaaaaaaaaaaaaaaaaaaaaaaaaaaaaaaaaaaaaaaaaaaaaaaaaaaaaaaaaaaaaaaaagaauu

SEQ ID NO: 37912 - RNA, 1655 nt, Artificial Sequence
  mRNA product Design i-3 (hSL-A64-N5) comprising derived and/or modified sequence from LASV(LASV253-NIG-2011;Clade II)__AIT17670__GPCmut10 (opt4)
aggagaaagcuuaccaugggccagaucaucaccuucuuccaggaggugccccacgugaucgaggaggugaugaacaucgugcugaucgcccugagccugcuggccauccugaagggcaucuacaacguggccaccugcggccuguucggccuggugagcuuccugcugcugugcggcagaagcugcagcaccaccuacaagggcguguacgagcugcagacccuggagcuggacauggccagccugaacaugugcaugccccugagcugcaccaagaacaacagccaccacuacaucauggugggcaacgagaccggccuggagcugacccugaccaacaccagcaucaucaaccacaaguucugcaaccugagcgacgcccacaagaagaaccuguacgaccacgcccugaugagcaucaucagcaccuuccaccugagcauccccaacuucaaccaguacgaggccaugagcugcgacuucaacggcggcaagaucagcgugcaguacaaccugagccacaccuacgccguggacgccgccaaccacugcggcaccaucgccaacggcgugcugcagaccuucaugagaauggccuggggcggcagcuacaucgcccuggacagcggcaagggcagcugggacugcaucaugaccagcuaccaguaccugaucauccagaacaccaccugggaggaccacugccaguucagcagacccagccccaucggcuaccugggccugcugagccagagaaccagagacaucuacaucagcagaagacugcugggcaccuucaccuggacccugagcgacagcgagggcaacgagacccccggcggcuacugccugaccagauggaugcugaucgaggccgagcugaagugcuucggcaacaccgccguggccaagugcaacgagaagcacgacgaggaguucugcgacaugcugagacuguucgacuucugcaagcaggccaucagaagacugaaggccgaggcccagaugagcauccagcugaucaacaaggccgugaacgcccugaucaacgaccagcugaucaugaagaaccaccugagagacaucaugggcauccccuacugcaacuacagcaaguacugguaccugaaccacaccgugaccggcagaaccagccugcccagaugcuggcuggugagcaacggcagcuaccugaacgagacccacuucagcgacgacaucgagcagcaggccgacaacaugaucaccgagcugcugcagaaggaguacaucgacagacagggcaagaccccccugggccugguggaccuguucguguucagcaccagcuucuaccugaucagcaucuuccugcaccuggugaagauccccacccacagacacaucaucggcaagcccugccccaagccccacagacugaaccacaugggcaucugcagcugcggccuguacaagcaccccggcgugcccgugaaguggaagagaugaggacuaguuauaagacugacuagcccgaugggccucccaacgggcccuccuccccuccuugcaccgagauuaaucaaaggcucuuuucagagccaccaaaaaaaaaaaaaaaaaaaaaaaaaaaaaaaaaaaaaaaaaaaaaaaaaaaaaaaaaaaaaaaaagaauu

SEQ ID NO: 37913 - RNA, 1655 nt, Artificial Sequence
  mRNA product Design i-3 (hSL-A64-N5) comprising derived and/or modified sequence from LASV(LASV254-NIG-2011;Clade II)__AIT17674__GPCmut10 (opt4)
aggagaaagcuuaccaugggccagaucaucaccuucuuccaggaggugccccacgugaucgaggaggugaugaacaucgugcugaucgcccugagccugcuggccauccugaagggcaucuacaacguggccaccugcggccuguucggccuggugagcuuccugcugcugugcggcagaagcugcagcaccaccuacaagggcguguacgagcugcagacccuggagcuggacaugaccaaccugaacaugugcaugccccugagcugcaccaagaacaacagccaccacuacaucauggugggcaacgagaccggccuggagcugacccugaccaacaccagcaucaucaaccacaaguucugcaaccugagcgacgcccacaagaagaaccuguacaaccacgcccugaugagcaucaucagcaccuuccaccugagcauccccaacuucaaccaguacgaggccaugagcugcgacuucaacggcggcaagaucagcgugcaguacaaccugagccacagcuacgccguggacgccgccaaccacugcggcaccaucgccaacggcgugcugcagaccuucaugagaauggccuggggcggcagcuacaucgcccuggacagcggcaagggcaacugggacugcaucaugaccagcuaccaguaccugaucauccagaacaccaccugggaggaccacugccaguucagcagacccagccccaucggcuaccugggccugcugagccagagaaccagagacaucuacaucagcagaagacugcugggcaccuucaccuggacccugagcgacagcgagggcaacgagacccccggcggcuacugccugaccagauggaugcugaucgaggccgagcugaagugcuucggcaacaccgccguggccaagugcaacgagaagcacgacgaggaguucugcgacaugcugagacuguucgacuucugcaagcaggccaucagaagacugaagaccgaggcccaggccaacauccagcugaucaacaaggccgugaacgcccugaucaacgaccagcugaucaugaagaaccaccugagagacaucaugggcauccccuacugcaacuacagcaaguacugguaccugaaccacaccgugaccggcaagaccagccugcccagaugcuggcuggugagcaacggcagcuaccugaacgagacccacuucagcgacgacaucgagcagcaggccgacaacaugaucaccgagcugcugcagaaggaguacauggacagacagggcaagaccccccugggccugguggaccuguucguguucagcaccagcuucuaccugaucagcaucuuccugcaccuggugaagauccccacccacagacacgugaucggcaagcccugccccaagccccacagacugaaccacaugggcaucugcagcugcggccuguacaagcaccccggcgugcccgugaaguggaagagaugaggacuaguuauaagacugacuagcccgaugggccucccaacgggcccuccuccccuccuugcaccgagauuaaucaaaggcucuuuucagagccaccaaaaaaaaaaaaaaaaaaaaaaaaaaaaaaaaaaaaaaaaaaaaaaaaaaaaaaaaaaaaaaaaagaauu

SEQ ID NO: 37914 - RNA, 1655 nt, Artificial Sequence
  mRNA product Design i-3 (hSL-A64-N5) comprising derived and/or modified sequence from LASV(Nig08-A19;Clade III)__ADU56618__GPCmut10 (opt4)
aggagaaagcuuaccaugggccagaucgugaccuucuuccaggaggugccccacgugaucgaggaggugaugaacaucgugcugaucgcccugagcauccuggccauccugaagggccuguacaacaucgccaccugcggccugaucggccuggugaccuuccugcugcugagcggcagaagcugcagcaugaccuacaagggcguguacgagcugcagacccuggagcugaacaugaacacccugaacaugugcaugccccugagcugcaccaagaacaacagccaccacuacaucauggugggcaacgagaccggccuggagcugacccugaccaacaccagccugcugcaccacaaguucugcaaccugagcgacgcccacaagaagaaccuguacgaccacacccugaugagcaucaucagcaccuuccaccugagcauccccaacuucaaccaguacgaggccaugagcugcgacuucaacggcggcaagaucaccgugcaguacaaccugagccacagcuacgccaucgacgccgccaaccacugcggcaccguggccaacggcgugcugcagaccuucaugagaauggccuggggcggcagcuacaucgcccuggacagcggcagaggcaagugggacugcaucaugaccagcuaccaguaccugaucauccagaacaccaccugggaggaccacugccaguucagcagacccagccccaucggcuaccugggccugcugagccagagaaccagagacaucuacaucagcagaagacugcugggcaccuucaccuggacccugagcgacagcgagggcaacgagacccccggcggcuacugccugaccagauggaugcugaucgaggccgagcugaagugcuucggcaacaccgccguggccaagugcaacgagaagcacgacgaggaguucugcgacaugcugagacuguucgacuucugcaagcaggccaucagaagacugaaggccgaggcccagaugagcauccagcugaucaacaaggccgugaacgcccugaucaacgaccagcugaucaugaagaaccaccugagagacaucaugggcauccccuacugcaacuacagcaaguacugguaccugaaccacaccagcaccggcagaaccagccugcccagaugcuggcuggugagcaacggcagcuaccugaacgagacccacuucagcgacgacaucgagcagcaggccgacaacaugaucaccgagaugcugcagaaggaguaccuggacagacagggcaagaccccccugggccugguggaccuguucguguucagcaccagcuucuaccugaucagcaucuuccugcaccuggugaagauccccacccacagacacaucgugggcaagcccugccccaagccccacagacugaaccacaugggcaucugcagcugcggccuguacaagcagcccggcgugcccgugagauggaagagaugaggacuaguuauaagacugacuagcccgaugggccucccaacgggcccuccuccccuccuugcaccgagauuaaucaaaggcucuuuucagagccaccaaaaaaaaaaaaaaaaaaaaaaaaaaaaaaaaaaaaaaaaaaaaaaaaaaaaaaaaaaaaaaaaagaauu

SEQ ID NO: 37915 - RNA, 1658 nt, Artificial Sequence
  mRNA product Design i-3 (hSL-A64-N5) comprising derived and/or modified sequence from LASV(G1180-SLE-2010;Clade IV)__AIT17168__GPCmut10 (opt4)
aggagaaagcuuaccaugggccagaucgugaccuucuuccaggaggugccccacgugaucgaggaggugaugaacaucgugcugaucgcccugagcauccuggccgugcugaagggccuguacaacuucgccaccugcggccuggugggccugcugaccuuccugcugcugugcggcagaagcugcaccgccagcagauacaagggcguguacgagcugcagacccuggagcugaacauggagacccugaacaugugcaugccccugagcugcaccaagaacaacagccaccacuacaucauggugggcaacgagaccggccuggagcugacccugaccaacaccagcaucaucaaccacaaguucugcaaccugagcgacgcccacaagaagaaccuguacgaccacgcccugaugagcaucaucagcaccuuccaccugagcauccccaacuucaaccaguacgaggccaugagcugcgacuucaacggcggcaagaucagcgugcaguacaaccugagccacagcuacgccggcgacgccgccaaccacugcggcaccguggccaacggcgugcugcagaccuucaugagaauggccuggggcggcagcuacaucgcccuggacagcggccacggcagcugggacugcaucaugaccagcuaccaguaccugaucauccagaacaccaccugggaggaccacugccaguucagcagacccagccccaucggcuaccugggccugcugagccagagaaccagagacaucuacaucagcagaagacugcugggcaccuucaccuggacccugagcgacagcgagggcaaggacacccccggcggcuacugccugaccagauggaugcugaucgaggccgagcugaagugcuucggcaacaccgccguggccaagugcaacgagaagcacgacgaggaguucugcgacaugcugagacuguucgacuucugcaagcaggccauccagagacugaaggccgaggcccagaugagcauccagcugaucaacaaggccgugaacgcccugaucaacgaccagcugaucaugaagaaccaccugagagacaucaugggcauccccuacugcaacuacagcaaguacugguaccugaaccacaccaccaccggcaagaccagccugcccaagugcuggcuggugagcaacggcagcuaccugaacgagacccacuucagcgacgacaucgagcagcaggccgacaacaugaucaccgagaugcugcagaaggaguacauggagagacagggcaagaccccccugggccugguggaccuguucguguucagcaccagcuucuaccugaucagcaucuuccugcaccuggugaagauccccacccacagacacaucgugggcaagagcugccccaagccccacagacugaaccacaugggcaucugcagcugcggccuguacaagcagcccggcgugcccgugaaguggaagagaugaggacuaguuauaagacugacuagcccgaugggccucccaacgggcccuccuccccuccuugcaccgagauuaaucaaaggcucuuuucagagccaccaaaaaaaaaaaaaaaaaaaaaaaaaaaaaaaaaaaaaaaaaaaaaaaaaaaaaaaaaaaaaaaaagaauu

SEQ ID NO: 37916 - RNA, 1658 nt, Artificial Sequence
  mRNA product Design i-3 (hSL-A64-N5) comprising derived and/or modified sequence from LASV(G1442-SLE-2011;Clade IV)__AIT17180__GPCmut10 (opt4)
aggagaaagcuuaccaugggccagaucgugaccuucuuccaggaggugccccacgugaucgaggaggugaugaacaucgugcugaucgcccugagcauccuggccgugcugaagggccuguacaacguggccaccugcggccugaucggccuggugaccuuccugcugcugugcggcagaagcugcaccaccacccuguacaagggcguguacgagcugcagacccuggagcugaacauggagacccugaacaugugcaugccccugagcugcaccaagaacaacagccaccacuacaucagagugggcaacgagaccggccuggagcugacccugaccaacaccagcaucaucaaccacaaguucugcaaccugagcgacgcccacaagaagaaccuguacgaccacgcccugaugagcaucaucagcaccuuccaccugagcauccccaacuucaaccaguacgaggccaugagcugcgacuucaacggcggcaagaucagcgugcaguacaaccugagccacagcuacgccggcgacgccgccaaccacugcggcaccguggccaacggcgugcugcagaccuucaugagaauggccuggggcggcagcuacaucgcccuggacagcggcagaggcaacugggacugcaucaugaccagcuaccaguaccugaucauccagaacaccaccugggacgaccacugccaguucagcagacccagccccaucggcuaccugggccugcugagccagagaaccagagacguguacaucagcagaagacugcugggcaccuucaccuggacccugagcgacagcgagggcaaggacacccccggcggcuacugccugaccagauggaugcugaucgaggccgagcugaagugcuucggcaacaccgccguggccaagugcaacgagaagcacgacgaggaguucugcgacaugcugagacuguucgacuucugcaagcaggccauccagagacugaaggccgaggcccagaugagcauccagcugaucaacaaggccgugaacgcccugaucaacgaccagcugaucaugaagaaccaccugagagacaucaugggcauccccuacugcaacuacagcaaguacugguaccugaacaacaccgccaccggcaagaccagccugcccaagugcuggcugaucagcaacggcagcuaccugaacgagacccacuucagcgacgacaucgagcaggaggccgacaacaugaucaccgagaugcugcagaaggaguacauggagagacagggcaagaccccccugggccugguggaccuguucguguucagcaccagcuucuaccugaucagcaucuuccugcaccuggugaagauccccacccacagacacaucgugggcaagagcugccccaagccccacagacugaaccacaugggcaucugcagcugcggccuguacaagcagcccggcgugcccgugagauggaagagaugaggacuaguuauaagacugacuagcccgaugggccucccaacgggcccuccuccccuccuugcaccgagauuaaucaaaggcucuuuucagagccaccaaaaaaaaaaaaaaaaaaaaaaaaaaaaaaaaaaaaaaaaaaaaaaaaaaaaaaaaaaaaaaaaagaauu

SEQ ID NO: 37917 - RNA, 1658 nt, Artificial Sequence
  mRNA product Design i-3 (hSL-A64-N5) comprising derived and/or modified sequence from LASV(G3010-SLE-2013;Clade IV)__AIT17344__GPCmut10 (opt4)
aggagaaagcuuaccaugggccagaucgugaccuucuuccaggaggugccccacgugaucgaggaggugaugaacaucgugcugaucgcccugagcauccuggccgugcugaagggccuguacaacuucgccaccugcggccuggugggccuggugaccuuccugcugcugugcggcagaagcugcaccaccagccuguacaagggcguguacgagcugcagacccuggagcugaacauggagacccugaacaugugcaugccccugagcugcaccaagaacaacagccaccacuacaucauggugggcaacgagaccggccuggagcugacccugaccaacaccagcaucaucaaccacaaguucugcaaccugagcgacgcccacaagaagaaccuguacaaccacgcccugaugagcaucaucagcaccuuccaccugagcauccccaacuucaaccaguacgaggccaugagcugcgacuucaacggcggcaagaucagcgugcaguacaaccugagccacagcuacgccggcgacgccgccagccacugcggcaccguggccaacggcgugcugcagaccuucaugagaauggccuggggcggcagcuacaucgcccuggacagcggcuacggcaagugggacugcaucaugaccagcuaccaguaccugaucauccagaacaccaccugggaggaccacugccaguucagcagacccagccccaucggcuaccugggccugcugagccagagaaccagagacaucuacaucagcagaagacugcugggcaccuucaccuggacccugagcgacagcgagggcaaggacacccccggcggcuacugccugaccagauggaugcugaucgaggccgagcugaagugcuucggcaacaccgccguggccaagugcaacgagaagcacgacgaggaguucugcgacaugcugagacuguucgacuucugcaagcaggccauccagagacugaagaccgaggcccagaugagcauccagcugaucaacaaggccgugaacgcccugaucaacgaccagcugaucaugaagaaccaccugagagacaucaugggcauccccuacugcaacuacagcaaguacugguaccugaaccacaccaccaccggcaagaccagccugcccaagugcuggcuggugagcaacggcagcuaccugaacgagacccacuucagcgacgacaucgagcagcaggccgacaacaugaucaccgagaugcugcagaaggaguacauggagagacagggcaagaccccccugggccugguggaccuguucguguucagcaccagcuucuaccugaucagcaucuuccugcaccuggugaagauccccacccacagacacaucgugggcaagagcugccccaagccccacagacugaaccacaugggcaucugcagcugcggccuguacaagcagcccggcgugcccgugagauggaagagaugaggacuaguuauaagacugacuagcccgaugggccucccaacgggcccuccuccccuccuugcaccgagauuaaucaaaggcucuuuucagagccaccaaaaaaaaaaaaaaaaaaaaaaaaaaaaaaaaaaaaaaaaaaaaaaaaaaaaaaaaaaaaaaaaagaauu

SEQ ID NO: 37918 - RNA, 1658 nt, Artificial Sequence
  mRNA product Design i-3 (hSL-A64-N5) comprising derived and/or modified sequence from LASV(G502-SLE-2009;Clade IV)__AIT17126__GPCmut10 (opt4)
aggagaaagcuuaccaugggccagaucgugaccuucuuccaggaggugccccacgugaucgaggaggugaugaacaucgugcugaucgcccugagcauccuggccgugcugaagggccuguacaacuucgccaccugcggccuggugggccugcugaccuuccugcugcugugcggcagaagcugcaccaccggccuguacaagggcguguacgagcugcagacccuggagcugaacauggagacccugaacaugugcaugccccugagcugcaccaagaacaacagccaccacuacaucauggugggcaacgagaccggccuggagcugacccugaccaacaccagcaucaucaaccacaaguucugcaaccugagcgacgcccacaagaagaaccuguacgaccacgcccugaugagcaucaucagcaccuuccaccugagcauccccaacuucaaccaguacgaggccaugagcugcgacuucaacggcggcaagaucagcgugcaguacaaccugagccacagcuacgccggcgacgccgccgaccacugcggcaccguggccaacggcgugcugcagaccuucaugagaauggccuggggcggcagcuacaucgcccuggacagcggcagaggcagaugggacugcaucaugaccagcuaccaguaccugaucauccagaacaccaccugggaggaccacugccaguucagcagacccagccccaucggcuaccugggccugcugagccagagaaccagagacaucuacaucagcagaagacugcugggcaccuucaccuggacccugagcgacagcgagggcaaggacacccccggcggcuacugccugaccagauggaugcugaucgaggccgagcugaagugcuucggcaacaccgccguggccaagugcaacgagaagcacgacgaggaguucugcgacaugcugagacuguucgacuucugcaagcaggccauccagagacugaaggccgaggcccagaugagcauccagcugaucaacaaggccgugaacgcccugaucaacgaccagcuggugaugaagaaccaccugagagacaucaugggcauccccuacugcaacuacagcagauacugguaccugaaccacaccaccaccggcagaaccagccugcccaagugcuggcuggugagcaacggcagcuaccugaacgagacccacuucagcgacgacaucgagcagcaggccgacaacaugaucaccgagaugcugcagaaggaguacauggagagacagggcaagaccccccugggccugguggaccuguucguguucagcaccagcuucuaccugaucagcaucuuccugcaccuggugaagauccccacccacagacacaucgugggcaagagcugccccaagccccacagacugaaccacaugggcaucugcagcugcggccuguacaagcagcccggcgugcccgugaaguggaagagaugaggacuaguuauaagacugacuagcccgaugggccucccaacgggcccuccuccccuccuugcaccgagauuaaucaaaggcucuuuucagagccaccaaaaaaaaaaaaaaaaaaaaaaaaaaaaaaaaaaaaaaaaaaaaaaaaaaaaaaaaaaaaaaaaagaauu

SEQ ID NO: 37919 - RNA, 1658 nt, Artificial Sequence
  mRNA product Design i-3 (hSL-A64-N5) comprising derived and/or modified sequence from LASV(G733-SLE-2010;Clade IV)__AIT17154__GPCmut10 (opt4)
aggagaaagcuuaccaugggccagaucgugaccuucuuccaggaggugccccacgugaucgaggaggugaugaacaucgugcugaucgcccugagcauccuggccgugcugaagggccuguacaacuucgccaccugcggcaucgugggccuggugagcuuccugcugcugugcggcagaagcugcaccaccagccuguacaagggcguguacgagcugcagacccuggagcugaacauggagacccugaacaugugcaugccccugagcugcaccaagaacaacagccaccacuacaucauggugggcaacgagaccggccuggagcugacccugaccaacaccagcaucaucaaccacaaguucugcaaccugagcgacgcccacaagaagaaccuguacgaccacgcccugaugagcaucaucagcaccuuccaccugagcauccccaacuucaaccaguacgaggccaugagcugcgacuucaacggcggcaagaucagcgugcaguacaaccugagccacagcuacgccggcgacgccgccaaccacugcggcaccaucgccaacggcgugcugcagaccuucaugagaauggccuggggcggcagcuacaucgcccuggacagcggcagagacagaugggacugcaucaugaccagcuaccaguaccugaucauccagaacaccaccugggaggaccacugccaguucagcagacccagccccaucggcuaccugggccugcugagccagagaaccagagacaucuacaucagcagaagacugcugggcaccuucaccuggacccugagcgacagcgagggcaaggacacccccggcggcuacugccugaccagauggaugcugaucgaggccgagcugaagugcuucggcaacaccgccguggccaagugcaacgagaagcacgacgaggaguucugcgacaugcugagacuguucgacuucugcaagcaggccauccagagacugaaggccgaggcccagaugagcauccagcugaucaacaaggccgugaacgcccugaucaacgaccagcugaucaugaagaaccaccugagagacaucaugggcauccccuacugcaacuacagcaaguacugguaccugaaccacaccaccaccggcaagaccagccugcccaagugcuggcuggugagcaacggcagcuaccugaacgagacccacuucagcgacgacaucgagcagcaggccgacaacaugaucaccgagaugcugcagaaggaguacauggagagacagggcaagaccccccugggccugguggaccuguucguguucagcaccagcuucuaccugaucagcaucuuccugcaccuggugaagauccccacccacagacacguggugggcaagagcugccccaagccccacagacugaaccacaugggcaucugcagcugcggccuguacggccagcccggcgugcccgugaaguggaagagaugaggacuaguuauaagacugacuagcccgaugggccucccaacgggcccuccuccccuccuugcaccgagauuaaucaaaggcucuuuucagagccaccaaaaaaaaaaaaaaaaaaaaaaaaaaaaaaaaaaaaaaaaaaaaaaaaaaaaaaaaaaaaaaaaagaauu

SEQ ID NO: 37920 - RNA, 1658 nt, Artificial Sequence
  mRNA product Design i-3 (hSL-A64-N5) comprising derived and/or modified sequence from MOPV/LASV reassortant(IGS-1;Clade IV)__AFY05576__GPCmut10 (opt4)
aggagaaagcuuaccaugggccagaucgugaccuucuuccaggaggugccccacgugaucgaggaggugaugaacaucgugcugaucgcccugagcgugcuggccgugcugaagggccuguacaacuucgccaccugcggccuggugggccuggugaccuuccugcugcugugcggcagaagcugcaccaccagccuguacaagggcguguacgagcugcagacccuggagcugaacauggagacccugaacaugugcaugccccugagcugcaccaagaacaacagccaccacuacaucauggugggcaacgagaccggccuggagcugacccugaccaacaccagcaucaucaaccacaaguucugcaaccugagcgacgcccacaagaagaaccuguacgaccacgcccugaugagcaucaucagcaccuuccaccugagcauccccaacuucaaccaguacgaggccaugagcugcgacuucaacggcggcaagaucagcgugcaguacaaccugagccacagcuacgccggcgacgccgccaaccacugcggcaccguggccaacggcgugcugcagaccuucaugagaauggccuggggcggcagcuacaucgcccuggacagcggcagaggcaacugggacugcaucaugaccagcuaccaguaccugaucauccagaacaccaccugggaggaccacugccaguucagcagacccagccccaucggcuaccugggccugcugagccagagaaccagagacaucuacaucagcagaagacugcugggcaccuucaccuggacccugagcgacagcgagggcgaggacacccccggcggcuacugccugaccagauggaugcugaucgaggccgagcugaagugcuucggcaacaccgccguggccaagugcaacgagaagcacgacgaggaguucugcgacaugcugagacuguucgacuucugcaagcaggccauccagagacugaaggccgaggcccagaugagcauccagcugaucaacaaggccgugaacgcccugaucaacgaccagcugaucaugaagaaccaccugagagacaucaugggcauccccuacugcaacuacagcaaguacugguaccugaaccacaccaccaccggcagaaccagccugcccaagugcuggcuggugagcaacggcagcuaccugaacgagacccacuucagcgacgacaucgagcagcaggccgacaacaugaucaccgagaugcugcagaaggaguacauggagagacagggcaagaccccccugggccugguggaccuguucguguucagcaccagcuucuaccugaucagcaucuuccugcaccuggugaagauccccacccacagacacaucgugggcaagagcugccccaagccccacagacugaaccacaugggcaucugcagcugcggccuguacaagcagcccggcgugcccgugaaguggaagagaugaggacuaguuauaagacugacuagcccgaugggccucccaacgggcccuccuccccuccuugcaccgagauuaaucaaaggcucuuuucagagccaccaaaaaaaaaaaaaaaaaaaaaaaaaaaaaaaaaaaaaaaaaaaaaaaaaaaaaaaaaaaaaaaaagaauu

SEQ ID NO: 37921 - RNA, 1658 nt, Artificial Sequence
  mRNA product Design i-3 (hSL-A64-N5) comprising derived and/or modified sequence from LASV(LM765-SLE-2012;Clade IV)__AIT17814__GPCmut10 (opt4)
aggagaaagcuuaccaugggccagaucgugaccuucuuccaggaggugccccacgugaucgaggaggugaugaacaucgugcugaucgcccugagcauccuggccgugcugaagggccuguacaacuucgccaccugcggccuggugggccuggugaccuuccugcugcugugcggcagaagcugcaccaccagccuguacaagggcguguacgagcugcagacccuggagcugaacauggagacccugaacaugugcaugccccugagcugcaccaagaacaacagccaccacuacaucauggugggcaacgagaccggccuggagcugacccugaccaacaccagcaucaucgaccacaaguucugcaaccugagcgacgcccacagaaagaaccuguacgaccacgcccugaugagcaucaucagcaccuuccaccugagcauccccaacuucaaccaguacgaggccaugagcugcgacuucaacggcggcaagaucagcgugcaguacaaccugagccacagcuacgccaaggacgccgccgaccacugcggcaccguggccaacggcgugcugcagaccuucaugagaauggccuggggcggcagcuacaucgcccuggacagcggcagaggcagaugggacugcaucaugaccagcuaccaguaccugaucauccagaacaccaccugggaggaccacugccaguucagcagacccagccccaucggcuaccugggccugcugagccagagaaccagagacaucuacaucagcagaagacugcugggcaccuucaccuggacccugagcgacagcgagggcaaggacacccccggcggcuacugccugaccagauggaugcugaucgaggccgagcugaagugcuucggcaacaccgccguggccaagugcaacgagaagcacgacgaggaguucugcgacaugcugagacuguucgacuucugcaagcaggccauccagagacugaaggccgaggcccagaugagcauccagcugaucaacaaggccgugaacgcccugaucaacgaccagcugaucaugaagaaccaccugagagacaucaugggcauccccuacugcaacuacagcaaguacugguaccugaaccacaccaccaccggcaagaccagccugcccaagugcuggcuggugagcaacggcagcuaccugaacgagacccacuucagcgacgacaucgagcagcaggccgacaacaugaucaccgagaugcugcagaaggaguacauggagagacagggcaagaccccccugggccugguggaccuguucguguucagcaccagcuucuaccugaucagcaucuuccugcaccuggugaagauccccacccacagacacaucgugggcaagcccugccccaagccccacagacugaaccacaugggcaucugcagcugcggccuguacaagcagcccggcgugcccgugaaguggaagagaugaggacuaguuauaagacugacuagcccgaugggccucccaacgggcccuccuccccuccuugcaccgagauuaaucaaaggcucuuuucagagccaccaaaaaaaaaaaaaaaaaaaaaaaaaaaaaaaaaaaaaaaaaaaaaaaaaaaaaaaaaaaaaaaaagaauu

SEQ ID NO: 37922 - RNA, 1658 nt, Artificial Sequence
  mRNA product Design i-3 (hSL-A64-N5) comprising derived and/or modified sequence from LASV(LM776-SLE-2012;Clade IV)__AIT17824__GPCmut10 (opt4)
aggagaaagcuuaccaugggccagaucgugaccuucuuccaggaggugccccacgugaucgaggaggugaugaacaucgugcugaucgcccugagcauccuggccgugcugaagggccuguacaacuucgccaccugcggccuggugggccuggugaccuuccugcugcugugcggcagaagcugcaccaccagcguguacaagggcguguacgagcugcagacccuggagcugaacauggagacccugaacaugugcaugccccugagcugcaccaagaacaacagccaccacuacaucauggugggcaacgagaccggccuggagcugacccugaccaacaccagcaucaucaaccacaaguucugcaaccugagcgacgcccacaagaagaaccuguacgaccacgcccugaugagcaucaucagcaccuuccaccugagcauccccaacuucaaccaguacgaggccaugagcugcgacuucaacggcggcaagaucagcgugcaguacaaccugagccacagcuacgccggcgacgccgccaaccacugcggcaccguggccaacggcgugcugcagaccuucaugagaauggccuggggcggcagcuacaucgcccuggacagcggccacggcaagugggacugcaucaugaccagcuaccaguaccugaucauccagaacaccaccugggaggaccacugccaguucagcagacccagccccaucggcuaccugggccugcugagccagagaaccagagacaucuacaucagcagaagacugcugggcaccuucaccuggacccugagcgacagcgagggcaaggacacccccggcggcuacugccugaccagauggaugcugaucgaggccgagcugaagugcuucggcaacaccgccguggccaagugcaacgagaagcacgacgaggaguucugcgacaugcugagacuguucgacuucugcaagcaggccauccagagacugaaggccgaggcccagaugagcauccagcugaucaacaaggccgugaacgcccugaucaacgaccagcugaucaugaagaaccaccugagagacaucaugggcauccccuacugcaacuacagcaaguacugguaccugaaccacaccaccaccggcaagaccagccugcccaagugcuggcuggugagcaacggcagcuaccugaacgagacccacuucagcgacgacaucgagcagcaggccgacaacaugaucaccgagaugcugcagaaggaguacauggagagacagggcaagaccccccugggccugguggaccuguucguguucagcaccagcuucuaccugaucagcaucuuccugcaccuggugaagauccccacccacagacacaucgugggcaagagcugccccaagccccacagacugaaccacaugggcaucugcagcugcggccuguacaagcagcccggcgugcccgugagauggaagagaugaggacuaguuauaagacugacuagcccgaugggccucccaacgggcccuccuccccuccuugcaccgagauuaaucaaaggcucuuuucagagccaccaaaaaaaaaaaaaaaaaaaaaaaaaaaaaaaaaaaaaaaaaaaaaaaaaaaaaaaaaaaaaaaaagaauu

SEQ ID NO: 37923 - RNA, 1658 nt, Artificial Sequence
  mRNA product Design i-3 (hSL-A64-N5) comprising derived and/or modified sequence from LASV(Mad39;Clade IV)__ANH09722__GPCmut10 (opt4)
aggagaaagcuuaccaugggccagaucgugaccuucuuccaggaggugccccacgugaucgaggaggugaugaacaucgugcugaucgcccugagcauccuggccgugcugaagggccuguacaacguggccaccugcggccugaucggccuggugaccuuccugcugcugugcggcagaagcugcaccaccacccuguacaagggcguguacgagcugcaggcccuggagcugaacauggagacccugaacaugugcaugccccugagcugcaccaagaacaacagccaccacuacaucagagugggcaacgagaccggccuggagcugacccugaccaacaccagccugaucaaccacaaguucugcaaccugagcgacgcccacaagaagaaccuguacgaccacgcccugaugagcaucaucagcaccuuccaccugagcauccccaacuucaaccaguacgaggccaugagcugcgacuucaacgacggcaagaucagcgugcaguacaaccugagccacaccuacgccggcgacaccgccaaccacugcggcaccguggccaacggcgugcugcagaccuucaugagaauggccuggggcggcagcuacaucgcccuggacagcggcagaggcggcugggacugcaucaugaccagcuaccaguaccugaucauccagaacaccaccugggaggaccacugccaguucagcagacccagccccaucggcuaccugggccugcugagccagagaaccagagacaucuacaucagcagaagacugcugggcaccuucaccuggacccugagcgacagcgagggcaaggacacccccggcggcuacugccugaccagauggaugcugaucgaggccgagcugaagugcuucggcaacaccgccguggccaagugcaacgagaagcacgacgaggaguucugcgacaugcugagacuguucgacuucugcaagcaggccauccagagacugaaggccgaggcccagaugagcauccagcugaucaacaaggccgugaacgcccugaucaacgaccagcugaucaugaagaaccaccugagagacaucaugggcauccccuacugcaacuacagcaaguacugguaccugaaccacaccgugaccggcaagaccagccugcccaagugcuggcuggugagcaacggcagcuaccugaacgagacccacuucagcgacgacaucgagcagcaggccgacaacaugaucaccgagaugcugcagaaggaguacauggagagacagggcaagaccccccugggccugguggaccuguucguguucagcaccagcuucuaccugaucagcaucuuccugcaccuggugaagauccccacccacagacacguggugggcaagcccugccccaagccccacagacugaaccacaugggcaucugcagcugcggcuucuacaagcagcccggcgugcccgugagauggaagagaugaggacuaguuauaagacugacuagcccgaugggccucccaacgggcccuccuccccuccuugcaccgagauuaaucaaaggcucuuuucagagccaccaaaaaaaaaaaaaaaaaaaaaaaaaaaaaaaaaaaaaaaaaaaaaaaaaaaaaaaaaaaaaaaaagaauu

SEQ ID NO: 37924 - RNA, 1658 nt, Artificial Sequence
  mRNA product Design i-3 (hSL-A64-N5) comprising derived and/or modified sequence from LASV(Z0947-SLE-2011;Clade IV)__AIT17840__GPCmut10 (opt4)
aggagaaagcuuaccaugggccagaucgugaccuucuuccaggaggugccccacgugaucgaggaggugaugaacaucgugcugaucgcccugagcauccuggccgugcugaagggccuguacaacuucgccaccugcggccuggugggccuggugaccuuccugcugcugugcggcagaagcugcaccaucagccuguacaagggcguguacgagcugcagacccuggagcugaacauggagacccugaacaugugcaugccccugagcugcaccaagaacaacagccaccacuacaucauggugggcaacgagaccggccuggagcugacccugaccaacaccagcaucaucaaccacaaguucugcaaccugagcgacgcccacaagaagaaccuguacgaccacgcccugaugagcaucaucagcaccuuccaccugagcauccccaacuucaaccaguacgaggccaugagcugcgacuucaacggcggcaagaucagcgugcaguacaaccugagccacagcuacgccggcgacgccgccaaccacugcggcaccguggccaacggcgugcugcagaccuucaugagaauggccuggggcggcagcuacaucgcccuggacagcggcagagacagaugggacugcaucaugaccagcuaccaguaccugaucauccagaacaccaccugggaggaccacugccaguucagcagacccagccccaucggcuaccugggccugcugagccagagaaccagagacaucuacaucagcagaagacugcugggcaccuucaccuggacccugagcgacagcgagggcaaggacacccccggcggcuacugccugaccagauggaugcugaucgaggccgagcugaagugcuucggcaacaccgccguggccaagugcaacgagaagcacgacgaggaguucugcgacaugcugagacuguucgacuucugcaagcaggccauccagagacugaaggccgaggcccagaugagcauccagcugaucaacaaggccgugaacgcccugaucaacgaccagcugaucaugaagaaccaccugagagacaucaugggcauccccuacugcaacuacagcaaguacugguaccugaaccacaccaccaccggcaagaccagccugcccaagugcuggcuggugagcaacggcagcuaccugaacgagacccacuucagcgacgacaucgagcagcaggccgacaacaugaucaccgagaugcugcagaaggaguacauggagagacagggcaagaccccccugggccugguggaccuguucguguucagcaccagcuucuaccugaucagcaucuuccugcaccuggugaagauccccacccacagacacaucgugggcaagcccugccccaagccccacagacugaaccacaugggcaucugcagcugcggccuguacaagcagcccggcgugcccgugaaguggaagagaugaggacuaguuauaagacugacuagcccgaugggccucccaacgggcccuccuccccuccuugcaccgagauuaaucaaaggcucuuuucagagccaccaaaaaaaaaaaaaaaaaaaaaaaaaaaaaaaaaaaaaaaaaaaaaaaaaaaaaaaaaaaaaaaaagaauu

SEQ ID NO: 37925 - RNA, 1658 nt, Artificial Sequence
  mRNA product Design i-3 (hSL-A64-N5) comprising derived and/or modified sequence from LASV(Josiah;Clade IV)__NP_694870__GPCmut10 (opt5)
aggagaaagcuuaccaugggccagaucgugaccuucuuucaagaggucccccacguuauugaagaggugaugaacaucgugcugauugcccucagcguccuggcugugcuuaaggggcuguacaauuucgccacaugcggacucguuggccuggugacguuucuucugcucugugggagauccugcaccacaucucuguauaaaggagucuacgaacugcagacccucgagcugaacauggaaacacuuaauauguguaugccucugagcugcaccaagaacaauucccaucacuauaucauggugggcaacgagacagggcucgagcugacccuuacgaauaccucuauuaucaaccauaaauucuguaaucugagcgacgcgcacaagaaaaaccucuacgaucaugcucugauguccaucauuucuacauuucaccugagcaucccgaauuucaaccaguaugaagccauguccugcgacuuuaauggaggcaagauuagcguucaguacaaccucucucacuccuaugccggcgaugcugccaaucauugugggaccguggcuaacggaguccugcaaacauucaugcggauggccuggggcgggagcuacaucgcgcuugacucuggacgcggcaacugggauugcauuaugaccuccuaccaguaucugaucauucagaauacgacaugggaggaccacugucaguuuagcagacccucuccuaucggguaccucggacugcuuucccaacggacccgcgauaucuauauuagcagacggcugcucggcacauucaccuggacccuguccgacucugaaggcaaggauacacccgggggauacugccugacgcgcuggaugcucaucgaggccgagcugaaauguuuuggcaacaccgcuguggccaagugcaaugaaaaacaugacgaggaguucugcgauaugcuuagacuguuugacuucuguaagcaggcuauucagcggcucaaagccgaagcgcagaugagcauccaacugauuaacaaggccgugaaugcucuuaucaacgaucagcugaucaugaagaaucaccuccgcgacauuauggggaucccuuauugcaacuacuccaaauauugguaccugaaucacacaaccacaggaagaaccagccugcccaaguguuggcucgucucuaacggcuccuaccugaaugaaacgcauuucagcgacgauauugagcagcaagccgacaacaugaucacagagaugcuucagaaagaauauauggagcggcaggggaagaccccucugggacucguugaucuguuuguguucucuaccagcuuuuaccugauuuccaucuuccuucaccucgugaaaaucccgacacaucgccacauugucggcaagucuugccccaaaccucauagacugaaucacaugggcaucuguagcugcgggcuguauaagcagcccggagugccuguuaaguggaaacggugaggacuaguuauaagacugacuagcccgaugggccucccaacgggcccuccuccccuccuugcaccgagauuaaucaaaggcucuuuucagagccaccaaaaaaaaaaaaaaaaaaaaaaaaaaaaaaaaaaaaaaaaaaaaaaaaaaaaaaaaaaaaaaaaagaauu

SEQ ID NO: 37926 - RNA, 1655 nt, Artificial Sequence
  mRNA product Design i-3 (hSL-A64-N5) comprising derived and/or modified sequence from LASV(LP;Clade I)__AAF86701__GPCmut10 (opt5)
aggagaaagcuuaccaugggccagaucauuaccuucuuucaagaggugccccacgucaucgaagagguuaugaacauugugcugaucgcccucagccugcuugcuauucugaaggggcucuacaauaucgccacaugcggaaucauuggccugguggcguuccuuuuucugugugggaaauccugcucucucacgcugaagggaggcuaugaacugcagacccucgagcugaacauggaaacacuuaauauguguaugccucugagcugcaccaaaaacuccucucaucacuacaucagagucgggaaugagacaggacucgagcugacccuuacaaacaccagcauuaucaaucauaaguucuguaaccuguccgacgcucacaaaaagaaucucuaugaucaugcccugaugucuauuaucagcacguuucaccuguccauuccgaacuucaaucaguacgaagccaugagcugcgacuuuaacggcggcaagaucucugugcaguauaaucucucccacagcuacgcuggggaugccgcugagcauuguggaaccguugccaacggcgugcugcaaacauucaugcggauggcguggggagggcgcuauaucgcccuugacucuggcaaagggaauugggauugcauuaugaccuccuaccaguaccugaucauucagaacacaaccugggaagaccacugucaguuuagcagacccucuccuaucggauaucucggccugcuuucccaacggacgcgcgauauuuacaucagcagacggcugcucggcacauucaccuggacacuguccgacucugaggggaacgagacccccggaggcuauugccugacccgcuggaugcucaucgaagcugagcugaaguguuuugggaauacagccgucgcuaaaugcaacgaaaagcaugaugaggaguucugcgacaugcuuagacuguuugauuucuguaaacaggccauucggcgccucaaggcggaagcccagaugagcauccagcugauuaauaaggcugugaacgcccuuaucaaugaccaacugauuaugaaaaaccaccucagagauaucaugggaaucccuuacugcaauuauuccaaguacugguaucugaaccacacgagcucuggccggaccucccugcccaaauguuggcucauuagcaaugggucuuaccugaacgagacacaguucagcgacgacaucgaacagcaagcugauaauaugauuaccgagaugcuucagaaggaauacaucgagcgccagggaaaaacaccucugggccucguugacauuuuuaucuucuccaccucuuuuuaucugauuagcaucuuccugcaucuuaucaagauuccgacgcacagacauaucgugggcaaacccugcccuaagccccaccggcucaaccauaugggggucuguuccugcggacuguacaagcacccuggcgugcccacaaaauggaagcgcugaggacuaguuauaagacugacuagcccgaugggccucccaacgggcccuccuccccuccuugcaccgagauuaaucaaaggcucuuuucagagccaccaaaaaaaaaaaaaaaaaaaaaaaaaaaaaaaaaaaaaaaaaaaaaaaaaaaaaaaaaaaaaaaaagaauu

SEQ ID NO: 37927 - RNA, 1655 nt, Artificial Sequence
  mRNA product Design i-3 (hSL-A64-N5) comprising derived and/or modified sequence from LASV(803213;Clade II)__AAF86703__GPCmut10 (opt5)
aggagaaagcuuaccaugggccagaucauuaccuucuuucaagaggugccccacgucaucgaagagguuaugaacauugugcugaucgcccucagccugcuugcuauucugaaggggaucuacaauguggccacaugcggacucuucggccugaucuccuuucuucugcucugugggagaucuugcagcgucacguauaaaggaguguacgaacugcagacccuggagcucaacauggcgaaucugaacauguguaugccucuuuccugcacaaagaauaacucucaucacuauauuaugguuggcaaugaaaccgggcuggagcucacacugaccaacacaagcaucauuaaucauaaauucuguaaccuuuccgacgcucacaagaaaaaucuguacgaucaugcccucaugucuaucauuagcaccuuucaccuguccaucccgaacuucaaucaguaugaggccaugagcugcgacuuuaacggaggcaagauuucugugcaguacaaucugucccacagcuucgcugucgaugccgcuaaccauuguggcacgaucgccaacggggugcuccaaaccuuuaugcggauggcguggggaggcucuuauaucgcccuggacuccgggaagggaaauugggauugcauuaugacaagcuaccaguaccuuaucauucagaacaccacaugggaagaccacugucaguucucucgccccuccccuaucggcuaucuggggcuccugagccaaagaacccgggauauuuacaucucccgcagacuucugggaacguuuacauggacccucucugacagcgagggcaaugaagcucccggcggguauugccugacacgguggaugcugaucgaggccgagcucaaauguuucggaaacaccgcuguugccaagugcaaugaaaaacaugaugaggaauuuugcgacaugcugcgccuuuucgauuucuguaagcaggcgauuaaaagacugaagaccgaggcccagauguccauccagcucauuaacaaggcugugaaugcccugaucaacgaccaacuuauuaugaaaaaucaucugcgggauaucaugggcaucccuuacugcaacuauagccgcuacugguaucucaaucacacagucacggggaagaccucucugcccagauguuggcugguguccaacggaagcuaccucaaugaaacacacuuuucugacgacauugagcagcaggcugauaacaugaucaccgagaugcugcaaaaagaauacauggaccggcagggcaagacaccucuugggcugguggaucucuucgucuuuagcaccuccuucuaucugauuucuaucuuucugcaccuuguuaaaauuccgacgcaucgccacaucgugggaaagcccugcccuaaaccccauagacucaaucacaugggcauuuguagcugcggccuguacaagcacccuggggugcccgucaaguggaaacggugaggacuaguuauaagacugacuagcccgaugggccucccaacgggcccuccuccccuccuugcaccgagauuaaucaaaggcucuuuucagagccaccaaaaaaaaaaaaaaaaaaaaaaaaaaaaaaaaaaaaaaaaaaaaaaaaaaaaaaaaaaaaaaaaagaauu

SEQ ID NO: 37928 - RNA, 1655 nt, Artificial Sequence
  mRNA product Design i-3 (hSL-A64-N5) comprising derived and/or modified sequence from LASV(GA391;Clade III)__CAA36645__GPCmut10 (opt5)
aggagaaagcuuaccaugggccagaucgugaccuucuuucaagaggucccccacguuauugaagaggugaugaacaucgugcugauugcccucagcauccuggcuauucuuaaggggcuguacaaugucgccacaugcggacucaucggccuggugacguuccuucugcucuccgggagaucuuguagccugaucuauaaaggaaccuacgaacugcagacacucgagcugaacauggaaacccuuaauaugugcaugccucuguccuguacaaagaacaauucucaucacuauauucggguuggcaacgagaccgggcucgagcugacacuuaccaauacgagcauccugaaccauaaauuuugcaaucucuccgacgcgcacaagcgcaaccuguacgaucauucucugaugagcauuaucuccaccuuccaccucagcauuccgaauuuuaaccaguaugaagcuaugucuugugacuucaauggaggcaaaaucacagugcaguacaaccugucccacagcuuugccgucgaugccgcuggccauugcgggacccuugccaauggagugcugcaaacauucaugagaauggcuuggggcgggucuuauauugcccucgacuccggacggggcaacugggauuguaucaugaccagcuaccaguaccugaucauucagaacacgacaugggacgaucacugccaguuuucucgccccuccccuaucggguaucuuggacugcucagccaaagaacccgggacauuuacaucucccgcagacugcugggcacauucaccuggacccucucugauagcgagggcaaugaaacacccgggggauauugucugacgcgguggaugcuuauugaggcggagcugaagugcuuuggcaacaccgccguugcuaaguguaaugaaaaacaugacgaggaguucugcgauaugcuccgccuguuugacuucugcaagcaggccaucagacggcuuaaaacagaagcucagauguccauccagcugauuaacaaggccgugaaugcgcucaucaacgaucaacugauuaugaaaaaucaucugcgcgacaucauggggauuccuuacuguaacuauagcagauacugguaucucaaucacaccucuacaggaaagaccucccugccccggugcuggcuuaucagcaacggcucuuaccugaaugaaacgaaguucagcgacgauaucgagcagcaggccgacaacaugauuacagagaugcuccaaaaagaauacaucgaucgccaggggaagaccccucugggacuggucgaccuuuuuguguucuccaccucuuuuuaucucauuagcaucuuccugcaccuggugaaaauuccgacacacagacauaucgucggcaagcccuguccuaaaccccaccggcucaaucauaugggcauuugcuccugugggcuguacaagcagccuggaguucccgugagauggaaacgcugaggacuaguuauaagacugacuagcccgaugggccucccaacgggcccuccuccccuccuugcaccgagauuaaucaaaggcucuuuucagagccaccaaaaaaaaaaaaaaaaaaaaaaaaaaaaaaaaaaaaaaaaaaaaaaaaaaaaaaaaaaaaaaaaagaauu

SEQ ID NO: 37929 - RNA, 1658 nt, Artificial Sequence
  mRNA product Design i-3 (hSL-A64-N5) comprising derived and/or modified sequence from LASV(AV;Clade V)__CCA30314__GPCmut10 (opt5)
aggagaaagcuuaccaugggccagaucgugaccuucuuucaagaggucccccacguuauugaagaggugaugaacaucgugcugauugcccucagcauccuggcuguccuuaaggggcuguacaauauugccacaugcggacucaucggccugaucacguuccuucugcucugugggagauccugcucuagcaaccuguauaaaggaguguacgaacugcagucccucgaccugaauauggagacccuuaacauguguaugccucugucuugcacaaagaauaacagccaucacuauauucggguuggcaaugauaccgggcucgaacugacacuuaccaacacauccauccugaaucauaaauuuuguaaccucucugacgcgcacaagaaagaucuguacgaccaugcucugaugagcauuaucuccaccuuccaccucagcauuccgaauuuuaaccaguaugaggccaugucuugcgauuucaauggaggcaagaucuccgugcaguacaaccugagccacucuuaugccauugacgcugccaaucauuguggcacggucgcuaacgggauccuucaaaccuuuaugcgcauggccuggggaggcuccuacaucgcgcuggauagcgggagaggaaacugggacugcauuaugacaucuuaccaguaucucaucauucagaauaccacaugggagaaccacugucaguucucccggcccagcccuaucggcuaccuggggcuucugucccaacgcaccagagauauuuauaucucucggcgccuccugggaacguuuacauggacccugagcgacuccgaaggcaaugccacacccggcggguacugccucaccagauggaugcugaucgaggcugaacuuaaguguuucggaaacaccgccguggcuaaaugcaaugagaagcaugaugaggaauuuugcgacaugcugcgccucuucgauuuuuguaaacaggccauuagccggcugaagucugaggcgcagauguccauccagcuuauuaacaaagccguuaaugcucugaucaacgaccaacucauuaugaagaaucaccugagagacaucaugggcaucccuuauugcaacuacagcaaguauugguaccugaaucacacaauuacggggaaaaccucucuccccaaguguuggcuggugagcaacggauccuaccuuaaugaaacacauuucucugaugacaucgagcagcaggccgauaacaugauuaccgaaaugcugcaaaaagaguauauggagcggcagggcaagacaccucucgggcuggucgaccuguucguguuuagcaccuccuucuaccuuaucagcauuuuucuccgccuggugaaaaucccgacgcacagacauauugucggaaagcccugcccuaaaccccaccggcugaaucauaugggcaucuguucuugcggccucuauaagcagccugggguucccgugcgcuggaagagaugaggacuaguuauaagacugacuagcccgaugggccucccaacgggcccuccuccccuccuugcaccgagauuaaucaaaggcucuuuucagagccaccaaaaaaaaaaaaaaaaaaaaaaaaaaaaaaaaaaaaaaaaaaaaaaaaaaaaaaaaaaaaaaaaagaauu

SEQ ID NO: 37930 - RNA, 1655 nt, Artificial Sequence
  mRNA product Design i-3 (hSL-A64-N5) comprising derived and/or modified sequence from LASV(Togo/2016/7082;Clade VI)__AMR44577__GPCmut10 (opt5)
aggagaaagcuuaccaugggccagaucauuaccuucuuucaagaggugccccacgucaucgaagagguuaugaacauugugcugaucgcccucagccugcuugcuauucugaaggggguguacaaugucgccacaugcggaaucaucggccucgugacguuccuguuucuuugugggagauccugcucucugauuuauaaaggaagcuacgaacuccagacccuggagcugaacauggaaacacucaauauguguaugccucuguccugcaccaagaacucuagccaucacuauauccggguuggcaaugagacagggcuugagcugacccucacaaacaccuccauuaucaaucauaaauucuguaaccugucugacgcgcacaagcgcaaucuuuacgaucaugcucugaugagcauucucuccacguuucaccugagcaucccgaacuucaaucaguaugaagccaugucuugcgacuuuaacggaggcaaaauuuccgugcaguacaaucugagccacgccuaugcugucgaugccgcugagcauuguggcaccguggccaacgggguucuccaaacauucaugagaauggcguggggaggcucuuacaucgcccuggacuccgggcggggaaauugggauugcaucaugaccagcuaccaguaucuuauuauccagaacacaaccugggaagaccacugucaguuuucucgccccuccccuauuggcuaccuggggcuccugagccaaagaacgcgggauaucuauauuucccgcagacuucugggaacauucaccuggacacucucugacagcgagggcaacgagacccccggcggguacugccugacccgguggaugcugaucgaagcugagcucaaguguuuuggaaauacagccguggcuaagugcaacgaaaaacaugaugaggaguucugcgacaugcugcgccuuuuugauuucuguaagcaggccauccagagacugaaauccgaagcgcagaugagcauucaacucaucaauaaggccgucaacgcucugauuaaugaccagcuuaucaugaaaaaccaucugcgggauaugaugggcauuccuuauugcaauuacucuaaguauugguaccucaaccacacguccagcgggcgcaccucucugcccaaguguuggcuggugagcaauggauccuaccucaacgagacacacuucucugacgacaucgaacagcaagccgauaauaugaucaccgagaugcugcagaaagaauauauugacagacagggcaagacaccucuugggcugguggaucucuuugucuucagcaccuccuuuuaccugaucagcauuuuccugcaccuuaucaaaauuccgacgcaucggcacaucguuggaaagcccugcccuaaaccccaucgccucaaccacaugggcauuuguucuugcggccuguauaagcagccuggggugcccacaagauggaaacggugaggacuaguuauaagacugacuagcccgaugggccucccaacgggcccuccuccccuccuugcaccgagauuaaucaaaggcucuuuucagagccaccaaaaaaaaaaaaaaaaaaaaaaaaaaaaaaaaaaaaaaaaaaaaaaaaaaaaaaaaaaaaaaaaagaauu

SEQ ID NO: 37931 - RNA, 1655 nt, Artificial Sequence
  mRNA product Design i-3 (hSL-A64-N5) comprising derived and/or modified sequence from LASV(KAK-428;Clade n.d. (VII))__ANH09740__GPCmut10 (opt5)
aggagaaagcuuaccaugggccagaucgugaccuucuuucaagaggucccccacguuauugaagaggugaugaacaucgugcugauugcccucagccugcuugcuauccugaaggggcucuacaauuucgccacaugcggagucauuggccugaucacguuucuucugcucugugggagauccugcucugcgaccuauaaaggacaguacgaacugcagacacuggagcucaacauggaaagccugaauauguguaugccucuuuccugcaccaagaacaauucucaucacuauauccgggcuggcaacaauacagggcuggagcucacccugacaaacaccagcauuaucucccauaaauucuguaaucuuucugacgcccacaagaaaaaccuguacgaucauacgcucaugagcauuaucaccacauuucaccuguccauuccgaauuucaaccaguaugaggccaugagcugcgacuuuaauggaggcaagaucucuauucaauacaaccugucccacagcuaugcuggcgaugccgcucagcauugugggaccguggccaauggaguucuccagacauucaugcgcauggcguggggcgggucuuaccuggcccuugacuccggaagacggggcugggauugcaucaucagcucuuaccaguaucugauuauccaaaacaccacgugggacgaucacugucaguuuucccgccccagcccuauuggguaccucggauucgugucccagaagacaagagacaucuauauuucucggcgccugcuuggcaccuuuacauggacccugagcgauuccgaaggccaugacaugcccgggggauacugccucaccagauggaugcugaucgaggcugaucugaaauguuucggcaacacagccgucgcuaagugcaaugaaaaacacgacgaggaguuuugcgauauguggcgccucuucgacuucuguaagcaggccauccaacggcugaaagcggaagcccagaugaacauucagcuuaucaauaaggcugugaacgcccugauuaaugaccaacucaugaugaagaaccaccugagagauaucauggggauuccuuauugcaauuacagcaaauuuugguaucuuaacaauacgaccacaggacggaccucucugccccgcuguuggcucaucuccaacggcagcuaccugaaugagacacauuucucugacgauaucgaacagcaggcugacaacaugauuaccgagaugcugcagaaggaauacauggauagacaagggaaaacgccucucggacugguugaccuuuuuguguucagcacauccuuuuaucugaucaccauuuuccuccaccuggucaagaucccgacccaucggcacauugugggcaaacccugcccuaagccccaucgccugaaucacaugggcaucuguucuugcgggcuuuacaaacagccuggagugcccgucagauggaagcggugaggacuaguuauaagacugacuagcccgaugggccucccaacgggcccuccuccccuccuugcaccgagauuaaucaaaggcucuuuucagagccaccaaaaaaaaaaaaaaaaaaaaaaaaaaaaaaaaaaaaaaaaaaaaaaaaaaaaaaaaaaaaaaaaagaauu

SEQ ID NO: 37932 - RNA, 1655 nt, Artificial Sequence; identical to SEQ ID NO: 37926
  mRNA product Design i-3 (hSL-A64-N5) comprising derived and/or modified sequence from LASV(Pinneo-NIG-1969;Clade I)__AIT17836__GPCmut10 (opt5)

SEQ ID NO: 37933 - RNA, 1655 nt, Artificial Sequence
  mRNA product Design i-3 (hSL-A64-N5) comprising derived and/or modified sequence from LASV(ISTH0009-NIG-2011;Clade II)__AIT17404__GPCmut10 (opt5)
aggagaaagcuuaccaugggccagaucauuaccuucuuucaagaggugccccacgucaucgaagagguuaugaacauugugcugaucgcccucagccugcuugcuauucugaaggggaucuacaauguggccacaugcggacucuucggccuggucuccuuucuucugcucugugggagaucuugcagcacgaccuauaaaggaguguacgaacugcagacacuggagcucgacauggcgucccugaacauguguaugccucuuucuugcaccaagaauaacagccaucacuauaucaugguuggcaaugaaacagggcuggagcucacccugacaaacaccuccauuaucaaucauaaauucuguaaccuuucugaugcucacaagaaaaaucuguacgaccaugcccucaugagcauuaucuccacguuucaccugagcauuccgaacuucaaucaguaugaggccaugucuugcgauuuuaacggaggcaagaucuccgugcaguacaaucugagccacgcuuaugccgucgacgcugccaaccauuguggcaccauugcgaauggggugcuccaaacauucaugcggauggccuggggaggcucuuacaucgcucuggauuccgggaagggaagcugggacugcaucaugaccucuuaccaguaucuuauuauccagaacacaaccugggaagaucacugucaguuuucccgccccagcccuauuggcuaccuggggcuccugucccaaagaacgcgggacaucuauauuucucgcagacuucugggaacauucaccuggacacucagcgauuccgagggcaacgaaacccccggcggguacugccugacccgguggaugcugaucgaggccgagcucaaauguuuuggaaauacagcuguugccaagugcaacgaaaaacaugacgaggaguucugcgauaugcugcgccuuuuugacuucuguaagcaggcgaucagacggcugaaaacggaagcccagaugagcauucagcucaucaauaaggcugugaacgcccugauuaaugaucaacuuaucaugaagaaccaucugcgcgacauuaugggcaucccuuauugcaauuacucuaaauauugguaccucaaccacaccgucacagggaagaccucccugcccagauguuggcuggugagcaauggaucuuaccucaacgaaacacacuucagcgacgauaucgagcagcaggcugacaauaugauuaccgagcugcuucaaaaagaauauauggaucggcagggcaagacgccucuggggcucguggaccuguuugucuucuccacaucuuuuuaccugaucagcauuuuccuucaccucaucaaaauuccgacccaucgccacaucaccggaaagcccugcccuaaaccccauagacugaaccacaugggcauuuguuccugcggccuguauaagcacccugggguucccgugaaguggaaacggugaggacuaguuauaagacugacuagcccgaugggccucccaacgggcccuccuccccuccuugcaccgagauuaaucaaaggcucuuuucagagccaccaaaaaaaaaaaaaaaaaaaaaaaaaaaaaaaaaaaaaaaaaaaaaaaaaaaaaaaaaaaaaaaaagaauu

SEQ ID NO: 37934 - RNA, 1655 nt, Artificial Sequence
  mRNA product Design i-3 (hSL-A64-N5) comprising derived and/or modified sequence from LASV(ISTH2010-NIG-2012;Clade II)__AIT17482__GPCmut10 (opt5)
aggagaaagcuuaccaugggccagaucauuaccuucuuucaagaggugccccacgucaucgaagagguuaugaacauugugcugaucgcccucagccugcuugcuauucugaaggggaucuacaauguggccacaugcggacucuucggccuggucuccuuucuucugcucugugggagaucuugcagcacgaccuauaaaggaguguacgaacugcagacacuggagcucgacauggcgucccugaacauguguaugccucuuucuugcaccaagaauaacagccaucacuauaucaugguuggcaaugaaacagggcuggagcucacccugacaaacaccuccauuaucaaucauaaauucuguaaccuuucugaugcucacaagaaaaaucuguacgaccaugcccucaugagcauuaucuccacguuucaccugagcauuccgaacuucaaucaguaugaggccaugucuugcgauuuuaacggaggcaagaucuccgugcaguacaaucugagccacgcuuaugccgucgacgcugccaaccauuguggcaccauugcgaauggggugcuccaaacauucaugcggauggccuggggaggcucuuacaucgcucuggauuccgggaagggaagcugggacugcaucaugaccucuuaccaguaucuuauuauccagaacauuacaugggaagaucacugucaguuuucccgccccagcccuaucggcuaccuggggcuccugucccaaagaacccgggacauuuauaucucucgcagacuucugggaacguucacauggacccucagcgauuccgagggcaacgaaacacccggcggguacugccugacccgguggaugcugaucgaggccgagcucaaauguuuuggaaauaccgcuguugccaagugcaacgaaaaacaugacgaggaguucugcgauaugcugcgccuuuuugacuucuguaagcaggcgauuagacggcugaaaacagaagcccagaugagcauccagcucauuaauaaggcugugaacgcccugaucaaugaucaacuuauuaugaagaaccaucugcgcgacaucaugggcaucccuuauugcaauuacucuaaauauugguaccucaaccacacggucaccgggaagacaucccugcccagauguuggcuggugagcaauggaucuuaccucaacgaaacccacuucagcgacgauauugagcagcaggcugacaauaugaucacagagcugcuucaaaaagaauauauugaucggcagggcaagaccccucuggggcucguggaccuguuugucuucuccacgucuuuuuaccugaucagcauuuuccuucaccucguuaaaaucccgacacaucgccacguggugggaaagcccugcccuaaaccccauagacugaaccacaugggcauuuguuccugcggccuguauaagcacccugggguccccgugaaguggaaacggugaggacuaguuauaagacugacuagcccgaugggccucccaacgggcccuccuccccuccuugcaccgagauuaaucaaaggcucuuuucagagccaccaaaaaaaaaaaaaaaaaaaaaaaaaaaaaaaaaaaaaaaaaaaaaaaaaaaaaaaaaaaaaaaaagaauu

SEQ ID NO: 37935 - RNA, 1655 nt, Artificial Sequence
  mRNA product Design i-3 (hSL-A64-N5) comprising derived and/or modified sequence from LASV(Lassa virus/H.sapiens-wt/NGA/2015/ISTH_0543;Clade II)__AVO03639__GPCmut10 (opt5)
aggagaaagcuuaccaugggccagaucauuaccuucuuucaagaggugccccacgucaucgaagagguuaugaacauugugcugaucgcccucagccugcuugcuauucugaaggggaucuacaauguggccacaugcggacucuucggccuggucuccuuucuucugcucugugggagaucuugcagcacgaccuauaaaggaguguacgaacugcagacacuggagcucgacauggcgaaccugaauauguguaugccucuuuccugcaccaagaacaauucucaucacuauaucaugguuggcaacgaaacagggcuggagcucacccugacaaauaccagcauuaucaaccauaaauucuguaaucuuuccgaugcucacaagaaaaaccuguacgaccaugcccucaugucuauuaucagcacguuucaccuguccauuccgaauuucaaccaguaugaggccaugagcugcgauuuuaauggaggcaagaucucugugcaguacaaccugucccacaccuaugcugucgacgccgcuaaucauuguggcacaauugccaacggggugcuccaaaccuucaugcggauggcguggggaggcagcuacaucgcccuggauucugggaagggauccugggacugcaucaugacaagcuaccaguaucuuguuauucagaacaccacgugggaagaucacugucaguuuucucgccccuccccuaucggcuaccuggggcuccugagccaaagaacacgggacauuuauaucucccgcagacuucugggaaccuucacauggacccucucugauagcgagggcaaugaaacccccggcggguacugccugacacgguggaugcugauugaggcugagcucaaauguuuuggaaacacggccguggcuaagugcaaugaaaaacaugacgaggaguucugcgauaugcugcgccuuuuugacuucuguaagcaggccaucagacggcugaaaaccgaagcgcagauguccauccagcucauuaacaaggccgucaaugcucugaucaacgaucaacuuauuaugaagaaucaucugcgcgacaucaugggcauuccuuauugcaacuacagcaaauauugguaccucaaucacacagugaccgggaagacaucucugcccagauguuggcugguguccaacggaagcuaccucaaugaaacccacuucucugacgauaucgagcagcaggccgacaacaugaucacggagcugcuucaaaaagaauauauugaucggcagggcaagacaccucuggggcucgucgaccuguuuguuuucagcaccuccuuuuaccugaucucuauuuuccuucaccucgugaaaaucccgacccaucgccacauuacaggaaagcccugcccuaaaccccauagacugaaucacaugggcaucuguagcugcggccuguauaagcacccuggggugcccgucaaguggaaacggugaggacuaguuauaagacugacuagcccgaugggccucccaacgggcccuccuccccuccuugcaccgagauuaaucaaaggcucuuuucagagccaccaaaaaaaaaaaaaaaaaaaaaaaaaaaaaaaaaaaaaaaaaaaaaaaaaaaaaaaaaaaaaaaaagaauu

SEQ ID NO: 37936 - RNA, 1655 nt, Artificial Sequence
  mRNA product Design i-3 (hSL-A64-N5) comprising derived and/or modified sequence from LASV(Lassa virus/H.sapiens-wt/NGA/2016/ISTH_0009;Clade II)__AVO03571__GPCmut10 (opt5)
aggagaaagcuuaccaugggccagaucauuaccuucuuucaagaggugccccacgucaucgaagagguuaugaacauugugcugaucgcccucagccugcuugcuauucugaaggggaucuacaauguggccacaugcggacuccugggccuugucuccuuccugcuccugugugggagaucuugcagcacgaccuauaaaggaguguacgaacugcagacacucgagcuggacauggcgucccuuaacauguguaugccucugucuugcaccaagaauaacagccaucacuauaucaugguuggcaaugaaacagggcucgagcugacccuuacaaacaccuccauuaucaaucauaaauuuuguaaccugucugaugcucacaagaaaaaucucuacgaccaugcccugaugagcauuaucuccacguuccaccugagcauuccgaacuuuaaucaguaugaggccaugucuugcgauuucaacggaggccggaucuccgugcaguacaaucucagccacucuuaugcugucgacgccgcuaaccauuguggcaccauugccaauggggugcugcaaacauuuaugcgcauggcguggggaggcuccuacaucgcccuugauagcgggaagggaucuugggacugcaucaugaccuccuaccaguaucugauuauccagaacacaaccugggaagaucacugucaguucagcagacccuccccuauuggcuaccucgggcugcuuucucaacggacgcgcgacaucuauauuagcagacggcugcucggaacauuuaccuggacacuguccgauagcgagggcaacgaaacccccggcggguacugccugacccgcuggaugcucaucgaggcugagcugaaguguuucggaaauacagccguugcuaaaugcaacgaaaagcaugacgaggaauuuugcgauaugcuuagacuguucgacuuuuguaaacaggccauccggcgccucaagacggaggcgcagaugucuauucagcugaucaauaaagccgugaacgcucuuauuaaugaucaacugaucaugaagaaccaccucagagacauuaugggcaucccuuauugcaauuacuccaaguauugguaccugaaccacaccgucacagggaaaaccagccugccccgguguuggcucgugucuaauggaagcuaccugaacgaaacacauuucuccgacgauaucgagcagcaggccgacaauaugauuaccgagcuucugcaaaaggaauauaucgaucgccagggcaaaacgccucucgggcugguggaccuguucgucuuuucuaccagcuucuaccuuauuuccaucuuucuccaccugguuaagauuccgacacauagacacaucaccggaaaacccugcccuaagccccaucggcugaaccacaugggcauuuguagcugcggccucuauaaucacccuggggugcccgugaaauggaagcgcugaggacuaguuauaagacugacuagcccgaugggccucccaacgggcccuccuccccuccuugcaccgagauuaaucaaaggcucuuuucagagccaccaaaaaaaaaaaaaaaaaaaaaaaaaaaaaaaaaaaaaaaaaaaaaaaaaaaaaaaaaaaaaaaaagaauu

SEQ ID NO: 37937 - RNA, 1655 nt, Artificial Sequence
  mRNA product Design i-3 (hSL-A64-N5) comprising derived and/or modified sequence from LASV(Lassa virus/H.sapiens-wt/NGA/2016/ISTH_0017;Clade II)__AVO03567__GPCmut10 (opt5)
aggagaaagcuuaccaugggccagaucauuaccuucuuucaagaggugccccacgucaucgaagagguuaugaacauugugcugaucgcccucagccugcuugcuauucugaaggggaucuacaauguggccacaugcggacucuucggccuggucuccuuucuucugcucugugggagaucuugcagcacgaccuauaaaggaguguacgaacugcagacacuggagcucgacauggcgucccugaacauguguaugccucuuucuugcaccaagaauaacagccaucacuauaucaugguuggcaaugaaacagggcuggagcucacccugacaaacaccuccauuaucaaucauaaauucuguaaccuuucugaugcucacaagaaaaaucuguacgaccaugcccucaugagcauuaucuccacguuucaccugagcauuccgaacuucaaucaguaugaggccaugucuugcgauuuuaacggaggcaagaucuccgugcaguacaaucugagccacaccuaugcuauugacgccgcuaaccauuguggcacaaucgccaaugggguccuccaaaccuucaugcggauggcguggggaggcucuuacaucgcccuggauuccgggaagggaagcugggacugcauuaugacaucuuaccaguaucuuaucauucagaacaccacgugggaagaucacugucaguuuucccgccccagcccuaucggcuaccuggggcuccugucccaaagaacacgggacauuuauaucucucgcagacuucugggaaccuucacauggacccucagcgauuccgagggcaacgaaacccccggcggguacugccugacacgguggaugcugaucgaggcugagcucaaauguuuuggaaauacggccguggcuaagugcaacgaaaaacaugacgaggaguucugcgauaugcugcgccuuuuugacuucuguaagcaggccauuagacggcugaaaaccgaagcgcagaugagcauccagcucauuaauaaggccguuaacgcucugaucaaugaucaacuuauuaugaagaaccaucugcgcgacaucaugggcaucccuuauugcaauuacucuaaauauugguaccucaaccacacagugaccgggaagacaucccugcccagauguuggcuggucagcaauggaucuuaccucaacgaaacccacuucagcgacgauauugagcagcaggccgacaauaugaucacggagcugcuucaaaaagaauauauggaucggcagggcaagacaccucuggggcucguggaccuguuuguguucuccaccucuuuuuaccugauuagcaucuuccuucaccucguccgcauuccgacccauagacacguuaucggaaaacccugcccuaagccccaucggcugaaccacaugggcauuuguuccugcggccuguauaaacacccuggggugcccgugaaguggaagcgcugaggacuaguuauaagacugacuagcccgaugggccucccaacgggcccuccuccccuccuugcaccgagauuaaucaaaggcucuuuucagagccaccaaaaaaaaaaaaaaaaaaaaaaaaaaaaaaaaaaaaaaaaaaaaaaaaaaaaaaaaaaaaaaaaagaauu

SEQ ID NO: 37938 - RNA, 1655 nt, Artificial Sequence
  mRNA product Design i-3 (hSL-A64-N5) comprising derived and/or modified sequence from LASV(Lassa virus/H.sapiens-wt/NGA/2018/ISTH_0959;Clade II)__AVV65099__GPCmut10 (opt5)
aggagaaagcuuaccaugggccagaucauuaccuucuuucaagaggugccccacgucaucgaagagguuaugaacauugugcugaucgcccucagccugcuugcuauucugaaggggaucuacaauguggucacaugcggacucuucggccugguguccuuucuucugcucugugggagaucuugcagcacgaccuauaaaggaguuuacgaacugcagacacuggagcucgacauggccucccugaacauguguaugccucuuucuugcaccaagaauaacagccaucacuauaucauggugggcaaugaaacagggcuggagcucacccugacaaacaccuccauuaucaaucauaaauucuguaaccuuucugaugcgcacaagaaaaaucuguacgaccaugcucucaugagcauuaucuccacguuucaccugagcauuccgaacuucaaucaguaugaggccaugucuugcgauuuuaacggaggcaagaucuccguccaguacaaucugagccacgccuaugcuauugacgccgcuaaccauuguggcaccaucgccaauggggugcuccaaacauucaugcggauggcguggggaggcucuuacaucgcccuggauuccgggaagggaagcugggacugcauuaugaccucuuaccaguaucuuaucauucagaacacaaccugggaagaucacugucaguuuucccgccccagcccuaucggcuaccuggggcuccugucccaaagaacgcgggacauuuauaucucucgcagacuucugggaacauucaccuggacacucagcgauuccgagggcaacgaaacccccggcggguacugccugacccgguggaugcugaucgaggcugagcucaaauguuuuggaaauacagccguugcuaagugcaacgaaaaacaugacgaggaguucugcgauaugcugcgccuuuuugacuucuguaagcaggccauuagacggcugaaaacggaagcgcagaugagcauccagcucauuaauaaggccgugaacgcucugaucaaugaucaacuuauuaugaagaaccaucugcgcgacaucaugggcaucccuuauugcaauuacucuaaauauugguaccucaaccacaccgucacagggaagaccucccugcccagauguuggcuggugagcaauggaucuuaccucaacgaaacacacuucagcgacgauauugagcagcaggccgacaauaugaucaccgagcugcuucaaaaagaauauauugaucggcagggcaagacgccucuggggcucguggaccuguuugucuucuccacaucuuuuuaccugaucagcauuuuccuucaccucguuaaaaucccgacccaucgccacgugauuggaaagcccugcccuaaaccccauagacugaaccacaugggcaucuguuccugcggccuguauaagcacccuggggugcccgucaaguggaaacggugaggacuaguuauaagacugacuagcccgaugggccucccaacgggcccuccuccccuccuugcaccgagauuaaucaaaggcucuuuucagagccaccaaaaaaaaaaaaaaaaaaaaaaaaaaaaaaaaaaaaaaaaaaaaaaaaaaaaaaaaaaaaaaaaagaauu

SEQ ID NO: 37939 - RNA, 1655 nt, Artificial Sequence
  mRNA product Design i-3 (hSL-A64-N5) comprising derived and/or modified sequence from LASV(LASV003-NIG-2008;Clade II)__AIT17580__GPCmut10 (opt5)
aggagaaagcuuaccaugggccagaucauuaccuucuuucaagaggugccccacgucaucgaagagguuaugaacauugugcugaucgcccucagccugcuugcuauucugaaggggaucuacaauguggccacaugcggacucuucggccuggucuccuuucuucugcucugugggagaucuugcagcacgaccuauaaaggaguguacgaacugcagacacuggagcucgacauggcgucccugaacauguguaugccucuuucuugcaccaagaauaacagccaucacuauaucaugguuggcaaugaaacagggcuggagcucacccugacaaacaccuccauuaucaaucauaaauucuguaaccuuucugaugcucacaagaaaaaucuguacgaccaugcccucaugagcauuaucuccacguuucaccugagcauuccgaacuucaaucaguaugaggccaugucuugcgauuuuaacggaggcaagaucuccgugcaguacaaucugagccacaccuaugcugucgacgccgcuaaccauuguggcacaauugccaauggggugcuccaaaccuucaugcggauggcguggggaggcucuuacaucgcccuggauuccgggaagggaagcugggacugcaucaugacaucuuaccaguaucuuauuauccagaacaccacgugggaagaucacugucaguuuucccgccccagcccuauuggcuaccuggggcuccugucccaaagaacacgggacaucuauauuucucgcagacuucugggaaccuucacauggacccucagcgauuccgagagcaacgaaacccccggcggcuacugccugacacgguggaugcugaucgaggcugagcucaaauguuuugggaauacggccguugcuaagugcaacgaaaaacaugacgaggaguucugcgauaugcugcgccuuuuugacuucuguaagcaggccaucagacggcugaaagcggaagcccagaugucuauucagcucaucaauaaggcugugaacgcccugauuaaugaucaacuuaucaugaagaaccaucugcgcgacauuaugggaaucccuuauugcaauuacuccaaauauugguaccucaaccacaccgucacaggcagaaccagccugccccgguguuggcuggugucuaaugggagcuaccucaacgaaacacacuucuccgacgauaucgagcagcaggcugacaauaugauuaccgagcugcuucaaaaggaauauauggaucgccagggaaaaacgccucugggccucguggaccuguuugucuucucuaccagcuuuuaccugaucuccauuuuccuucaccucguuaagaucccgacacauagacacgugauugggaaacccugcccuaagccccaucggcugaaccacaugggaaucuguagcugcggccuguauaaacacccuggcgugcccgucaaguggaagcgcugaggacuaguuauaagacugacuagcccgaugggccucccaacgggcccuccuccccuccuugcaccgagauuaaucaaaggcucuuuucagagccaccaaaaaaaaaaaaaaaaaaaaaaaaaaaaaaaaaaaaaaaaaaaaaaaaaaaaaaaaaaaaaaaaagaauu

SEQ ID NO: 37940 - RNA, 1655 nt, Artificial Sequence
  mRNA product Design i-3 (hSL-A64-N5) comprising derived and/or modified sequence from LASV(LASV035-NIG-2009;Clade II)__AIT17588__GPCmut10 (opt5)
aggagaaagcuuaccaugggccagaucauuaccuucuuucaagaggugccccacgucaucgaagagguuaugaacauugugcugaucgcccucagccugcuugcuauucugaaggggaucuacaauguggccacaugcggacucuucggccuggucuccuuucuucugcucugugggagaucuugcagcacgaccuauaaaggaguguacgaacugcagacacuggagcucgacauggcgucccugaacauguguaugccucuuucuugcaccaagaauaacagccaucacuauaucaugguuggcaaugaaacagggcuggagcucacccugacaaacaccuccauuaucaaucauaaauucuguaaccuuucugaugcucacaagaaaaaucuguacgaccaugcccucaugagcauuaucuccacguuucaccugagcauuccgaacuucaaucaguaugaggccaugucuugcgauuuuaacggaggcaagaucuccgugcaguacaaucugagccacgcuuaugccgucgacgcugccaaccauuguggcaccauugcgaauggggugcuccaaacauucaugcggauggccuggggaggcucuuacaucgcucuggauuccgggaagggaagcugggacugcaucaugaccucuuaccaguaucuuauuauccagaacacaaccugggaagaucacugucaguuuucccgccccagcccuauuggcuaccuggggcuccugucccaaagaacgcgggacaucuauauuucucgcagacuucugggaacauucaccuggacacucagcgauuccgagggcaacgaaacccccggcggguacugccugacccgguggaugcugaucgaggccgagcucaaauguuuuggaaauacagcuguugccaagugcaacgaaaaacaugacgaggaguucugcgauaugcugcgccuuuuugacuucuguaagcaggcgaucagacggcugaaagccgaagcucagaugagcauucagcucaucaauaaggccgugaacgcucugauuaaugaucaacuuaucaugaagaaccaucugcgcgacauuaugggcaucccuuauugcaauuacucuaaauauugguaccucaaccacacggucaccgggaagacaucccugcccagauguuggcuggugagcaauggaucuuaccucaacgaaacccacuucagcgacgauaucgagcagcaggccgacaauaugauuacagagcugcuucaaaaagaauauaucgaucggcagggcaagaccccucuggggcucguggaccuguuugucuucuccacgucuuuuuaccugauuagcaucuuccuucaccucguuaaaauuccgacacaucgccacgugaucggaaagcccugcccuaaaccccauagacugaaccacaugggcauuuguuccugcggccuguauaagcacccuggggugcccgucaaguggaaacggugaggacuaguuauaagacugacuagcccgaugggccucccaacgggcccuccuccccuccuugcaccgagauuaaucaaaggcucuuuucagagccaccaaaaaaaaaaaaaaaaaaaaaaaaaaaaaaaaaaaaaaaaaaaaaaaaaaaaaaaaaaaaaaaaagaauu

SEQ ID NO: 37941 - RNA, 1655 nt, Artificial Sequence
  mRNA product Design i-3 (hSL-A64-N5) comprising derived and/or modified sequence from LASV(LASV1000-NIG-2009;Clade II)__AIT17782__GPCmut10 (opt5)
aggagaaagcuuaccaugggccagaucauuaccuucuuucaagaggugccccacgucaucgaagagguuaugaacauugugcugaucgcccucagccugcuugcuauucugaaggggaucuacaauguggccacaugcggacucuucggccuggucuccuuucuucugcucugugggagaucuugcagcacgaccuauaaaggaguguacgaacugcagacacuggagcucgacauggcgucccugaacauguguaugccucuuucuugcaccaagaauaacagccaucacuauaucaugguuggcaaugaaacagggcuggagcucacccugacaaacaccuccauuaucaaucauaaauucuguaaccuuucugaugcucacaagaaaaaucuguacgaccaugcccucaugagcauuaucuccacguuucaccugagcauuccgaacuucaaucaguaugaggccaugucuugcgauuuuaacggaggcaagaucuccgugcaguacaaucugagccacaccuaugcugucgacgccgcuaaccauuguggcacaauugccaauggggugcuccaaaccuucaugcggauggcguggggaggcucuuacaucgcccuggauuccgggaagggaagcugggacugcaucaugacaucuuaccaguaucuuauuauccagaacaccacgugggaagaucacugucaguuuucccgccccagcccuauuggcuaccuggggcuccugucccaaagaacacgggacaucuauauuucucgcagacuucugggaaccuucacauggacccucagcgauuccgagggcaacgaaacccccggcggguacugccugacacgguggaugcugaucgaggcugagcucaaauguuuuggaaauacggccguugcuaagugcaacgaaaaacaugacgaggaguucugcgauaugcugcgccuuuuugacuucuguaagcaggccaucaaaagacugaagaccgaagcgcagaugagcauucagcucaucaauaaggccgugaacgcucugauuaaugaucaacuuaucaugaaaaaccaucugcgggacauuaugggcaucccuuauugcaauuacucuaaguauugguaccucaaccacacagucaccgggaaaacaucccugccccgcuguuggcuggugagcaauggaucuuaccucaacgaaacccacuucagcgacgauaucgagcagcaggccgacaauaugauuacggagcugcuucaaaaggaauauaucgauagacagggcaaaacaccucuggggcucguggaccuguuugucuucuccaccucuuuuuaccugauuagcaucuuccuucaccucguuaagauuccgacccaucggcacguggugggaaaacccugcccuaagccccaucgccugaaccacaugggcaucuguuccugcggccuguauaagcacccugggguccccgugaaauggaagagaugaggacuaguuauaagacugacuagcccgaugggccucccaacgggcccuccuccccuccuugcaccgagauuaaucaaaggcucuuuucagagccaccaaaaaaaaaaaaaaaaaaaaaaaaaaaaaaaaaaaaaaaaaaaaaaaaaaaaaaaaaaaaaaaaagaauu

SEQ ID NO: 37942 - RNA, 1655 nt, Artificial Sequence
  mRNA product Design i-3 (hSL-A64-N5) comprising derived and/or modified sequence from LASV(LASV221-NIG-2010;Clade II)__AIT17624__GPCmut10 (opt5)
aggagaaagcuuaccaugggccagaucauuaccuucuuucaagaggugccccacgucaucgaagagguuaugaacauugugcugaucgcccucagccugcuugcuauucugaaggggaucuacaauguggccacaugcggacucuucggccuggucuccuuucuucugcucugugggagaucuugcagcacgaccuauaaaggaguguacgaacugcagacacuggagcucgacauggcgucccugaacauguguaugccucuuucuugcaccaagaauaacagccaucacuauaucaugguuggcaaugaaacagggcuggagcucacccugacaaacaccuccauuaucaaucauaaauucuguaaccuuucugaugcucacaagaaaaaucuguacgaccaugcccucaugagcauuaucuccacguuucaccugagcauuccgaacuucaaucaguaugaggccaugucuugcgauuuuaacggaggcaagaucuccgugcaguacaaucugagccacaccuaugcuauugacgccgcuaaccauuguggcacaaucgccaaugggguccuccaaaccuucaugcggauggcguggggaggcucuuacaucgcccuggauuccgggaagggaagcugggacugcauuaugacaucuuaccaguaucuuaucauucagaacaccacgugggaagaucacugucaguuuucccgccccagcccuaucggcuaccuggggcuccugucccaaagaacacgggacauuuauaucucucgcagacuucugggaaccuucacauggacccucagcgauuccgagggcaacgaaacccccggcggguacugccugacacgguggaugcugaucgaggcugagcucaaauguuuuggaaauacggccguggcuaagugcaacgaaaaacaugacgaggaguucugcgauaugcugcgccuuuuugacuucuguaagcaggccauuagacggcugaaaaccgaagcgcagaugagcauccagcucauuaauaaggccguuaacgcucugaucaaugaucaacuuauuaugaagaaccaucugcgcgacaucaugggcaucccuuauugcaauuacucuaaauauugguaccucaaccacacagugaccgggaagacaucccugcccagauguuggcuggucagcaauggaucuuaccucaacgaaacccacuucagcgacgauauugagcagcaggccgacaauaugaucacggagaugcugcaaaaagaauauauggaucggcagggcaagacaccucuugggcugguggaccucuuuguguucuccaccucuuuuuaccugauuagcaucuuccugcaccuugucaaaauuccgacccaucgccacguuaucggaaagcccugcccuaaaccccauagacucaaccacaugggcauuuguuccugcggccuguauaagcacccuggggugcccgugaaguggaaacggugaggacuaguuauaagacugacuagcccgaugggccucccaacgggcccuccuccccuccuugcaccgagauuaaucaaaggcucuuuucagagccaccaaaaaaaaaaaaaaaaaaaaaaaaaaaaaaaaaaaaaaaaaaaaaaaaaaaaaaaaaaaaaaaaagaauu

SEQ ID NO: 37943 - RNA, 1655 nt, Artificial Sequence
  mRNA product Design i-3 (hSL-A64-N5) comprising derived and/or modified sequence from LASV(LASV237-NIG-2010;Clade II)__AIT17638__GPCmut10 (opt5)
aggagaaagcuuaccaugggccagaucauuaccuucuuucaagaggugccccacgucaucgaagagguuaugaacauugugcugaucgcccucagccugcuugcuauucugaaggggaucuacaauguggccacaugcggacucuucggccuggucuccuuucuucugcucugugggagaucuugcagcacgaccuauaaaggaguguacgaacugcagacacuggagcucgacauggcgucccugaacauguguaugccucuuucuugcaccaagaauaacagccaucacuauaucaugguuggcaaugaaacagggcuggagcucacccugacaaacaccuccauuaucaaucauaaauucuguaaccuuucugaugcucacaagaaagaccuguacgaucaugcccucaugagcauuaucuccacguuucaccugagcauuccgaauuucaaccaguaugaggccaugucuugcgacuuuaauggaggcaagaucuccgugcaguacaaccugagccacaccuaugcugucgaugccgcuaaucauuguggcacaauugccaacggggugcuccaaaccuucaugcggauggcguggggaggcucuuacaucgcccuggacuccgggaagggaagcugggauugcaucaugacaucuuaccaguaucuuauuauccagaauaccacgugggaagaccacugucaguuuucccgccccagcccuauuggcuaccuggggcuccugucccaaagaacacgggauaucuauauuucucgcagacuucugggaaccuucacauggacccucagcgacuccgagggcaacgaaacccccggcggguacugccugacacgguggaugcugaucgaggcugagcucaaauguuuuggaaacacggccguugcuaagugcaaugaaaaacaugaugaggaguucugcgacaugcugcgccuuuuugauuucuguaagcaggccaucagacggcugaaaaccgaagcgcagaugagcauucagcucaucaacaaggccgugaaugcucugauuaacgaccaacuuaucaugaagaaucaucugcgcgacauuaugggcaucccuuauugcaacuacucuaaauauugguaccucaaucacacagucaccgggaagacaucccugcccagauguuggcuggugagcaacggaucuuaccucaaugaaacccacuucagcgaugacaucgagcagcaggccgauaacaugauuacggagcugcuucaaaaagaauauauggaccggcagggcaagacaccucuggggcucguggaucuguuugucuucuccaccucuuuuuaccugaucagcauuuuccuucaccucaucaaaauuccgacccaucgccacaucacaggaaagcccugcccuaaaccccauagacugaaucacaugggcauuuguuccugcggccuguauaagcacccugggguucccgugaaguggaaacggugaggacuaguuauaagacugacuagcccgaugggccucccaacgggcccuccuccccuccuugcaccgagauuaaucaaaggcucuuuucagagccaccaaaaaaaaaaaaaaaaaaaaaaaaaaaaaaaaaaaaaaaaaaaaaaaaaaaaaaaaaaaaaaaaagaauu

SEQ ID NO: 37944 - RNA, 1655 nt, Artificial Sequence
  mRNA product Design i-3 (hSL-A64-N5) comprising derived and/or modified sequence from LASV(LASV253-NIG-2011;Clade II)__AIT17670__GPCmut10 (opt5)
aggagaaagcuuaccaugggccagaucauuaccuucuuucaagaggugccccacgucaucgaagagguuaugaacauugugcugaucgcccucagccugcuugcuauucugaaggggaucuacaauguggccacaugcggacucuucggccuggucuccuuucuucugcucugugggagaucuugcagcacgaccuauaaaggaguguacgaacugcagacacuggagcucgacauggcgucccugaacauguguaugccucuuucuugcaccaagaauaacagccaucacuauaucaugguuggcaaugaaacagggcuggagcucacccugacaaacaccuccauuaucaaucauaaauucuguaaccuuucugaugcucacaagaaaaaucuguacgaccaugcccucaugagcauuaucuccacguuucaccugagcauuccgaacuucaaucaguaugaggccaugucuugcgauuuuaacggaggcaagaucuccgugcaguacaaucugagccacaccuaugcugucgacgccgcuaaccauuguggcacaauugccaauggggugcuccaaaccuucaugcggauggcguggggaggcucuuacaucgcccuggauuccgggaagggaagcugggacugcaucaugacaucuuaccaguaucuuauuauccagaacaccacgugggaagaucacugucaguuuucccgccccagcccuauuggcuaccuggggcuccugucccaaagaacacgggacaucuauauuucucgcagacuucugggaaccuucacauggacccucagcgauuccgagggcaacgaaacccccggcggguacugccugacacgguggaugcugaucgaggcugagcucaaauguuuuggaaauacggccguugcuaagugcaacgaaaaacaugacgaggaguucugcgauaugcugcgccuuuuugacuucuguaagcaggccaucagacggcugaaagcggaagcccagaugagcauucagcucaucaauaaggcugugaacgcccugauuaaugaucaacuuaucaugaagaaccaucugcgcgacauuaugggcaucccuuauugcaauuacucuaaauauugguaccucaaccacaccgucacagggagaaccucccugccccgguguuggcuggugagcaauggaucuuaccucaacgaaacacacuucagcgacgauaucgagcagcaggcugacaauaugauuaccgagcugcuucaaaaggaauauaucgaucgccagggcaaaacgccucuggggcucguggaccuguuugucuucuccacaucuuuuuaccugauuagcaucuuccuucaccucguuaagauuccgacccauagacacaucauuggaaaacccugcccuaagccccaucggcugaaccacaugggcaucuguuccugcggccuguauaaacacccuggggugcccgugaaguggaagcgcugaggacuaguuauaagacugacuagcccgaugggccucccaacgggcccuccuccccuccuugcaccgagauuaaucaaaggcucuuuucagagccaccaaaaaaaaaaaaaaaaaaaaaaaaaaaaaaaaaaaaaaaaaaaaaaaaaaaaaaaaaaaaaaaaagaauu

SEQ ID NO: 37945 - RNA, 1655 nt, Artificial Sequence
  mRNA product Design i-3 (hSL-A64-N5) comprising derived and/or modified sequence from LASV(LASV254-NIG-2011;Clade II)__AIT17674__GPCmut10 (opt5)
aggagaaagcuuaccaugggccagaucauuaccuucuuucaagaggugccccacgucaucgaagagguuaugaacauugugcugaucgcccucagccugcuugcuauucugaaggggaucuacaauguggccacaugcggacucuucggccuggucuccuuucuucugcucugugggagaucuugcagcacgaccuauaaaggaguguacgaacugcagacacuggagcucgacaugaccaaccugaauauguguaugccucuuuccugcacaaagaacaauucucaucacuauaucaugguuggcaacgaaaccgggcuggagcucacacugaccaauacgagcauuaucaaccauaaauucuguaaucuuuccgaugcgcacaagaaaaaccuguacaaucaugcucucaugucuauuaucagcaccuuucaccuguccauuccgaacuucaaucaguaugaggccaugagcugcgacuuuaacggaggcaagaucucugugcaguacaaucugucccacagcuaugccgucgaugcugccaaccauuguggcacaauugcuaacggggugcuccaaaccuucaugcggauggccuggggaggcucuuacaucgcgcuggacuccgggaagggaaauugggauugcaucaugacaagcuaccaguaucuuauuauccagaacaccacgugggaagaccacugucaguuuucucgccccuccccuauuggcuaccuggggcuccugagccaaagaacacgggauaucuauauuucccgcagacuucugggaaccuucacauggacccucucugacagcgagggcaaugaaacccccggcggguacugccugacacgguggaugcugaucgaggccgagcucaaauguuuuggaaacacggcuguugccaagugcaaugaaaaacaugaugaggaguucugcgacaugcugcgccuuuuugauuucuguaagcaggcuaucagacggcugaaaaccgaagcccaggcgaacauucagcucaucaauaaggccgugaacgcucugauuaaugaccaacuuaucaugaagaaccaucugcgcgauauuaugggcaucccuuauugcaauuacuccaaauauugguaccucaaccacacagucaccgggaagacaagccugcccagauguuggcuggugucuaauggauccuaccucaacgaaacccacuucagcgacgacaucgagcagcaggccgauaauaugauuacggagcugcuucaaaaagaauauauggaccggcagggcaagacaccucuggggcucguggaucuguuugucuucucuaccagcuuuuaccugaucuccauuuuccuucaccucguuaaaaucccgacccaucgccacgugauuggaaagcccugcccuaaaccccauagacugaaccacaugggcaucuguucuugcggccuguauaagcacccuggggugcccgucaaguggaaacggugaggacuaguuauaagacugacuagcccgaugggccucccaacgggcccuccuccccuccuugcaccgagauuaaucaaaggcucuuuucagagccaccaaaaaaaaaaaaaaaaaaaaaaaaaaaaaaaaaaaaaaaaaaaaaaaaaaaaaaaaaaaaaaaaagaauu

SEQ ID NO: 37946 - RNA, 1655 nt, Artificial Sequence
  mRNA product Design i-3 (hSL-A64-N5) comprising derived and/or modified sequence from LASV(Nig08-A19;Clade III)__ADU56618__GPCmut10 (opt5)
aggagaaagcuuaccaugggccagaucgugaccuucuuucaagaggucccccacguuauugaagaggugaugaacaucgugcugauugcccucagcauccuggcuauucuuaaggggcuguacaauaucgccacaugcggacucaucggccuggucacguuccuucugcucuccgggagaucuuguagcaugaccuauaaaggaguguacgaacugcagacacuggagcucaacaugaauacccugaacaugugcaugccucuuuccuguacaaagaauaacucucaucacuauauuaugguuggcaaugaaaccgggcuggagcucacacugaccaacacgagccuucugcaucacaaauuuugcaaucucuccgacgcgcauaagaaaaaccuguacgaucacacccugaugucuaucauuagcacauuccaccucuccaucccgaauuuuaaccaguaugaggcuaugagcugugacuucaauggaggcaagauuaccgugcaguacaaccugucucauuccuaugccaucgaugccgcuaaucacugcggcacagucgccaacggggugcuucaaaccuuuaugcggauggcuuggggaggcagcuacauugcccuggacucugggcgcggaaagugggauuguaucaugacguccuaccaguaucucaucauucagaacacaaccugggaagaccauugccaguucagcagacccucuccuaucggcuaccuggggcuucugucccaacggacacgcgauauuuauaucagcagacggcuccugggaaccuuuaccuggacacuguccgacucugagggcaaugaaacgcccggcggguacugucucacccgcuggaugcugauugaggcggagcuuaaaugcuucggaaacacagccguugcuaaguguaaugaaaaacacgaugaggaauuuugcgacaugcugagacucuucgauuuuugcaagcaggccauccggcgccugaaagcugaggcccagaugagcauccagcuuauuaacaaggcggugaaugcccugaucaacgaccaacucauuaugaagaaucaccugagagauaucaugggcauuccuuauuguaacuacuccaaauauugguaccugaaucauaccagcacagggcggaccucucucccccgcugcuggcuggucuccaacggaagcuaccuuaaugaaacgcacuucucugacgacaucgagcagcaggcugauaacaugaucacagagaugcugcaaaaggaauaucucgacagacagggcaaaaccccucuggggcugguggaucuuuucguguuuagcaccuccuucuaccucauuucuaucuuucugcaucuggucaagauuccgacacaccggcauaucguuggaaaacccuguccuaagccccaccgccucaaucacaugggcauuugcagcuguggccuguauaaacagccuggggugcccgugagauggaagcggugaggacuaguuauaagacugacuagcccgaugggccucccaacgggcccuccuccccuccuugcaccgagauuaaucaaaggcucuuuucagagccaccaaaaaaaaaaaaaaaaaaaaaaaaaaaaaaaaaaaaaaaaaaaaaaaaaaaaaaaaaaaaaaaaagaauu

SEQ ID NO: 37947 - RNA, 1658 nt, Artificial Sequence
  mRNA product Design i-3 (hSL-A64-N5) comprising derived and/or modified sequence from LASV(G1180-SLE-2010;Clade IV)__AIT17168__GPCmut10 (opt5)
aggagaaagcuuaccaugggccagaucgugaccuucuuucaagaggucccccacguuauugaagaggugaugaacaucgugcugauugcccucagcauccuggcuguccuuaaggggcuguacaauuucgccacaugcggacucgugggccugcuuacguuucugcuccugugugggagauccugcaccgcgucucgguauaaaggaguuuacgaacugcagacacucgagcugaacauggaaacccuuaauauguguaugccucugagcugcacaaagaacaauucccaucacuauauuauggugggcaacgagaccgggcucgagcugacacuuaccaauacgucuaucaucaaccauaaauucuguaaucugagcgacgcucacaagaaaaaccucuacgaucaugcccugauguccauuaucucuaccuuucaccugagcauuccgaauuucaaccaguaugaagccauguccugcgacuuuaauggaggcaagaucagcguccaguacaaccucucucacuccuaugcuggcgaugccgcuaaucauugugggacaguggccaacggaguucugcaaaccuucaugcgcauggcguggggcgggagcuacauugcccuugacucuggacacggcuccugggauugcaucaugacaagcuaccaguaucugauuauccagaacaccacgugggaggaccauugucaguuuucuagacccuccccuaucggguaccucggacugcuuagccaacggacacgcgauauuuauaucuccagacggcugcucggcaccuucacauggacccugucugacagcgaaggcaaggauacccccgggggauacugccugacacgcuggaugcucauugaggcugagcugaaauguuuuggcaauacggccguggcuaagugcaacgaaaaacacgacgaggaguucugcgauaugcuuagacuguuugacuucuguaagcaggccauccagcggcucaaagcggaagcccagauguccauucaacugaucaauaaggcugucaacgcccuuaucaaugaucagcugauuaugaagaaccaccuccgcgacaucauggggauuccuuauugcaauuacagcaaauauugguaccugaaccauaccacaaccggaaagacaucucugcccaaauguuggcucguguccaauggcagcuaccugaacgaaacccacuucucugacgauaucgagcagcaagcugacaauaugauuacggagaugcuucagaaggaauauauggagagacaggggaaaacaccucugggacucguggaucuguuugucuucagcaccuccuuuuaccugaucucuaucuuccuucaucucguuaagauuccgacccaccggcauaucgugggcaaaagcugccccaagccucaccgccugaaccacaugggcauuuguuccugcgggcuguauaagcagcccggagugccugucaaauggaagagaugaggacuaguuauaagacugacuagcccgaugggccucccaacgggcccuccuccccuccuugcaccgagauuaaucaaaggcucuuuucagagccaccaaaaaaaaaaaaaaaaaaaaaaaaaaaaaaaaaaaaaaaaaaaaaaaaaaaaaaaaaaaaaaaaagaauu

SEQ ID NO: 37948 - RNA, 1658 nt, Artificial Sequence
  mRNA product Design i-3 (hSL-A64-N5) comprising derived and/or modified sequence from LASV(G1442-SLE-2011;Clade IV)__AIT17180__GPCmut10 (opt5)
aggagaaagcuuaccaugggccagaucgugaccuucuuucaagaggucccccacguuauugaagaggugaugaacaucgugcugauugcccucagcauccuggcuguccuuaaggggcuguacaauguggccacaugcggacucauuggccugguuacguuccuucugcucugugggagauccugcaccacaacccuguauaaaggaguguacgaacugcagacacucgagcugaacauggaaacccuuaauauguguaugccucugucuugcacaaagaacaauagccaucacuauauccgggucggcaacgagaccgggcucgagcugacgcuuaccaauacauccaucauuaaccauaaauuuuguaaucugucugacgcgcacaagaaaaaccucuacgaucaugcucugaugagcaucauuuccaccuuccaccugucuaucccgaauuuuaaccaguaugaagccaugagcugcgacuucaauggaggcaagauuuccgugcaguacaaccucagccacucuuaugccggcgaugcugccaaucauugugggacaguugcuaacggagugcugcaaaccuuuaugcgcauggccuggggcggguccuacaucgcgcuugacagcggaagaggcaacugggauugcauuaugacgucuuaccaguaucugaucauccagaauacaaccugggacgaucacugucaguucucccggcccagcccuauuggguaccucggacugcuuucucaacgcacaagagacgucuauaucucccggcgccugcucggcaccuuuaccuggacacugagcgauuccgagggcaaggacacgcccgggggauacugccugaccagauggaugcucauugaagccgagcugaaauguuucggcaacacagcuguggccaagugcaaugagaaacaugaugaagaguuuugcgacaugcuucggcuguucgauuuuuguaagcaggcuauccagcgccucaaagccgaagcgcagaugucuauucaacugaucaacaaggccgugaaugcucuuaucaacgaccagcugauuaugaagaaucaccucagagacaucauggggauuccuuauugcaacuacagcaaauauugguaccugaauaacaccgccacaggaaagaccucccugcccaaauguuggcucaucagcaauggcucuuaccugaacgagacgcacuucuccgaugacauugaacaggaggcugauaauaugaucacagagaugcuucaaaaggaauauauggagcggcaggggaaaaccccucugggacucgucgaccuguucguuuuuagcaccucuuucuaccugaucagcauuuuucuucaucucgugaagaucccgacacaccgccauauugugggcaaauccugccccaagccucacagacugaaccauaugggcaucuguucuugcgggcuguauaagcagcccggagucccugugcgguggaaacgcugaggacuaguuauaagacugacuagcccgaugggccucccaacgggcccuccuccccuccuugcaccgagauuaaucaaaggcucuuuucagagccaccaaaaaaaaaaaaaaaaaaaaaaaaaaaaaaaaaaaaaaaaaaaaaaaaaaaaaaaaaaaaaaaaagaauu

SEQ ID NO: 37949 - RNA, 1658 nt, Artificial Sequence
  mRNA product Design i-3 (hSL-A64-N5) comprising derived and/or modified sequence from LASV(G3010-SLE-2013;Clade IV)__AIT17344__GPCmut10 (opt5)
aggagaaagcuuaccaugggccagaucgugaccuucuuucaagaggucccccacguuauugaagaggugaugaacaucgugcugauugcccucagcauccuggcuguccuuaaggggcuguacaauuucgccacaugcggacucgugggccugguuacguuucuucugcucugugggagauccugcaccacaucucuguauaaaggaguguacgaacugcagacccucgagcugaacauggaaacacuuaauauguguaugccucugagcugcaccaagaacaauucccaucacuauauuauggucggcaacgagacagggcucgagcugacccuuacgaauaccucuaucaucaaccauaaauucuguaaucugagcgacgcgcacaagaaaaaccucuacaaucaugcucugauguccauuaucucuacauuucaccugagcauuccgaacuucaaucaguaugaagccauguccugcgauuuuaacggaggcaagaucagcgugcaguacaaucucucucacuccuaugccggcgacgcugccagccauugugggaccguugcuaacggagugcugcaaacauucaugcggauggccuggggcgggucuuacauugcgcuugauuccggauacggcaagugggacugcaucaugaccagcuaucaguaccugauuauccagaacacgacaugggaggaucacugucaguuuucucgccccuccccuaucggguaucucggacugcuuagccaaagaacccgggacauuuacaucucccgcagacugcucggcacauucaccuggacccugucugauagcgaaggcaaagacacacccgggggauauugccugacgcgguggaugcucauugaggccgagcugaaguguuuuggcaauaccgcugucgccaaaugcaacgaaaagcaugaugaggaguucugcgacaugcuucgccuguuugauuucuguaaacaggcuauccagagacucaagacagaagcccagauguccauucaacugaucaauaaggcggugaacgcccuuaucaaugaccagcugauuaugaaaaaccaccuccgggauaucauggggauuccuuacugcaauuauagcaaguacugguaccugaaccacaccacaaccggaaaaacgucucugcccaaguguuggcucguguccaauggcagcuaucugaacgaaacacauuucucugacgacaucgagcagcaagcugauaauaugauuaccgagaugcuucagaaagaauacauggagcgccaggggaagaccccucugggacucgucgaccuguuuguuuucagcacauccuuuuaucugaucucuaucuuccuucaccucgugaaaauuccgacccauagacacaucgugggcaagagcugccccaagccucaucggcugaaccacaugggcauuuguuccugcgggcuguacaaacagcccggagucccugugcgcuggaagagaugaggacuaguuauaagacugacuagcccgaugggccucccaacgggcccuccuccccuccuugcaccgagauuaaucaaaggcucuuuucagagccaccaaaaaaaaaaaaaaaaaaaaaaaaaaaaaaaaaaaaaaaaaaaaaaaaaaaaaaaaaaaaaaaaagaauu

SEQ ID NO: 37950 - RNA, 1658 nt, Artificial Sequence
  mRNA product Design i-3 (hSL-A64-N5) comprising derived and/or modified sequence from LASV(G502-SLE-2009;Clade IV)__AIT17126__GPCmut10 (opt5)
aggagaaagcuuaccaugggccagaucgugaccuucuuucaagaggucccccacguuauugaagaggugaugaacaucgugcugauugcccucagcauccuggcuguccuuaaggggcuguacaauuucgccacaugcggacucgugggccugcuuacguuucugcuccugugugggagauccugcaccacaggacuguauaaaggcguuuacgaacuccagacccuggagcuuaacauggaaacacugaauauguguaugccucucucuugcaccaagaacaauagccaucacuauauuaugguggggaacgagacaggacuggagcuuacccugacgaauaccuccaucaucaaccauaaauucuguaaucucucugacgcgcacaagaaaaaccuguacgaucaugcucugaugagcauuaucuccacauuucaccucucuauuccgaauuucaaccaguaugaagccaugagcugcgacuuuaauggcggcaagaucuccguccaguacaaccugagccacucuuaugccggggaugcugccgaccauuguggaaccguggcuaauggcguucuucaaacauucaugcggauggccuggggaggguccuacauugcgcuggauagcggccgcgggagaugggacugcaucaugaccucuuaccaguaucucauuauccagaacacgacaugggaggaucacugucaguuuucccggcccagcccuaucggauaccugggccuucugucucaacgcaccagagacauuuauaucucccggcgccuccugggcacauucaccuggacccugagcgauuccgaagggaaggacacacccggaggcuacugccucacgagauggaugcugauugaggccgagcuuaaauguuuugggaacaccgcuguggccaagugcaaugaaaaacaugaugaggaguucugcgacaugcugcggcucuuugauuucuguaagcaggcuauccagcgccugaaagccgaagcgcagaugucuauucaacuuaucaacaaggccgucaaugcucugaucaacgaccagcucgugaugaagaaucaccugagagacauuaugggaaucccuuauugcaacuacagccgguauugguaccugaaucacacaaccacaggccgcaccucccuccccaaauguuggcuggugagcaacgggucuuaccuuaaugaaacgcauuucuccgaugacauugagcagcaagccgauaacaugaucacagagaugcugcagaaggaauauauggagagacagggaaaaaccccucucggccuggucgaccuguuuguuuucagcaccucuuuuuaccuuauuagcaucuuccuccaccuggugaagaucccgacacaucggcacauugugggcaaauccugccccaagccucaucgccugaaucacauggggaucuguucuugcggacucuauaaacagcccggcgucccugugaaguggaagagaugaggacuaguuauaagacugacuagcccgaugggccucccaacgggcccuccuccccuccuugcaccgagauuaaucaaaggcucuuuucagagccaccaaaaaaaaaaaaaaaaaaaaaaaaaaaaaaaaaaaaaaaaaaaaaaaaaaaaaaaaaaaaaaaaagaauu

SEQ ID NO: 37951 - RNA, 1658 nt, Artificial Sequence
  mRNA product Design i-3 (hSL-A64-N5) comprising derived and/or modified sequence from LASV(G733-SLE-2010;Clade IV)__AIT17154__GPCmut10 (opt5)
aggagaaagcuuaccaugggccagaucgugaccuucuuucaagaggucccccacguuauugaagaggugaugaacaucgugcugauugcccucagcauccuggcuguccuuaaggggcuguacaauuucgccacaugcggaauugugggccucguuuccuuucugcuucugugugggagaucuugcacgaccagccucuauaaaggaguguacgaacugcagacacuggagcucaacauggaaacccugaauauguguaugccucuuuccugcacaaagaacaauucucaucacuauaucauggucggcaacgagaccgggcuggagcucacacugaccaauacgagcaucauuaaccauaaauucuguaaucuuuccgacgcgcacaagaaaaaccuguacgaucaugcucucaugucuaucauuagcaccuuucaccuguccaucccgaauuucaaccaguaugaagccaugagcugcgacuuuaauggaggcaagauuucugugcaguacaaccugucccacagcuaugccggcgaugcugccaaucauugugggacaaucgcuaacggaguucuccaaaccuucaugcggauggccuggggcgggucuuacauugcgcuggacuccggacgcgauagaugggacugcaucaugacaagcuaccaguaucuuaucauucagaacaccacgugggaggaucacugucaguuuucucggcccuccccuaucggcuaccuggggcuccugagccaacgcacaagagacauuuauaucucccggcgccuucugggaaccuucacauggacccucucugauagcgaaggcaaggacacccccggcggguacugccugacaagauggaugcugauugaggccgagcucaaauguuuuggaaauacggcuguggccaagugcaacgaaaaacaugaugaggaguucugcgacaugcugcggcuuuuugauuucuguaagcaggcuauccagcgccugaaagccgaagcgcagauguccauccaacucauuaauaaggccgucaacgcucugaucaaugaccagcuuauuaugaagaaccaccugagagacaucaugggcauuccuuauugcaauuacagcaaauauugguaccucaaccacaccacaaccgggaagacaucucugcccaaauguuggcugguguccaauggaagcuaccucaacgaaacccauuucucugaugacaucgagcagcaagccgauaauaugaucacggagaugcugcagaaggaauauauggagcggcagggcaaaacaccucuugggcugguggaccucuuugucuucagcaccuccuuuuaccugauuucuaucuuccugcaccuuguuaagauuccgacccaucgccacguggugggaaaaagcugccccaagccucauagacucaaccacaugggcaucuguuccugcggccuguaugggcagcccggagucccugugaaguggaaacggugaggacuaguuauaagacugacuagcccgaugggccucccaacgggcccuccuccccuccuugcaccgagauuaaucaaaggcucuuuucagagccaccaaaaaaaaaaaaaaaaaaaaaaaaaaaaaaaaaaaaaaaaaaaaaaaaaaaaaaaaaaaaaaaaagaauu

SEQ ID NO: 37952 - RNA, 1658 nt, Artificial Sequence
  mRNA product Design i-3 (hSL-A64-N5) comprising derived and/or modified sequence from MOPV/LASV reassortant(IGS-1;Clade IV)__AFY05576__GPCmut10 (opt5)
aggagaaagcuuaccaugggccagaucgugaccuucuuucaagaggucccccacguuauugaagaggugaugaacaucgugcugauugcccucagcguccuggcugugcuuaaggggcuguacaauuucgccacaugcggacucguuggccuggugacguuucuucugcucugugggagauccugcaccacaucucuguauaaaggagucuacgaacugcagacccucgagcugaacauggaaacacuuaauauguguaugccucugagcugcaccaagaacaauucccaucacuauaucauggugggcaacgagacagggcucgagcugacccuuacgaauaccucuauuaucaaccauaaauucuguaaucugagcgacgcgcacaagaaaaaccucuacgaucaugcucugauguccaucauuucuacauuucaccugagcaucccgaauuucaaccaguaugaagccauguccugcgacuuuaauggaggcaagauuagcguucaguacaaccucucucacuccuaugccggcgaugcugccaaucauugugggaccguggcuaacggaguccugcaaacauucaugcggauggccuggggcgggagcuacaucgcgcuugacucuggacgcggcaacugggauugcauuaugaccuccuaccaguaucugaucauucagaauacgacaugggaggaccacugucaguuuagcagacccucuccuaucggguaccucggacugcuuucccaacggacccgcgauaucuauauuagcagacggcugcucggcacauucaccuggacccuguccgacucugaaggcgaggauacacccgggggauacugccugacgcgcuggaugcucaucgaggccgaacugaaguguuuuggcaacaccgcuguggccaaaugcaaugagaagcaugacgaagaguucugcgauaugcuuagacuguuugacuucuguaaacaggcuauucagcggcucaaggccgaagcgcagaugagcauccaacugauuaacaaagccgugaaugcucuuaucaacgaucagcugaucaugaagaaucaccuccgcgacauuauggggaucccuuauugcaacuacuccaaguauugguaccugaaucacacaaccacaggaagaaccagccugcccaaauguuggcucgucucuaacggcuccuaccugaaugagacgcauuucagcgacgauauugagcagcaagccgacaacaugaucacagaaaugcuucagaaggaguauauggaacggcaggggaaaaccccucugggacucguugaucuguuuguguucucuaccagcuuuuaccugauuuccaucuuccuucaccucgugaagaucccgacacaucgccacauugucggcaaaucuugccccaagccucauagacugaaucacaugggcaucuguagcugcgggcuguauaaacagcccggagugccuguuaaguggaagcggugaggacuaguuauaagacugacuagcccgaugggccucccaacgggcccuccuccccuccuugcaccgagauuaaucaaaggcucuuuucagagccaccaaaaaaaaaaaaaaaaaaaaaaaaaaaaaaaaaaaaaaaaaaaaaaaaaaaaaaaaaaaaaaaaagaauu

SEQ ID NO: 37953 - RNA, 1658 nt, Artificial Sequence
  mRNA product Design i-3 (hSL-A64-N5) comprising derived and/or modified sequence from LASV(LM765-SLE-2012;Clade IV)__AIT17814__GPCmut10 (opt5)
aggagaaagcuuaccaugggccagaucgugaccuucuuucaagaggucccccacguuauugaagaggugaugaacaucgugcugauugcccucagcauccuggcuguccuuaaggggcuguacaauuucgccacaugcggacucgugggccugguuacguuucuucugcucugugggagauccugcaccacaucucuguauaaaggaguguacgaacugcagacccucgagcugaacauggaaacacuuaauauguguaugccucugagcugcaccaagaacaauucccaucacuauauuauggucggcaacgagacagggcucgagcugacccuuacgaauaccucuaucaucgaccauaaauucuguaaccugagcgaugcgcaccggaagaaucucuacgaccaugcucugauguccauuaucucuacauuucaccugagcauuccgaacuucaaucaguaugaagccauguccugcgauuuuaacggaggcaaaaucagcgugcaguacaaucucucucacuccuaugccaaggacgcugccgaucauuguggcaccguugcuaacggggugcugcaaacauucaugcgcauggccuggggaggcagcuacauugcgcuugacucugggagaggacggugggauugcaucaugaccuccuaccaguaucugauuauccagaauacgacaugggaggaccacugucaguuuagccgccccucuccuaucggcuaccucgggcugcuuucccaaagaacccgggauauuuauaucagccgcagacugcucggaacauucaccuggacccuguccgacucugaaggcaaggauacacccggcggguacugccugacgcgguggaugcucauugaggccgagcugaaauguuuuggaaacaccgcugucgccaagugcaacgaaaaacaugacgaggaguucugcgauaugcuucgccuguuugacuucuguaagcaggcuauccagagacucaaagccgaagcgcagaugagcauucaacugaucaauaaggccgugaacgcucuuaucaaugaccagcugauuaugaagaaccaccuccgggauaucaugggcauuccuuauugcaauuacuccaaauauugguaccugaaccacacaaccacagggaagaccagccugcccaaauguuggcucgugucuaauggauccuaccugaacgaaacgcauuucagcgacgauaucgagcagcaagccgacaauaugauuacagagaugcuucagaaggaauauauggagcgccagggcaaaaccccucuggggcucgucgaucuguuuguuuucucuaccagcuuuuaccugaucuccaucuuccuucaccucgugaagauuccgacacauagacacaucgugggaaaacccugcccuaagccccaucggcugaaccacaugggcauuuguucuugcggccuguauaagcagccugggguccccgugaaauggaagcgcugaggacuaguuauaagacugacuagcccgaugggccucccaacgggcccuccuccccuccuugcaccgagauuaaucaaaggcucuuuucagagccaccaaaaaaaaaaaaaaaaaaaaaaaaaaaaaaaaaaaaaaaaaaaaaaaaaaaaaaaaaaaaaaaaagaauu

SEQ ID NO: 37954 - RNA, 1658 nt, Artificial Sequence
  mRNA product Design i-3 (hSL-A64-N5) comprising derived and/or modified sequence from LASV(LM776-SLE-2012;Clade IV)__AIT17824__GPCmut10 (opt5)
aggagaaagcuuaccaugggccagaucgugaccuucuuucaagaggucccccacguuauugaagaggugaugaacaucgugcugauugcccucagcauccuggcuguccuuaaggggcuguacaauuucgccacaugcggacucgugggccugguuacguuucuucugcucugugggagauccugcaccacaucuguguauaaaggagucuacgaacugcagacccuggagcucaacauggaaacacugaauauguguaugccucuuagcugcaccaagaacaauucccaucacuauauuauggugggcaacgagacagggcuggagcucacccugacgaauaccucuaucaucaaccauaaauucuguaaucuuagcgacgcgcacaagaaaaaccuguacgaucaugcucucauguccauuaucucuacauuucaccugagcauuccgaauuucaaccaguaugaagccauguccugcgacuuuaauggaggcaagaucagcguucaguacaaccugucucacuccuaugccggcgaugcugccaaucauugugggaccguggcuaacggaguccuccaaacauucaugcggauggccuggggcgggagcuacauugcgcuggacucuggacacggcaagugggauugcaucaugaccuccuaccaguaucuuauuauccagaacacgacaugggaggaccauugucaguuuagccgccccucuccuaucggguaccugggacuccugucccaaagaacccgggauauuuauaucagccgcagacuucugggcacauucaccuggacccucuccgacucugaaggcaaagauacacccgggggauacugccugacgcgguggaugcugauugaggccgagcucaaguguuuuggcaauaccgcuguggccaaaugcaacgaaaagcacgacgaggaguucugcgauaugcugcgccuuuuugacuucuguaaacaggcuauccagagacugaaggccgaagcgcagaugagcauucaacucaucaauaaggccgugaacgcucugaucaaugaucagcuuauuaugaaaaaccaucugcgggacaucauggggauuccuuauugcaauuacuccaaguauugguaccucaaccacacaaccacaggaaaaaccagccugcccaaguguuggcuggucucuaauggcuccuaccucaacgaaacgcacuucagcgacgauaucgagcagcaagccgacaauaugauuacagagaugcugcagaaagaauauauggagcgccaggggaagaccccucuuggacugguugaucucuuuguguucucuaccagcuuuuaccugaucuccaucuuccugcaucuugugaaaauuccgacacacagacauaucgucggcaagucuugccccaagccucaccggcucaaccacaugggcauuuguagcugcgggcuguauaaacagcccggagugccuguucgcuggaagagaugaggacuaguuauaagacugacuagcccgaugggccucccaacgggcccuccuccccuccuugcaccgagauuaaucaaaggcucuuuucagagccaccaaaaaaaaaaaaaaaaaaaaaaaaaaaaaaaaaaaaaaaaaaaaaaaaaaaaaaaaaaaaaaaaagaauu

SEQ ID NO: 37955 - RNA, 1658 nt, Artificial Sequence
  mRNA product Design i-3 (hSL-A64-N5) comprising derived and/or modified sequence from LASV(Mad39;Clade IV)__ANH09722__GPCmut10 (opt5)
aggagaaagcuuaccaugggccagaucgugaccuucuuucaagaggucccccacguuauugaagaggugaugaacaucgugcugauugcccucagcauccuggcuguccuuaaggggcuguacaauguggccacaugcggacucauuggccugguuacguuccuucugcucugugggagauccugcaccacaacccuguauaaaggaguguacgaacugcaggcgcucgagcugaacauggaaacacuuaauauguguaugccucugucuugcaccaagaacaauagccaucacuauauccgggucggcaacgagacagggcucgagcugacccuuacgaauaccucccugaucaaccauaaauuuuguaaucucucugacgcucacaagaaaaaccuguacgaucaugcccugaugagcauuaucuccacauuccaccucucuauuccgaauuuuaaccaguaugaagccaugagcugcgacuucaaugauggaaagaucuccgugcaguacaaccugagccacaccuaugcuggcgacacagccaaucauuguggcaccguugcuaacggggugcuucaaacguuuaugcgcauggccuggggaggcucuuacauugcgcuggauuccgggagaggaggcugggacugcaucaugacaagcuaccaguaucucauuauccagaacaccacaugggaggaucacugucaguucucucggcccuccccuaucggguaccugggacuucugagccaacgcaccagagacauuuauaucucucggcgccuccugggcaccuuuacauggacgcuguccgauagcgaaggcaaggacacccccgggggauacugccucacaagauggaugcugauugaggccgagcuuaaauguuucggcaauaccgcugucgccaagugcaacgaaaaacaugaugaggaauuuugcgacaugcugcgccucuucgauuuuuguaagcaggcuauccagcggcugaaagccgaggcgcagauguccauucaacuuaucaauaaggccgugaacgcucugaucaaugaccagcucauuaugaagaaccaccugagagacaucauggggauuccuuauugcaauuacucuaaauauugguaccugaaccacacagugaccggaaagacgagccuccccaaauguuggcuggucuccaauggcagcuaccuuaacgaaacacauuucucugaugacaucgagcagcaagccgauaauaugauuaccgagaugcugcagaaggaauauauggagcggcaggggaaaaccccucucggacugguugaccuguucguguuuuccaccagcuucuaccuuaucucuaucuuucuccaccuggugaagauuccgacacaucgccacgucgugggcaaacccugcccuaagccccauagacugaaccacaugggcaucuguagcugcggguucuauaagcagccuggaguucccgugcgguggaaacgcugaggacuaguuauaagacugacuagcccgaugggccucccaacgggcccuccuccccuccuugcaccgagauuaaucaaaggcucuuuucagagccaccaaaaaaaaaaaaaaaaaaaaaaaaaaaaaaaaaaaaaaaaaaaaaaaaaaaaaaaaaaaaaaaaagaauu

SEQ ID NO: 37956 - RNA, 1658 nt, Artificial Sequence
  mRNA product Design i-3 (hSL-A64-N5) comprising derived and/or modified sequence from LASV(Z0947-SLE-2011;Clade IV)__AIT17840__GPCmut10 (opt5)
aggagaaagcuuaccaugggccagaucgugaccuucuuucaagaggucccccacguuauugaagaggugaugaacaucgugcugauugcccucagcauccuggcuguccuuaaggggcuguacaauuucgccacaugcggacucgugggccugguuacguuucuucugcucugugggagauccugcaccauuucucuguauaaaggaguguacgaacugcagacacucgagcugaacauggaaacccuuaauauguguaugccucugagcugcacaaagaacaauucccaucacuauaucauggucggcaacgagaccgggcucgagcugacacuuaccaauacgucuaucauuaaccauaaauucuguaaucugagcgacgcgcacaagaaaaaccucuacgaucaugcucugauguccaucauuucuaccuuucaccugagcaucccgaauuucaaccaguaugaagccauguccugcgacuuuaauggaggcaagauuagcgugcaguacaaccucucucacuccuaugccggcgaugcugccaaucauugugggacaguugcuaacggagugcugcaaaccuucaugcggauggccuggggcgggagcuacaucgcgcuugacucuggacgcgauagaugggacugcauuaugacauccuaccaguaucugaucauccagaacaccacgugggaggaucacugucaguuuagccggcccucuccuauuggcuaccucgggcugcuuucccaacgcacaagagacaucuauauuagccggcgccugcucggaaccuucacauggacccuguccgauucugaaggcaaggacacccccggcggguacugccugacaagauggaugcucaucgaggccgagcugaaauguuuuggaaauacggcugucgccaagugcaacgaaaaacaugaugaggaguucugcgacaugcuucggcuguuugauuucuguaagcaggcuauucagcgccucaaagccgaagcgcagaugagcauccaacugaucaauaaggccgugaacgcucuuauuaaugaccagcugaucaugaagaaccaccucagagacauuaugggcaucccuuauugcaauuacuccaaauauugguaccugaaccacaccacaaccgggaagacaagccugcccaaauguuggcucgugucuaauggauccuaccugaacgaaacccauuucagcgaugacauugagcagcaagccgauaauaugaucacggagaugcuucagaaggaauauauggagcggcagggcaaaacaccucuggggcucgucgaccuguuuguuuucucuaccagcuuuuaccugaucuccauuuuccuucaccucgugaagaucccgacccaucgccacauugugggaaaacccugcccuaagccccauagacugaaccacaugggcaucuguucuugcggccuguauaagcagccugggguccccgugaaauggaagcggugaggacuaguuauaagacugacuagcccgaugggccucccaacgggcccuccuccccuccuugcaccgagauuaaucaaaggcucuuuucagagccaccaaaaaaaaaaaaaaaaaaaaaaaaaaaaaaaaaaaaaaaaaaaaaaaaaaaaaaaaaaaaaaaaagaauu

SEQ ID NO: 37957 - RNA, 1689 nt, Artificial Sequence
  mRNA product Design i-3 (hSL-A100) comprising derived and/or modified sequence from LASV(Josiah;Clade IV)__NP_694870__GPCmut10 (opt1)
aggagaaagcuuaccaugggccagaucgugaccuucuuccaggaggucccccacgugaucgaggaggugaugaacaucguccugaucgcccucagcgugcuggccgugcugaaggggcucuacaacuucgcgaccugcggccuggucgggcuggugacguuccuccugcugugcggccgcuccugcaccaccagccucuacaaggggguguacgagcugcagacccuggagcucaacauggagacgcugaacaugugcaugccgcuguccugcaccaagaacaacagccaccacuacaucauggucggcaacgagaccggccucgagcugacgcugaccaacaccuccaucaucaaccacaaguucugcaaccucagcgacgcccacaagaagaaccuguacgaccacgcccugauguccaucaucagcaccuuccaccucuccauccccaacuucaaccaguacgaggccaugagcugcgacuucaacgggggcaagaucuccgugcaguacaaccugagccacuccuacgccggggacgcggccaaccacugcggcacgguggccaacgggguccugcagaccuucaugcggauggccuggggcggcagcuacaucgcgcucgacuccgggcgcggcaacugggacugcaucaugaccagcuaccaguaccugaucauccagaacaccacgugggaggaccacugccaguucucccggcccagccccaucggguaccugggccuccugucccagcgcacccgggacaucuacaucagccgccggcugcucggcaccuucaccuggacgcugagcgacuccgaggggaaggacaccccgggcggguacugccugacccgcuggaugcucaucgaggccgagcugaagugcuucggcaacaccgccguggccaagugcaacgagaagcacgacgaggaguucugcgacaugcugcggcuguucgacuucugcaagcaggccauccagcgccugaaggcggaggcccagaugagcauccagcugaucaacaaggccgugaacgcccucaucaacgaccagcugaucaugaagaaccaccuccgggacaucauggggauccccuacugcaacuacuccaaguacugguaccucaaccacacgaccaccggccgcaccagccugcccaagugcuggcuggucuccaacggcagcuaccucaacgagacgcacuucuccgacgacaucgagcagcaggccgacaacaugaucaccgagaugcugcagaaggaguacauggagcggcaggggaagacgccccugggccucguggaccuguucguguucagcaccuccuucuaccugaucagcaucuuccugcaccucgucaagaucccgacccaccgccacaucguggggaaguccugccccaagccccaccggcugaaccacaugggcaucugcagcugcgggcuguacaagcagcccggcgugccggucaaguggaagcgcugaggacuaguuauaagacugacuagcccgaugggccucccaacgggcccuccuccccuccuugcaccgagauuaaucaaaggcucuuuucagagccaccaaaaaaaaaaaaaaaaaaaaaaaaaaaaaaaaaaaaaaaaaaaaaaaaaaaaaaaaaaaaaaaaaaaaaaaaaaaaaaaaaaaaaaaaaaaaaaaaaaaaa

SEQ ID NO: 37958 - RNA, 1686 nt, Artificial Sequence
  mRNA product Design i-3 (hSL-A100) comprising derived and/or modified sequence from LASV(LP;Clade I)__AAF86701__GPCmut10 (opt1)
aggagaaagcuuaccaugggccagaucaucaccuucuuccaggaggugccccacgucaucgaggaggugaugaacaucgugcugaucgcccucagccugcuggccauccucaaggggcuguacaacaucgcgaccugcggcaucaucgggcuggucgccuuccucuuccugugcggcaaguccugcagccugacgcucaagggcggguacgagcugcagacccuggagcucaacauggagacccugaacaugugcaugccgcuguccugcacgaagaacagcucccaccacuacauccgcgugggcaacgagaccgggcucgagcugacccugaccaacacgagcaucaucaaccacaaguucugcaaccucuccgacgcccacaagaagaaccuguacgaccacgcccugaugagcaucaucuccaccuuccaccucagcauccccaacuucaaccaguacgaggccauguccugcgacuucaacggcgggaagaucagcgugcaguacaaccugucccacagcuacgcgggcgacgccgccgagcacugcgggaccgucgccaacggcgugcugcagaccuucaugcggauggcguggggcgggcgcuacaucgcccucgacuccggcaaggggaacugggacugcaucaugacgagcuaccaguaccugaucauccagaacaccaccugggaggaccacugccaguucucccggcccagccccaucggcuaccugggccuccugucccagcgcacccgggacaucuacaucagccgccggcugcucgggacguucaccuggacccugagcgacuccgagggcaacgagacccccgggggcuacugccugacgcgcuggaugcucaucgaggccgagcugaagugcuucgggaacaccgccguggccaagugcaacgagaagcacgacgaggaguucugcgacaugcugcggcuguucgacuucugcaagcaggcgauccgccggcugaaggccgaggcccagaugagcauccagcugaucaacaaggccgucaacgcccucaucaacgaccagcugaucaugaagaaccaccuccgcgacaucaugggcauccccuacugcaacuacuccaaguacugguaccucaaccacaccagcuccggccggaccagccugcccaagugcuggcugaucuccaacgggagcuaccucaacgagacgcaguucuccgacgacaucgagcagcaggcggacaacaugaucaccgagaugcugcagaaggaguacaucgagcgccagggcaagaccccgcuggggcucguggacaucuucaucuucagcaccuccuucuaccugaucagcaucuuccugcaccugaucaagaucccgacgcaccggcacaucgugggcaagcccugccccaagccccaccgccucaaccacaugggggucugcuccugcggccuguacaagcacccgggcgugcccaccaaguggaagcggugaggacuaguuauaagacugacuagcccgaugggccucccaacgggcccuccuccccuccuugcaccgagauuaaucaaaggcucuuuucagagccaccaaaaaaaaaaaaaaaaaaaaaaaaaaaaaaaaaaaaaaaaaaaaaaaaaaaaaaaaaaaaaaaaaaaaaaaaaaaaaaaaaaaaaaaaaaaaaaaaaaaaa

SEQ ID NO: 37959 - RNA, 1686 nt, Artificial Sequence
  mRNA product Design i-3 (hSL-A100) comprising derived and/or modified sequence from LASV(803213;Clade II)__AAF86703__GPCmut10 (opt1)
aggagaaagcuuaccaugggccagaucaucaccuucuuccaggaggugccccacgucaucgaggaggugaugaacaucgugcugaucgcccucagccugcuggccauccucaaggggaucuacaacgucgcgaccugcggccuguucgggcugaucuccuuccuccugcugugcggccgcagcugcuccgugacguacaaggggguguacgagcuccagacccuggagcugaacauggccaaccucaacaugugcaugccgcugagcugcaccaagaacaacucccaccacuacaucauggucggcaacgagacgggccuggagcucacccugaccaacaccagcaucaucaaccacaaguucugcaaccuguccgacgcccacaagaagaaccucuacgaccacgcccugaugagcaucaucuccacguuccaccugagcauccccaacuucaaccaguacgaggccauguccugcgacuucaacgggggcaagaucagcgugcaguacaaccucucccacagcuucgcgguggacgccgccaaccacugcgggaccaucgccaacggcguccugcagaccuucaugcggauggcguggggcggguccuacaucgcccuggacagcggcaaggggaacugggacugcaucaugaccuccuaccaguaccucaucauccagaacacgaccugggaggaccacugccaguucagccgccccucccccaucggcuaccuggggcugcucagccagcggacccgcgacaucuacaucagccggcgccugcugggcaccuucacguggacccucuccgacagcgagggcaacgaggcccccgggggcuacugccugacccgguggaugcugaucgaggccgagcucaagugcuucgggaacaccgccguggcgaagugcaacgagaagcacgacgaggaguucugcgacaugcugcgccuguucgacuucugcaagcaggccaucaagcggcucaagacggaggcccagauguccauccagcugaucaacaaggccgugaacgcccugaucaacgaccagcucaucaugaagaaccaccuccgcgacaucaugggcauccccuacugcaacuacagccgguacugguaccugaaccacaccgucaccgggaagaccucccugccccgcugcuggcuggugagcaacggcuccuaccugaacgagacgcacuucagcgacgacaucgagcagcaggcggacaacaugaucaccgagaugcuccagaaggaguacauggaccggcagggcaagaccccgcuggggcugguggaccucuucgucuucuccaccagcuucuaccugaucuccaucuuccugcaccuggugaagaucccgacgcaccgccacaucgugggcaagcccugccccaagccccaccggcucaaccacauggggaucugcagcugcggccuguacaagcacccggggguccccgugaaguggaagcgcugaggacuaguuauaagacugacuagcccgaugggccucccaacgggcccuccuccccuccuugcaccgagauuaaucaaaggcucuuuucagagccaccaaaaaaaaaaaaaaaaaaaaaaaaaaaaaaaaaaaaaaaaaaaaaaaaaaaaaaaaaaaaaaaaaaaaaaaaaaaaaaaaaaaaaaaaaaaaaaaaaaaaa

SEQ ID NO: 37960 - RNA, 1686 nt, Artificial Sequence
  mRNA product Design i-3 (hSL-A100) comprising derived and/or modified sequence from LASV(GA391;Clade III)__CAA36645__GPCmut10 (opt1)
aggagaaagcuuaccaugggccagaucgugaccuucuuccaggaggucccccacgugaucgaggaggugaugaacaucguccugaucgcccucagcauccuggccauccugaaggggcucuacaacguggcgaccugcggccugaucgggcuggugacguuccuccugcuguccggccgcagcugcucccucaucuacaaggggaccuacgagcugcagacccuggagcucaacauggagacccugaacaugugcaugccgcugagcugcaccaagaacaacucccaccacuacauccgggucggcaacgagaccggccucgagcugacccugacgaacaccagcauccucaaccacaaguucugcaaccuguccgacgcccacaagcgcaaccuguacgaccacagccucauguccaucaucagcaccuuccaccuguccauccccaacuucaaccaguacgaggccaugagcugcgacuucaacgggggcaagaucaccgugcaguacaaccugucccacagcuucgccguggacgccgcggggcacugcggcacgcucgccaacgggguccugcagaccuucaugcggauggccuggggcggcuccuacaucgcccuggacagcgggcgcggcaacugggacugcaucaugaccuccuaccaguaccucaucauccagaacaccacgugggacgaccacugccaguucagccggcccucccccaucggguaccugggccugcucagccagcgcacccgggacaucuacaucagccgccggcugcugggcaccuucaccuggacgcucuccgacagcgaggggaacgagaccccgggcggguacugccugacccgcuggaugcugaucgaggcggagcucaagugcuucggcaacaccgccguggccaagugcaacgagaagcacgacgaggaguucugcgacaugcugcggcuguucgacuucugcaagcaggccauccgccggcucaagacggaggcccagauguccauccagcugaucaacaaggcggugaacgcccugaucaacgaccagcucaucaugaagaaccaccuccgcgacaucauggggauccccuacugcaacuacagccgguacugguaccugaaccacaccuccaccggcaagaccagccugccccgcugcuggcugaucuccaacggcagcuaccugaacgagacgaaguucuccgacgacaucgagcagcaggccgacaacaugaucaccgagaugcuccagaaggaguacaucgaccggcaggggaagacgccccugggccuggucgaccuguucguguucagcaccuccuucuaccucaucagcaucuuccugcaccuggugaagaucccgacccaccgccacaucgucgggaagcccugccccaagccccaccggcucaaccacaugggcaucugcuccugcgggcuguacaagcagccgggcgugcccgugcgcuggaagcggugaggacuaguuauaagacugacuagcccgaugggccucccaacgggcccuccuccccuccuugcaccgagauuaaucaaaggcucuuuucagagccaccaaaaaaaaaaaaaaaaaaaaaaaaaaaaaaaaaaaaaaaaaaaaaaaaaaaaaaaaaaaaaaaaaaaaaaaaaaaaaaaaaaaaaaaaaaaaaaaaaaaaa

SEQ ID NO: 37961 - RNA, 1689 nt, Artificial Sequence
  mRNA product Design i-3 (hSL-A100) comprising derived and/or modified sequence from LASV(AV;Clade V)__CCA30314__GPCmut10 (opt1)
aggagaaagcuuaccaugggccagaucgugaccuucuuccaggaggucccccacgugaucgaggaggugaugaacaucguccugaucgcccucagcauccuggccgugcugaaggggcucuacaacaucgcgaccugcggccugaucgggcugaucacguuccuccugcugugcggccgcuccugcagcuccaaccucuacaaggggguguacgagcugcagagccuggaccucaacauggagacccugaacaugugcaugccgcuguccugcaccaagaacaacagccaccacuacauccgggucggcaacgacacgggccucgagcugacccugaccaacaccuccauccucaaccacaaguucugcaaccugagcgacgcccacaagaaggaccuguacgaccacgcccucauguccaucaucagcacguuccaccuguccauccccaacuucaaccaguacgaggccaugagcugcgacuucaacgggggcaagaucuccgugcaguacaaccugagccacuccuacgccaucgacgcggccaaccacugcgggaccguggccaacggcauccuccagaccuucaugcgcauggccuggggcgggagcuacaucgcgcuggacuccggccgggggaacugggacugcaucaugaccagcuaccaguaccugaucauccagaacacgaccugggagaaccacugccaguucucccgccccagccccaucggcuaccucgggcugcugagccagcggacccgcgacaucuacaucucccggcgccuccugggcaccuucacguggacccugagcgacuccgagggcaacgccacccccgggggcuacugccucacccgguggaugcugaucgaggccgagcugaagugcuucgggaacacggccgucgccaagugcaacgagaagcacgacgaggaguucugcgacaugcuccgccuguucgacuucugcaagcaggcgaucagccggcugaaguccgaggcccagaugagcauccagcucaucaacaaggccgugaacgcccugaucaacgaccagcugaucaugaagaaccaccuccgcgacaucaugggcauccccuacugcaacuacuccaaguacugguaccugaaccacaccaucaccgggaagaccagccugcccaagugcuggcucguguccaacggcagcuaccugaacgagacgcacuucuccgacgacaucgagcagcaggccgacaacaugaucaccgagaugcugcagaaggaguacauggagcggcagggcaagaccccgcucgggcuggucgaccuguucguguucagcaccuccuucuaccugaucagcaucuuccuccgccuggugaagaucccgacgcaccggcacaucgucggcaagcccugccccaagccccaccgccugaaccacauggggaucugcuccugcggccucuacaagcagccgggggugcccgugcgguggaagcgcugaggacuaguuauaagacugacuagcccgaugggccucccaacgggcccuccuccccuccuugcaccgagauuaaucaaaggcucuuuucagagccaccaaaaaaaaaaaaaaaaaaaaaaaaaaaaaaaaaaaaaaaaaaaaaaaaaaaaaaaaaaaaaaaaaaaaaaaaaaaaaaaaaaaaaaaaaaaaaaaaaaaaa

SEQ ID NO: 37962 - RNA, 1686 nt, Artificial Sequence
  mRNA product Design i-3 (hSL-A100) comprising derived and/or modified sequence from LASV(Togo/2016/7082;Clade VI)__AMR44577__GPCmut10 (opt1)
aggagaaagcuuaccaugggccagaucaucaccuucuuccaggaggugccccacgucaucgaggaggugaugaacaucgugcugaucgcccucagccugcuggccauccucaagggggucuacaacguggcgaccugcggcaucaucgggcuggugacguuccuguuccucugcggccgcuccugcagccugaucuacaagggguccuacgagcugcagacccucgagcugaacauggagacccugaacaugugcaugccgcucagcugcacgaagaacuccagccaccacuacauccgggucggcaacgagaccggccuggagcugacccucaccaacacguccaucaucaaccacaaguucugcaaccugagcgacgcccacaagcgcaaccuguacgaccacgcccucauguccauccugagcaccuuccaccuguccauccccaacuucaaccaguacgaggccaugagcugcgacuucaacgggggcaagaucuccgugcaguacaaccucagccacgccuacgcgguggacgccgccgagcacugcgggaccgucgccaacggcgugcugcagaccuucaugcggauggcguggggcggguccuacaucgcccuggacagcggccgcgggaacugggacugcaucaugacguccuaccaguaccucaucauccagaacaccaccugggaggaccacugccaguucagccggcccucccccaucggcuaccuggggcugcucagccagcgcacccgggacaucuacaucagccgccggcugcugggcacguucaccuggacccucuccgacagcgagggcaacgagacccccgggggcuacugccugacgcgcuggaugcugaucgaggccgagcucaagugcuucgggaacaccgccguggccaagugcaacgagaagcacgacgaggaguucugcgacaugcugcggcuguucgacuucugcaagcaggcgauccagcgccucaaguccgaggcccagaugagcauccagcugaucaacaaggccgucaacgcccugaucaacgaccagcucaucaugaagaaccaccuccgggacaugaugggcauccccuacugcaacuacuccaaguacugguaccugaaccacaccagcuccgggcgcaccagccugcccaagugcuggcugguguccaacggcagcuaccugaacgagacgcacuucuccgacgacaucgagcagcaggccgacaacaugaucaccgagaugcuccagaaggaguacaucgaccggcagggcaagaccccgcuggggcugguggaccucuucgucuucagcaccuccuucuaccugaucagcaucuuccugcaccugaucaagaucccgacgcaccgccacaucgugggcaagcccugccccaagccccaccggcucaaccacauggggaucugcuccugcggccuguacaagcagccgggggugcccacccgcuggaagcggugaggacuaguuauaagacugacuagcccgaugggccucccaacgggcccuccuccccuccuugcaccgagauuaaucaaaggcucuuuucagagccaccaaaaaaaaaaaaaaaaaaaaaaaaaaaaaaaaaaaaaaaaaaaaaaaaaaaaaaaaaaaaaaaaaaaaaaaaaaaaaaaaaaaaaaaaaaaaaaaaaaaaa

SEQ ID NO: 37963 - RNA, 1686 nt, Artificial Sequence
  mRNA product Design i-3 (hSL-A100) comprising derived and/or modified sequence from LASV(KAK-428;Clade n.d. (VII))__ANH09740__GPCmut10 (opt1)
aggagaaagcuuaccaugggccagaucgugaccuucuuccaggaggucccccacgugaucgaggaggugaugaacaucguccugaucgcccucagccugcuggccauccucaaggggcuguacaacuucgcgaccugcggcgugaucgggcugaucacguuccuccugcugugcggccgcuccugcagcgccaccuacaaggggcaguacgagcuccagacccuggagcugaacauggagucccucaacaugugcaugccgcugagcugcacgaagaacaacucccaccacuacauccgggccggcaacaacaccggccuggagcucacccugaccaacacgagcaucaucucccacaaguucugcaaccugagcgacgcccacaagaagaaccucuacgaccacacccugauguccaucaucaccaccuuccaccugagcauccccaacuucaaccaguacgaggccauguccugcgacuucaacgggggcaagaucagcauccaguacaaccucucccacagcuacgcgggggacgccgcccagcacugcggcacgguggccaacgggguccugcagaccuucaugcgcauggcguggggcggcuccuaccuggcccucgacagcgggcggcgcggcugggacugcaucaucuccagcuaccaguaccugaucauccagaacaccaccugggacgaccacugccaguucucccggcccagccccaucggguaccugggcuucgugagccagaagacgcgcgacaucuacaucucccggcgccuccugggcaccuucaccuggacccugagcgacuccgaggggcacgacaugccgggcggguacugccucacgcgguggaugcugaucgaggccgaccugaagugcuucggcaacaccgccguggccaagugcaacgagaagcacgacgaggaguucugcgacauguggcgccucuucgacuucugcaagcaggcgauccagcggcugaaggccgaggcccagaugaacauccagcugaucaacaaggccgucaacgcccucaucaacgaccagcugaugaugaagaaccaccuccgcgacaucauggggauccccuacugcaacuacagcaaguucugguaccugaacaacaccaccacgggccggaccucccugccccgcugcuggcugaucagcaacggcuccuaccucaacgagacccacuucagcgacgacaucgagcagcaggcggacaacaugaucaccgagaugcugcagaaggaguacauggaccggcaggggaagacgccccugggccucguggaccuguucguguucuccaccagcuucuaccugaucaccaucuuccuccaccuggucaagaucccgacccaccgccacaucguggggaagcccugccccaagccccaccggcugaaccacaugggcaucugcuccugcgggcuguacaagcagccgggcgugcccguccgcuggaagcggugaggacuaguuauaagacugacuagcccgaugggccucccaacgggcccuccuccccuccuugcaccgagauuaaucaaaggcucuuuucagagccaccaaaaaaaaaaaaaaaaaaaaaaaaaaaaaaaaaaaaaaaaaaaaaaaaaaaaaaaaaaaaaaaaaaaaaaaaaaaaaaaaaaaaaaaaaaaaaaaaaaaaa

SEQ ID NO: 37964 - RNA, 1686 nt, Artificial Sequence; identical to SEQ ID NO: 37958
  mRNA product Design i-3 (hSL-A100) comprising derived and/or modified sequence from LASV(Pinneo-NIG-1969;Clade I)__AIT17836__GPCmut10 (opt1)

SEQ ID NO: 37965 - RNA, 1686 nt, Artificial Sequence
  mRNA product Design i-3 (hSL-A100) comprising derived and/or modified sequence from LASV(ISTH0009-NIG-2011;Clade II)__AIT17404__GPCmut10 (opt1)
aggagaaagcuuaccaugggccagaucaucaccuucuuccaggaggugccccacgucaucgaggaggugaugaacaucgugcugaucgcccucagccugcuggccauccucaaggggaucuacaacgucgcgaccugcggccuguucgggcugguguccuuccuccugcugugcggccgcagcugcuccacgaccuacaaggggguguacgagcuccagacccuggagcuggacauggccagccucaacaugugcaugccgcuguccugcacgaagaacaacagccaccacuacaucauggucggcaacgagaccggccuggagcucacccugaccaacacguccaucaucaaccacaaguucugcaaccugagcgacgcccacaagaagaaccucuacgaccacgcccugauguccaucaucagcaccuuccaccuguccauccccaacuucaaccaguacgaggccaugagcugcgacuucaacgggggcaagaucuccgugcaguacaaccucagccacgcguacgccguggacgccgccaaccacugcgggaccaucgcgaacggcguccugcagaccuucaugcggauggccuggggcggguccuacaucgcccuggacagcggcaagggguccugggacugcaucaugacgagcuaccaguaccucaucauccagaacaccaccugggaggaccacugccaguucucccgccccagccccaucggcuaccuggggcugcucagccagcggacccgcgacaucuacaucucccggcgccugcugggcacguucaccuggacccucagcgacuccgagggcaacgagacccccgggggcuacugccugacgcgguggaugcugaucgaggccgagcucaagugcuucgggaacaccgccguggcgaagugcaacgagaagcacgacgaggaguucugcgacaugcugcgccuguucgacuucugcaagcaggccauccggcgccucaagaccgaggcccagaugagcauccagcugaucaacaaggccgugaacgcccugaucaacgaccagcucaucaugaagaaccaccuccgggacaucaugggcaucccguacugcaacuacuccaaguacugguaccugaaccacaccgucacggggaagaccagccugccccgcugcuggcugguguccaacggcagcuaccugaacgagacccacuucuccgacgacaucgagcagcaggcggacaacaugaucaccgagcuccugcagaaggaguacauggaccggcagggcaagacgccccuggggcucguggaccuguucgucuucagcaccuccuucuaccugaucagcaucuuccugcaccucaucaagaucccgacccaccgccacaucaccggcaagcccugccccaagccccaccggcugaaccacauggggaucugcuccugcggccuguacaagcacccgggggugcccgugaaguggaagcgcugaggacuaguuauaagacugacuagcccgaugggccucccaacgggcccuccuccccuccuugcaccgagauuaaucaaaggcucuuuucagagccaccaaaaaaaaaaaaaaaaaaaaaaaaaaaaaaaaaaaaaaaaaaaaaaaaaaaaaaaaaaaaaaaaaaaaaaaaaaaaaaaaaaaaaaaaaaaaaaaaaaaaa

SEQ ID NO: 37966 - RNA, 1686 nt, Artificial Sequence
  mRNA product Design i-3 (hSL-A100) comprising derived and/or modified sequence from LASV(ISTH2010-NIG-2012;Clade II)__AIT17482__GPCmut10 (opt1)
aggagaaagcuuaccaugggccagaucaucaccuucuuccaggaggugccccacgucaucgaggaggugaugaacaucgugcugaucgcccucagccugcuggccauccucaaggggaucuacaacgucgcgaccugcggccuguucgggcugguguccuuccuccugcugugcggccgcagcugcuccacgaccuacaaggggguguacgagcuccagacccuggagcuggacauggccagccucaacaugugcaugccgcuguccugcacgaagaacaacagccaccacuacaucauggucggcaacgagaccggccuggagcucacccugaccaacacguccaucaucaaccacaaguucugcaaccugagcgacgcccacaagaagaaccucuacgaccacgcccugauguccaucaucagcaccuuccaccuguccauccccaacuucaaccaguacgaggccaugagcugcgacuucaacgggggcaagaucuccgugcaguacaaccucagccacgcguacgccguggacgccgccaaccacugcgggaccaucgcgaacggcguccugcagaccuucaugcggauggccuggggcggguccuacaucgcccuggacagcggcaagggguccugggacugcaucaugacgagcuaccaguaccucaucauccagaacaucaccugggaggaccacugccaguucucccgccccagccccaucggcuaccuggggcugcucagccagcggacccgcgacaucuacaucucccggcgccugcugggcaccuucacguggacccucagcgacuccgagggcaacgagacccccgggggcuacugccugacccgguggaugcugaucgaggccgagcucaagugcuucgggaacacggccguggcgaagugcaacgagaagcacgacgaggaguucugcgacaugcugcgccuguucgacuucugcaagcaggccauccggcgccucaagaccgaggcccagaugagcauccagcugaucaacaaggccgugaacgcccugaucaacgaccagcucaucaugaagaaccaccuccgggacaucaugggcauccccuacugcaacuacuccaaguacugguaccugaaccacaccgucaccgggaagacgagccugccccgcugcuggcugguguccaacggcagcuaccugaacgagacccacuucuccgacgacaucgagcagcaggcggacaacaugaucaccgagcuccugcagaaggaguacaucgaccggcagggcaagaccccgcuggggcucguggaccuguucgucuucagcacguccuucuaccugaucagcaucuuccugcaccucgugaagaucccgacccaccgccacguggucggcaagcccugccccaagccccaccggcugaaccacauggggaucugcuccugcggccuguacaagcacccgggggugcccgugaaguggaagcgcugaggacuaguuauaagacugacuagcccgaugggccucccaacgggcccuccuccccuccuugcaccgagauuaaucaaaggcucuuuucagagccaccaaaaaaaaaaaaaaaaaaaaaaaaaaaaaaaaaaaaaaaaaaaaaaaaaaaaaaaaaaaaaaaaaaaaaaaaaaaaaaaaaaaaaaaaaaaaaaaaaaaaa

SEQ ID NO: 37967 - RNA, 1686 nt, Artificial Sequence
  mRNA product Design i-3 (hSL-A100) comprising derived and/or modified sequence from LASV(Lassa virus/H.sapiens-wt/NGA/2015/ISTH_0543;Clade II)__AVO03639__GPCmut10 (opt1)
aggagaaagcuuaccaugggccagaucaucaccuucuuccaggaggugccccacgucaucgaggaggugaugaacaucgugcugaucgcccucagccugcuggccauccucaaggggaucuacaacgucgcgaccugcggccuguucgggcugguguccuuccuccugcugugcggccgcagcugcuccacgaccuacaaggggguguacgagcuccagacccuggagcuggacauggccaaccucaacaugugcaugccgcugagcugcacgaagaacaacucccaccacuacaucauggucggcaacgagaccggccuggagcucacccugaccaacacgagcaucaucaaccacaaguucugcaaccuguccgacgcccacaagaagaaccucuacgaccacgcccugaugagcaucaucuccaccuuccaccugagcauccccaacuucaaccaguacgaggccauguccugcgacuucaacgggggcaagaucagcgugcaguacaaccucucccacaccuacgcgguggacgccgccaaccacugcgggaccaucgccaacggcguccugcagacguucaugcggauggcguggggcgggagcuacaucgcccuggacuccggcaaggggagcugggacugcaucaugaccuccuaccaguaccucgugauccagaacaccaccugggaggaccacugccaguucagccgccccucccccaucggcuaccuggggcugcucagccagcggacgcgcgacaucuacaucagccggcgccugcugggcaccuucaccuggacccucuccgacagcgagggcaacgagacgcccgggggcuacugccugacccgguggaugcugaucgaggccgagcucaagugcuucgggaacaccgccguggccaagugcaacgagaagcacgacgaggaguucugcgacaugcugcgccuguucgacuucugcaagcaggcgauccggcgccucaagaccgaggcccagauguccauccagcugaucaacaaggccgucaacgcccugaucaacgaccagcucaucaugaagaaccaccuccgggacaucaugggcauccccuacugcaacuacagcaaguacugguaccugaaccacacggugaccgggaagaccucccugccccgcugcuggcuggugagcaacggcuccuaccugaacgagacccacuucagcgacgacaucgagcagcaggccgacaacaugaucacggagcuccugcagaaggaguacaucgaccggcagggcaagaccccgcuggggcucgucgaccuguucguguucuccaccagcuucuaccugaucuccaucuuccugcaccucgugaagaucccgacccaccgccacaucacgggcaagcccugccccaagccccaccggcugaaccacauggggaucugcagcugcggccuguacaagcacccggggguccccgugaaguggaagcgcugaggacuaguuauaagacugacuagcccgaugggccucccaacgggcccuccuccccuccuugcaccgagauuaaucaaaggcucuuuucagagccaccaaaaaaaaaaaaaaaaaaaaaaaaaaaaaaaaaaaaaaaaaaaaaaaaaaaaaaaaaaaaaaaaaaaaaaaaaaaaaaaaaaaaaaaaaaaaaaaaaaaaa

SEQ ID NO: 37968 - RNA, 1686 nt, Artificial Sequence
  mRNA product Design i-3 (hSL-A100) comprising derived and/or modified sequence from LASV(Lassa virus/H.sapiens-wt/NGA/2016/ISTH_0009;Clade II)__AVO03571__GPCmut10 (opt1)
aggagaaagcuuaccaugggccagaucaucaccuucuuccaggaggugccccacgucaucgaggaggugaugaacaucgugcugaucgcccucagccugcuggccauccucaaggggaucuacaacgucgcgaccugcggccugcuggggcucguguccuuccugcugcucugcggccgcagcugcuccacgaccuacaaggggguguacgagcugcagacccuggagcucgacauggccagccugaacaugugcaugccgcuguccugcacgaagaacaacagccaccacuacaucauggucggcaacgagaccggccucgagcugacccugaccaacacguccaucaucaaccacaaguucugcaaccucagcgacgcccacaagaagaaccuguacgaccacgcccugauguccaucaucagcaccuuccaccucuccauccccaacuucaaccaguacgaggccaugagcugcgacuucaacgggggccggaucuccgugcaguacaaccugagccacuccuacgcgguggacgccgccaaccacugcgggaccaucgccaacggcguccugcagaccuucaugcgcauggcguggggcgggagcuacaucgcccucgacuccggcaaggggagcugggacugcaucaugacguccuaccaguaccugaucauccagaacaccaccugggaggaccacugccaguucagccggcccagccccaucggcuaccuggggcuccugucccagcgcacccgggacaucuacaucagccgccggcugcucggcacguucaccuggacccuguccgacagcgagggcaacgagacccccgggggcuacugccugacgcgcuggaugcucaucgaggccgagcugaagugcuucgggaacaccgccguggccaagugcaacgagaagcacgacgaggaguucugcgacaugcugcggcuguucgacuucugcaagcaggcgauccgccggcugaagaccgaggcccagauguccauccagcugaucaacaaggccgugaacgcccucaucaacgaccagcugaucaugaagaaccaccuccgcgacaucaugggcaucccguacugcaacuacagcaaguacugguaccucaaccacaccgucacggggaagaccucccugccccggugcuggcuggugagcaacggcuccuaccucaacgagacccacuucagcgacgacaucgagcagcaggccgacaacaugaucaccgagcugcugcagaaggaguacaucgaccgccagggcaagacgccccucgggcugguggaccuguucgucuucuccaccagcuucuaccugaucuccaucuuccuccaccuggugaagaucccgacccaccggcacaucaccggcaagcccugccccaagccccaccgccugaaccacauggggaucugcagcugcggccucuacaaccacccgggggugcccgucaaguggaagcggugaggacuaguuauaagacugacuagcccgaugggccucccaacgggcccuccuccccuccuugcaccgagauuaaucaaaggcucuuuucagagccaccaaaaaaaaaaaaaaaaaaaaaaaaaaaaaaaaaaaaaaaaaaaaaaaaaaaaaaaaaaaaaaaaaaaaaaaaaaaaaaaaaaaaaaaaaaaaaaaaaaaaa

SEQ ID NO: 37969 - RNA, 1686 nt, Artificial Sequence
  mRNA product Design i-3 (hSL-A100) comprising derived and/or modified sequence from LASV(Lassa virus/H.sapiens-wt/NGA/2016/ISTH_0017;Clade II)__AVO03567__GPCmut10 (opt1)
aggagaaagcuuaccaugggccagaucaucaccuucuuccaggaggugccccacgucaucgaggaggugaugaacaucgugcugaucgcccucagccugcuggccauccucaaggggaucuacaacgucgcgaccugcggccuguucgggcugguguccuuccuccugcugugcggccgcagcugcuccacgaccuacaaggggguguacgagcuccagacccuggagcuggacauggccagccucaacaugugcaugccgcuguccugcacgaagaacaacagccaccacuacaucauggucggcaacgagaccggccuggagcucacccugaccaacacguccaucaucaaccacaaguucugcaaccugagcgacgcccacaagaagaaccucuacgaccacgcccugauguccaucaucagcaccuuccaccuguccauccccaacuucaaccaguacgaggccaugagcugcgacuucaacgggggcaagaucuccgugcaguacaaccucagccacaccuacgcgaucgacgccgccaaccacugcgggaccaucgccaacggcgugcugcagacguucaugcggauggcguggggcggguccuacaucgcccuggacagcggcaagggguccugggacugcaucaugaccagcuaccaguaccucaucauccagaacaccaccugggaggaccacugccaguucucccgccccagccccaucggcuaccuggggcugcucagccagcggacgcgcgacaucuacaucucccggcgccugcugggcaccuucaccuggacccucagcgacuccgagggcaacgagacgcccgggggcuacugccugacccgguggaugcugaucgaggccgagcucaagugcuucgggaacaccgccgucgccaagugcaacgagaagcacgacgaggaguucugcgacaugcugcgccuguucgacuucugcaagcaggcgauccggcgccucaagaccgaggcccagaugagcauccagcugaucaacaaggccgugaacgcccugaucaacgaccagcucaucaugaagaaccaccuccgggacaucaugggcauccccuacugcaacuacuccaaguacugguaccugaaccacacggugaccgggaagaccagccugccccgcugcuggcuggucuccaacggcagcuaccugaacgagacccacuucuccgacgacaucgagcagcaggccgacaacaugaucacggagcuccugcagaaggaguacauggaccggcagggcaagaccccgcuggggcucguggaccuguucguguucagcaccuccuucuaccugaucagcaucuuccugcaccucguccgcaucccgacccaccggcacgugaucggcaagcccugccccaagccccaccgccugaaccacauggggaucugcuccugcggccuguacaagcacccgggggugcccgucaaguggaagcggugaggacuaguuauaagacugacuagcccgaugggccucccaacgggcccuccuccccuccuugcaccgagauuaaucaaaggcucuuuucagagccaccaaaaaaaaaaaaaaaaaaaaaaaaaaaaaaaaaaaaaaaaaaaaaaaaaaaaaaaaaaaaaaaaaaaaaaaaaaaaaaaaaaaaaaaaaaaaaaaaaaaaa

SEQ ID NO: 37970 - RNA, 1686 nt, Artificial Sequence
  mRNA product Design i-3 (hSL-A100) comprising derived and/or modified sequence from LASV(Lassa virus/H.sapiens-wt/NGA/2018/ISTH_0959;Clade II)__AVV65099__GPCmut10 (opt1)
aggagaaagcuuaccaugggccagaucaucaccuucuuccaggaggugccccacgucaucgaggaggugaugaacaucgugcugaucgcccucagccugcuggccauccucaaggggaucuacaacgucgugaccugcggccuguucgggcugguguccuuccuccugcugugcggccgcagcugcuccacgaccuacaagggggucuacgagcuccagacccuggagcuggacauggcgagccucaacaugugcaugccgcuguccugcacgaagaacaacagccaccacuacaucauggugggcaacgagaccggccuggagcucacccugaccaacacguccaucaucaaccacaaguucugcaaccugagcgacgcccacaagaagaaccucuacgaccacgcccugauguccaucaucagcaccuuccaccuguccauccccaacuucaaccaguacgaggccaugagcugcgacuucaacgggggcaagaucuccgugcaguacaaccucagccacgccuacgcgaucgacgccgccaaccacugcgggaccaucgccaacggcguccugcagaccuucaugcggauggcguggggcggguccuacaucgcccuggacagcggcaagggguccugggacugcaucaugacgagcuaccaguaccucaucauccagaacaccaccugggaggaccacugccaguucucccgccccagccccaucggcuaccuggggcugcucagccagcggacccgcgacaucuacaucucccggcgccugcugggcacguucaccuggacccucagcgacuccgagggcaacgagacccccgggggcuacugccugacgcgguggaugcugaucgaggccgagcucaagugcuucgggaacaccgccguggccaagugcaacgagaagcacgacgaggaguucugcgacaugcugcgccuguucgacuucugcaagcaggcgauccggcgccucaagaccgaggcccagaugagcauccagcugaucaacaaggccgugaacgcccugaucaacgaccagcucaucaugaagaaccaccuccgggacaucaugggcaucccguacugcaacuacuccaaguacugguaccugaaccacaccgucacggggaagaccagccugccccgcugcuggcugguguccaacggcagcuaccugaacgagacccacuucuccgacgacaucgagcagcaggccgacaacaugaucaccgagcuccugcagaaggaguacaucgaccggcagggcaagacgccccuggggcucguggaccuguucgucuucagcaccuccuucuaccugaucagcaucuuccugcaccucgugaagaucccgacccaccgccacgugaucggcaagcccugccccaagccccaccggcugaaccacauggggaucugcuccugcggccuguacaagcacccggggguccccgugaaguggaagcgcugaggacuaguuauaagacugacuagcccgaugggccucccaacgggcccuccuccccuccuugcaccgagauuaaucaaaggcucuuuucagagccaccaaaaaaaaaaaaaaaaaaaaaaaaaaaaaaaaaaaaaaaaaaaaaaaaaaaaaaaaaaaaaaaaaaaaaaaaaaaaaaaaaaaaaaaaaaaaaaaaaaaaa

SEQ ID NO: 37971 - RNA, 1686 nt, Artificial Sequence
  mRNA product Design i-3 (hSL-A100) comprising derived and/or modified sequence from LASV(LASV003-NIG-2008;Clade II)__AIT17580__GPCmut10 (opt1)
aggagaaagcuuaccaugggccagaucaucaccuucuuccaggaggugccccacgucaucgaggaggugaugaacaucgugcugaucgcccucagccugcuggccauccucaaggggaucuacaacgucgcgaccugcggccuguucgggcugguguccuuccuccugcugugcggccgcagcugcuccacgaccuacaaggggguguacgagcuccagacccuggagcuggacauggccagccucaacaugugcaugccgcuguccugcacgaagaacaacagccaccacuacaucauggucggcaacgagaccggccuggagcucacccugaccaacacguccaucaucaaccacaaguucugcaaccugagcgacgcccacaagaagaaccucuacgaccacgcccugauguccaucaucagcaccuuccaccuguccauccccaacuucaaccaguacgaggccaugagcugcgacuucaacgggggcaagaucuccgugcaguacaaccucagccacaccuacgcgguggacgccgccaaccacugcgggaccaucgccaacggcguccugcagacguucaugcggauggcguggggcggguccuacaucgcccuggacagcggcaagggguccugggacugcaucaugaccagcuaccaguaccucaucauccagaacaccaccugggaggaccacugccaguucucccgccccagccccaucggcuaccuggggcugcucagccagcggacgcgcgacaucuacaucucccggcgccugcugggcaccuucaccuggacccucagcgacuccgagagcaacgagacgccgggcggguacugccugacccgguggaugcugaucgaggccgagcucaagugcuucggcaacaccgccguggccaagugcaacgagaagcacgacgaggaguucugcgacaugcugcgccuguucgacuucugcaagcaggcgauccggcgccucaaggccgaggcccagauguccauccagcugaucaacaaggccgugaacgcccugaucaacgaccagcucaucaugaagaaccaccuccgggacaucauggggauccccuacugcaacuacagcaaguacugguaccugaaccacaccgucacgggccgcaccucccugccccggugcuggcuggugagcaacggguccuaccugaacgagacccacuucagcgacgacaucgagcagcaggcggacaacaugaucaccgagcuccugcagaaggaguacauggaccgccagggcaagacgccccugggccucguggaccuguucgucuucuccaccagcuucuaccugaucuccaucuuccugcaccucgugaagaucccgacccaccggcacgugaucgggaagcccugccccaagccccaccgccugaaccacaugggcaucugcagcugcgggcuguacaagcacccgggcguccccgugaaguggaagcggugaggacuaguuauaagacugacuagcccgaugggccucccaacgggcccuccuccccuccuugcaccgagauuaaucaaaggcucuuuucagagccaccaaaaaaaaaaaaaaaaaaaaaaaaaaaaaaaaaaaaaaaaaaaaaaaaaaaaaaaaaaaaaaaaaaaaaaaaaaaaaaaaaaaaaaaaaaaaaaaaaaaaa

SEQ ID NO: 37972 - RNA, 1686 nt, Artificial Sequence
  mRNA product Design i-3 (hSL-A100) comprising derived and/or modified sequence from LASV(LASV035-NIG-2009;Clade II)__AIT17588__GPCmut10 (opt1)
aggagaaagcuuaccaugggccagaucaucaccuucuuccaggaggugccccacgucaucgaggaggugaugaacaucgugcugaucgcccucagccugcuggccauccucaaggggaucuacaacgucgcgaccugcggccuguucgggcugguguccuuccuccugcugugcggccgcagcugcuccacgaccuacaaggggguguacgagcuccagacccuggagcuggacauggccagccucaacaugugcaugccgcuguccugcacgaagaacaacagccaccacuacaucauggucggcaacgagaccggccuggagcucacccugaccaacacguccaucaucaaccacaaguucugcaaccugagcgacgcccacaagaagaaccucuacgaccacgcccugauguccaucaucagcaccuuccaccuguccauccccaacuucaaccaguacgaggccaugagcugcgacuucaacgggggcaagaucuccgugcaguacaaccucagccacgcguacgccguggacgccgccaaccacugcgggaccaucgcgaacggcguccugcagaccuucaugcggauggccuggggcggguccuacaucgcccuggacagcggcaagggguccugggacugcaucaugacgagcuaccaguaccucaucauccagaacaccaccugggaggaccacugccaguucucccgccccagccccaucggcuaccuggggcugcucagccagcggacccgcgacaucuacaucucccggcgccugcugggcacguucaccuggacccucagcgacuccgagggcaacgagacccccgggggcuacugccugacgcgguggaugcugaucgaggccgagcucaagugcuucgggaacaccgccguggcgaagugcaacgagaagcacgacgaggaguucugcgacaugcugcgccuguucgacuucugcaagcaggccauccggcgccucaaggccgaggcccagaugagcauccagcugaucaacaaggccgugaacgcgcugaucaacgaccagcucaucaugaagaaccaccuccgggacaucaugggcauccccuacugcaacuacuccaaguacugguaccugaaccacaccgucaccgggaagacgagccugccccgcugcuggcugguguccaacggcagcuaccugaacgagacccacuucuccgacgacaucgagcagcaggccgacaacaugaucaccgagcuccugcagaaggaguacaucgaccggcagggcaagaccccgcuggggcucguggaccuguucgucuucagcacguccuucuaccugaucagcaucuuccugcaccucgugaagaucccgacccaccgccacgugaucggcaagcccugccccaagccccaccggcugaaccacauggggaucugcuccugcggccuguacaagcacccggggguccccgugaaguggaagcgcugaggacuaguuauaagacugacuagcccgaugggccucccaacgggcccuccuccccuccuugcaccgagauuaaucaaaggcucuuuucagagccaccaaaaaaaaaaaaaaaaaaaaaaaaaaaaaaaaaaaaaaaaaaaaaaaaaaaaaaaaaaaaaaaaaaaaaaaaaaaaaaaaaaaaaaaaaaaaaaaaaaaaa

SEQ ID NO: 37973 - RNA, 1686 nt, Artificial Sequence
  mRNA product Design i-3 (hSL-A100) comprising derived and/or modified sequence from LASV(LASV1000-NIG-2009;Clade II)__AIT17782__GPCmut10 (opt1)
aggagaaagcuuaccaugggccagaucaucaccuucuuccaggaggugccccacgucaucgaggaggugaugaacaucgugcugaucgcccucagccugcuggccauccucaaggggaucuacaacgucgcgaccugcggccuguucgggcugguguccuuccuccugcugugcggccgcagcugcuccacgaccuacaaggggguguacgagcuccagacccuggagcuggacauggccagccucaacaugugcaugccgcuguccugcacgaagaacaacagccaccacuacaucauggucggcaacgagaccggccuggagcucacccugaccaacacguccaucaucaaccacaaguucugcaaccugagcgacgcccacaagaagaaccucuacgaccacgcccugauguccaucaucagcaccuuccaccuguccauccccaacuucaaccaguacgaggccaugagcugcgacuucaacgggggcaagaucuccgugcaguacaaccucagccacaccuacgcgguggacgccgccaaccacugcgggaccaucgccaacggcguccugcagacguucaugcggauggcguggggcggguccuacaucgcccuggacagcggcaagggguccugggacugcaucaugaccagcuaccaguaccucaucauccagaacaccaccugggaggaccacugccaguucucccgccccagccccaucggcuaccuggggcugcucagccagcggacgcgcgacaucuacaucucccggcgccugcugggcaccuucaccuggacccucagcgacuccgagggcaacgagacgcccgggggcuacugccugacccgguggaugcugaucgaggccgagcucaagugcuucgggaacaccgccguggccaagugcaacgagaagcacgacgaggaguucugcgacaugcugcgccuguucgacuucugcaagcaggcgaucaagcggcucaagaccgaggcccagaugagcauccagcugaucaacaaggccgugaacgcccugaucaacgaccagcucaucaugaagaaccaccuccgcgacaucaugggcauccccuacugcaacuacuccaaguacugguaccugaaccacacggucaccgggaagaccagccugccccggugcuggcugguguccaacggcagcuaccugaacgagacccacuucuccgacgacaucgagcagcaggccgacaacaugaucacggagcuccugcagaaggaguacaucgaccgccagggcaagaccccgcuggggcucguggaccuguucgucuucagcaccuccuucuaccugaucagcaucuuccugcaccucgugaagaucccgacccaccggcacguggucggcaagcccugccccaagccccaccgccugaaccacauggggaucugcuccugcggccuguacaagcacccgggggugcccgugaaguggaagcggugaggacuaguuauaagacugacuagcccgaugggccucccaacgggcccuccuccccuccuugcaccgagauuaaucaaaggcucuuuucagagccaccaaaaaaaaaaaaaaaaaaaaaaaaaaaaaaaaaaaaaaaaaaaaaaaaaaaaaaaaaaaaaaaaaaaaaaaaaaaaaaaaaaaaaaaaaaaaaaaaaaaaa

SEQ ID NO: 37974 - RNA, 1686 nt, Artificial Sequence
  mRNA product Design i-3 (hSL-A100) comprising derived and/or modified sequence from LASV(LASV221-NIG-2010;Clade II)__AIT17624__GPCmut10 (opt1)
aggagaaagcuuaccaugggccagaucaucaccuucuuccaggaggugccccacgucaucgaggaggugaugaacaucgugcugaucgcccucagccugcuggccauccucaaggggaucuacaacgucgcgaccugcggccuguucgggcugguguccuuccuccugcugugcggccgcagcugcuccacgaccuacaaggggguguacgagcuccagacccuggagcuggacauggccagccucaacaugugcaugccgcuguccugcacgaagaacaacagccaccacuacaucauggucggcaacgagaccggccuggagcucacccugaccaacacguccaucaucaaccacaaguucugcaaccugagcgacgcccacaagaagaaccucuacgaccacgcccugauguccaucaucagcaccuuccaccuguccauccccaacuucaaccaguacgaggccaugagcugcgacuucaacgggggcaagaucuccgugcaguacaaccucagccacaccuacgcgaucgacgccgccaaccacugcgggaccaucgccaacggcgugcugcagacguucaugcggauggcguggggcggguccuacaucgcccuggacagcggcaagggguccugggacugcaucaugaccagcuaccaguaccucaucauccagaacaccaccugggaggaccacugccaguucucccgccccagccccaucggcuaccuggggcugcucagccagcggacgcgcgacaucuacaucucccggcgccugcugggcaccuucaccuggacccucagcgacuccgagggcaacgagacgcccgggggcuacugccugacccgguggaugcugaucgaggccgagcucaagugcuucgggaacaccgccgucgccaagugcaacgagaagcacgacgaggaguucugcgacaugcugcgccuguucgacuucugcaagcaggcgauccggcgccucaagaccgaggcccagaugagcauccagcugaucaacaaggccgugaacgcccugaucaacgaccagcucaucaugaagaaccaccuccgggacaucaugggcauccccuacugcaacuacuccaaguacugguaccugaaccacacggugaccgggaagaccagccugccccgcugcuggcuggucuccaacggcagcuaccugaacgagacccacuucuccgacgacaucgagcagcaggccgacaacaugaucacggagaugcuccagaaggaguacauggaccggcagggcaagaccccgcuggggcugguggaccucuucguguucagcaccuccuucuaccugaucagcaucuuccugcaccuggucaagaucccgacccaccgccacgugaucggcaagcccugccccaagccccaccggcucaaccacauggggaucugcuccugcggccuguacaagcacccgggggugcccgucaaguggaagcgcugaggacuaguuauaagacugacuagcccgaugggccucccaacgggcccuccuccccuccuugcaccgagauuaaucaaaggcucuuuucagagccaccaaaaaaaaaaaaaaaaaaaaaaaaaaaaaaaaaaaaaaaaaaaaaaaaaaaaaaaaaaaaaaaaaaaaaaaaaaaaaaaaaaaaaaaaaaaaaaaaaaaaa

SEQ ID NO: 37975 - RNA, 1686 nt, Artificial Sequence
  mRNA product Design i-3 (hSL-A100) comprising derived and/or modified sequence from LASV(LASV237-NIG-2010;Clade II)__AIT17638__GPCmut10 (opt1)
aggagaaagcuuaccaugggccagaucaucaccuucuuccaggaggugccccacgucaucgaggaggugaugaacaucgugcugaucgcccucagccugcuggccauccucaaggggaucuacaacgucgcgaccugcggccuguucgggcugguguccuuccuccugcugugcggccgcagcugcuccacgaccuacaaggggguguacgagcuccagacccuggagcuggacauggccagccucaacaugugcaugccgcuguccugcacgaagaacaacagccaccacuacaucauggucggcaacgagaccggccuggagcucacccugaccaacacguccaucaucaaccacaaguucugcaaccugagcgacgcccacaagaaggaccucuacgaccacgcccugauguccaucaucagcaccuuccaccuguccauccccaacuucaaccaguacgaggccaugagcugcgacuucaacgggggcaagaucuccgugcaguacaaccucagccacaccuacgcgguggacgccgccaaccacugcgggaccaucgccaacggcguccugcagacguucaugcggauggcguggggcggguccuacaucgcccuggacagcggcaagggguccugggacugcaucaugaccagcuaccaguaccucaucauccagaacaccaccugggaggaccacugccaguucucccgccccagccccaucggcuaccuggggcugcucagccagcggacgcgcgacaucuacaucucccggcgccugcugggcaccuucaccuggacccucagcgacuccgagggcaacgagacgcccgggggcuacugccugacccgguggaugcugaucgaggccgagcucaagugcuucgggaacaccgccguggccaagugcaacgagaagcacgacgaggaguucugcgacaugcugcgccuguucgacuucugcaagcaggcgauccggcgccucaagaccgaggcccagaugagcauccagcugaucaacaaggccgugaacgcccugaucaacgaccagcucaucaugaagaaccaccuccgggacaucaugggcauccccuacugcaacuacuccaaguacugguaccugaaccacacggucaccgggaagaccagccugccccgcugcuggcugguguccaacggcagcuaccugaacgagacccacuucuccgacgacaucgagcagcaggccgacaacaugaucacggagcuccugcagaaggaguacauggaccggcagggcaagaccccgcuggggcucguggaccuguucgucuucagcaccuccuucuaccugaucagcaucuuccugcaccucaucaagaucccgacccaccgccacaucacgggcaagcccugccccaagccccaccggcugaaccacauggggaucugcuccugcggccuguacaagcacccgggggugcccgugaaguggaagcgcugaggacuaguuauaagacugacuagcccgaugggccucccaacgggcccuccuccccuccuugcaccgagauuaaucaaaggcucuuuucagagccaccaaaaaaaaaaaaaaaaaaaaaaaaaaaaaaaaaaaaaaaaaaaaaaaaaaaaaaaaaaaaaaaaaaaaaaaaaaaaaaaaaaaaaaaaaaaaaaaaaaaaa

SEQ ID NO: 37976 - RNA, 1686 nt, Artificial Sequence
  mRNA product Design i-3 (hSL-A100) comprising derived and/or modified sequence from LASV(LASV253-NIG-2011;Clade II)__AIT17670__GPCmut10 (opt1)
aggagaaagcuuaccaugggccagaucaucaccuucuuccaggaggugccccacgucaucgaggaggugaugaacaucgugcugaucgcccucagccugcuggccauccucaaggggaucuacaacgucgcgaccugcggccuguucgggcugguguccuuccuccugcugugcggccgcagcugcuccacgaccuacaaggggguguacgagcuccagacccuggagcuggacauggccagccucaacaugugcaugccgcuguccugcacgaagaacaacagccaccacuacaucauggucggcaacgagaccggccuggagcucacccugaccaacacguccaucaucaaccacaaguucugcaaccugagcgacgcccacaagaagaaccucuacgaccacgcccugauguccaucaucagcaccuuccaccuguccauccccaacuucaaccaguacgaggccaugagcugcgacuucaacgggggcaagaucuccgugcaguacaaccucagccacaccuacgcgguggacgccgccaaccacugcgggaccaucgccaacggcguccugcagacguucaugcggauggcguggggcggguccuacaucgcccuggacagcggcaagggguccugggacugcaucaugaccagcuaccaguaccucaucauccagaacaccaccugggaggaccacugccaguucucccgccccagccccaucggcuaccuggggcugcucagccagcggacgcgcgacaucuacaucucccggcgccugcugggcaccuucaccuggacccucagcgacuccgagggcaacgagacgcccgggggcuacugccugacccgguggaugcugaucgaggccgagcucaagugcuucgggaacaccgccguggccaagugcaacgagaagcacgacgaggaguucugcgacaugcugcgccuguucgacuucugcaagcaggcgauccggcgccucaaggccgaggcccagaugagcauccagcugaucaacaaggccgugaacgcccugaucaacgaccagcucaucaugaagaaccaccuccgggacaucaugggcaucccguacugcaacuacuccaaguacugguaccugaaccacaccgucacggggcgcaccagccugccccggugcuggcugguguccaacggcagcuaccugaacgagacccacuucuccgacgacaucgagcagcaggcggacaacaugaucaccgagcuccugcagaaggaguacaucgaccgccagggcaagacgccccuggggcucguggaccuguucgucuucagcaccuccuucuaccugaucagcaucuuccugcaccucgugaagaucccgacccaccggcacaucaucggcaagcccugccccaagccccaccgccugaaccacauggggaucugcuccugcggccuguacaagcacccgggggugcccgucaaguggaagcggugaggacuaguuauaagacugacuagcccgaugggccucccaacgggcccuccuccccuccuugcaccgagauuaaucaaaggcucuuuucagagccaccaaaaaaaaaaaaaaaaaaaaaaaaaaaaaaaaaaaaaaaaaaaaaaaaaaaaaaaaaaaaaaaaaaaaaaaaaaaaaaaaaaaaaaaaaaaaaaaaaaaaa

SEQ ID NO: 37977 - RNA, 1686 nt, Artificial Sequence
  mRNA product Design i-3 (hSL-A100) comprising derived and/or modified sequence from LASV(LASV254-NIG-2011;Clade II)__AIT17674__GPCmut10 (opt1)
aggagaaagcuuaccaugggccagaucaucaccuucuuccaggaggugccccacgucaucgaggaggugaugaacaucgugcugaucgcccucagccugcuggccauccucaaggggaucuacaacgucgcgaccugcggccuguucgggcugguguccuuccuccugcugugcggccgcagcugcuccacgaccuacaaggggguguacgagcuccagacccuggagcuggacaugaccaaccucaacaugugcaugccgcugagcugcaccaagaacaacucccaccacuacaucauggucggcaacgagaccggccuggagcucacccugacgaacaccagcaucaucaaccacaaguucugcaaccuguccgacgcccacaagaagaaccucuacaaccacgcccugaugagcaucaucuccaccuuccaccugagcauccccaacuucaaccaguacgaggccauguccugcgacuucaacgggggcaagaucagcgugcaguacaaccucucccacagcuacgccguggacgcggccaaccacugcgggaccaucgccaacggcguccugcagacguucaugcggauggccuggggcggguccuacaucgcgcuggacagcggcaaggggaacugggacugcaucaugaccuccuaccaguaccucaucauccagaacaccaccugggaggaccacugccaguucagccgccccucccccaucggcuaccuggggcugcucagccagcggacgcgcgacaucuacaucagccggcgccugcugggcaccuucaccuggacccucuccgacagcgagggcaacgagacgcccgggggcuacugccugacccgguggaugcugaucgaggccgagcucaagugcuucgggaacaccgccguggccaagugcaacgagaagcacgacgaggaguucugcgacaugcugcgccuguucgacuucugcaagcaggccauccggcgccucaagaccgaggcgcaggccaacauccagcugaucaacaaggccgugaacgcccugaucaacgaccagcucaucaugaagaaccaccuccgggacaucaugggcauccccuacugcaacuacuccaaguacugguaccugaaccacacggucaccgggaagaccagccugccccgcugcuggcugguguccaacggcagcuaccugaacgagacccacuucuccgacgacaucgagcagcaggccgacaacaugaucacggagcuccugcagaaggaguacauggaccggcagggcaagaccccgcuggggcucguggaccuguucgucuucagcaccuccuucuaccugaucagcaucuuccugcaccucgugaagaucccgacccaccgccacgugaucggcaagcccugccccaagccccaccggcugaaccacauggggaucugcuccugcggccuguacaagcacccggggguccccgugaaguggaagcgcugaggacuaguuauaagacugacuagcccgaugggccucccaacgggcccuccuccccuccuugcaccgagauuaaucaaaggcucuuuucagagccaccaaaaaaaaaaaaaaaaaaaaaaaaaaaaaaaaaaaaaaaaaaaaaaaaaaaaaaaaaaaaaaaaaaaaaaaaaaaaaaaaaaaaaaaaaaaaaaaaaaaaa

SEQ ID NO: 37978 - RNA, 1686 nt, Artificial Sequence
  mRNA product Design i-3 (hSL-A100) comprising derived and/or modified sequence from LASV(Nig08-A19;Clade III)__ADU56618__GPCmut10 (opt1)
aggagaaagcuuaccaugggccagaucgugaccuucuuccaggaggucccccacgugaucgaggaggugaugaacaucguccugaucgcccucagcauccuggccauccugaaggggcucuacaacaucgcgaccugcggccugaucgggcuggugacguuccuccugcuguccggccgcagcugcuccaugaccuacaaggggguguacgagcuccagacccuggagcugaacaugaacacccucaacaugugcaugccgcugagcugcaccaagaacaacucccaccacuacaucauggucggcaacgagaccggccuggagcucacccugacgaacaccagccugcuccaccacaaguucugcaaccuguccgacgcccacaagaagaaccuguacgaccacacccucaugagcaucaucuccaccuuccaccugagcauccccaacuucaaccaguacgaggccauguccugcgacuucaacgggggcaagaucacggugcaguacaaccugagccacuccuacgccaucgacgccgcgaaccacugcgggaccguggccaacggcguccuccagaccuucaugcggauggccuggggcgggagcuacaucgcccuggacuccggccgcgggaagugggacugcaucaugaccagcuaccaguaccugaucauccagaacacgaccugggaggaccacugccaguucucccggcccagccccaucggcuaccucgggcugcugucccagcgcacccgggacaucuacaucagccgccggcuccugggcaccuucacguggacccugagcgacuccgagggcaacgagacccccgggggcuacugccucacccgcuggaugcugaucgaggcggagcugaagugcuucgggaacacggccguggccaagugcaacgagaagcacgacgaggaguucugcgacaugcuccggcuguucgacuucugcaagcaggccauccgccggcugaaggccgaggcgcagaugagcauccagcucaucaacaaggccgugaacgcccugaucaacgaccagcugaucaugaagaaccaccuccgcgacaucaugggcauccccuacugcaacuacuccaaguacugguaccugaaccacaccagcaccgggcggaccucccugccccgcugcuggcucgucagcaacggcuccuaccugaacgagacgcacuucagcgacgacaucgagcagcaggccgacaacaugaucaccgagaugcugcagaaggaguaccucgaccggcagggcaagaccccgcuggggcugguggaccuguucguguucuccaccagcuucuaccucaucuccaucuuccugcaccuggucaagaucccgacgcaccgccacaucgugggcaagcccugccccaagccccaccggcucaaccacauggggaucugcagcugcggccuguacaagcagccgggggugcccguccgcuggaagcggugaggacuaguuauaagacugacuagcccgaugggccucccaacgggcccuccuccccuccuugcaccgagauuaaucaaaggcucuuuucagagccaccaaaaaaaaaaaaaaaaaaaaaaaaaaaaaaaaaaaaaaaaaaaaaaaaaaaaaaaaaaaaaaaaaaaaaaaaaaaaaaaaaaaaaaaaaaaaaaaaaaaaa

SEQ ID NO: 37979 - RNA, 1689 nt, Artificial Sequence
  mRNA product Design i-3 (hSL-A100) comprising derived and/or modified sequence from LASV(G1180-SLE-2010;Clade IV)__AIT17168__GPCmut10 (opt1)
aggagaaagcuuaccaugggccagaucgugaccuucuuccaggaggucccccacgugaucgaggaggugaugaacaucguccugaucgcccucagcauccuggccgugcugaaggggcucuacaacuucgcgaccugcggccugguggggcugcucaccuuccugcugcucugcggccgcuccugcaccgccagccgguacaagggggucuacgagcugcagacccuggagcucaacauggagacccugaacaugugcaugccgcuguccugcaccaagaacaacagccaccacuacaucauggugggcaacgagaccggccucgagcugacccugacgaacaccuccaucaucaaccacaaguucugcaaccucagcgacgcccacaagaagaaccuguacgaccacgcccugauguccaucaucagcaccuuccaccucuccauccccaacuucaaccaguacgaggccaugagcugcgacuucaacgggggcaagaucuccgugcaguacaaccugagccacuccuacgcgggggacgccgccaaccacugcggcaccgucgccaacggggugcugcagacguucaugcgcauggcguggggcggcagcuacaucgcccucgacuccgggcacggcagcugggacugcaucaugaccuccuaccaguaccugaucauccagaacaccaccugggaggaccacugccaguucagccggcccucccccaucggguaccugggccuccugagccagcgcacgcgggacaucuacaucagccgccggcugcucggcaccuucaccuggacccuguccgacagcgaggggaaggacacgccgggcggguacugccugacccgcuggaugcucaucgaggccgagcugaagugcuucggcaacaccgccguggccaagugcaacgagaagcacgacgaggaguucugcgacaugcugcggcuguucgacuucugcaagcaggcgauccagcgccugaaggccgaggcccagauguccauccagcugaucaacaaggccgucaacgcccucaucaacgaccagcugaucaugaagaaccaccuccgggacaucauggggauccccuacugcaacuacagcaaguacugguaccucaaccacaccacgaccggcaagaccucccugcccaagugcuggcuggugagcaacggcuccuaccucaacgagacccacuucagcgacgacaucgagcagcaggcggacaacaugaucacggagaugcugcagaaggaguacauggagcgccaggggaagacgccccugggccucguggaccuguucgucuucuccaccagcuucuaccugaucuccaucuuccugcaccucgugaagaucccgacccaccggcacaucgugggcaagagcugccccaagccccaccgccugaaccacauggggaucugcuccugcgggcuguacaagcagcccggcgucccggugaaguggaagcggugaggacuaguuauaagacugacuagcccgaugggccucccaacgggcccuccuccccuccuugcaccgagauuaaucaaaggcucuuuucagagccaccaaaaaaaaaaaaaaaaaaaaaaaaaaaaaaaaaaaaaaaaaaaaaaaaaaaaaaaaaaaaaaaaaaaaaaaaaaaaaaaaaaaaaaaaaaaaaaaaaaaaa

SEQ ID NO: 37980 - RNA, 1689 nt, Artificial Sequence
  mRNA product Design i-3 (hSL-A100) comprising derived and/or modified sequence from LASV(G1442-SLE-2011;Clade IV)__AIT17180__GPCmut10 (opt1)
aggagaaagcuuaccaugggccagaucgugaccuucuuccaggaggucccccacgugaucgaggaggugaugaacaucguccugaucgcccucagcauccuggccgugcugaaggggcucuacaacguggcgaccugcggccugaucgggcuggucacguuccuccugcugugcggccgcuccugcaccaccacccucuacaaggggguguacgagcugcagacgcuggagcucaacauggagacccugaacaugugcaugccgcugagcugcaccaagaacaacucccaccacuacauccgggugggcaacgagacgggccucgagcugacccugaccaacaccagcaucaucaaccacaaguucugcaaccucuccgacgcccacaagaagaaccuguacgaccacgcccugaugagcaucaucuccacguuccaccucagcauccccaacuucaaccaguacgaggccauguccugcgacuucaacgggggcaagaucagcguccaguacaaccugucccacagcuacgccggggacgcggccaaccacugcggcaccguggccaacggggugcugcagaccuucaugcgcauggccuggggcggcuccuacaucgcgcucgacagcgggcggggcaacugggacugcaucaugaccuccuaccaguaccugaucauccagaacacgaccugggacgaccacugccaguucagccgccccucccccaucggguaccugggccuccugagccagcggacccgcgacgucuacaucucccggcgccugcucggcaccuucacguggacccugagcgacagcgaggggaaggacaccccgggcggguacugccugacccgguggaugcucaucgaggccgagcugaagugcuucggcaacacggccguggccaagugcaacgagaagcacgacgaggaguucugcgacaugcugcgccucuucgacuucugcaagcaggccauccagcggcugaaggcggaggcccagauguccauccagcugaucaacaaggccgugaacgcccucaucaacgaccagcugaucaugaagaaccaccuccgcgacaucauggggauccccuacugcaacuacagcaaguacugguaccugaacaacaccgccaccggcaagaccucccugcccaagugcuggcugaucagcaacggcuccuaccucaacgagacgcacuucagcgacgacaucgagcaggaggcggacaacaugaucaccgagaugcugcagaaggaguacauggagcggcaggggaagacgccccugggccucgucgaccuguucguguucuccaccagcuucuaccugaucuccaucuuccugcaccucgugaagaucccgacccaccgccacaucgucggcaagagcugccccaagccccaccggcugaaccacauggggaucugcuccugcgggcuguacaagcagcccggcgugccggugcgcuggaagcggugaggacuaguuauaagacugacuagcccgaugggccucccaacgggcccuccuccccuccuugcaccgagauuaaucaaaggcucuuuucagagccaccaaaaaaaaaaaaaaaaaaaaaaaaaaaaaaaaaaaaaaaaaaaaaaaaaaaaaaaaaaaaaaaaaaaaaaaaaaaaaaaaaaaaaaaaaaaaaaaaaaaaa

SEQ ID NO: 37981 - RNA, 1689 nt, Artificial Sequence
  mRNA product Design i-3 (hSL-A100) comprising derived and/or modified sequence from LASV(G3010-SLE-2013;Clade IV)__AIT17344__GPCmut10 (opt1)
aggagaaagcuuaccaugggccagaucgugaccuucuuccaggaggucccccacgugaucgaggaggugaugaacaucguccugaucgcccucagcauccuggccgugcugaaggggcucuacaacuucgcgaccugcggccugguggggcuggucacguuccuccugcugugcggccgcuccugcaccaccagccucuacaaggggguguacgagcugcagacccuggagcucaacauggagacgcugaacaugugcaugccgcuguccugcaccaagaacaacagccaccacuacaucauggugggcaacgagaccggccucgagcugacgcugaccaacaccuccaucaucaaccacaaguucugcaaccucagcgacgcccacaagaagaaccuguacaaccacgcccugauguccaucaucagcaccuuccaccucuccauccccaacuucaaccaguacgaggccaugagcugcgacuucaacgggggcaagaucuccguccaguacaaccugagccacuccuacgccggggacgcggccagccacugcggcacgguggccaacggggugcugcagaccuucaugcggauggccuggggcggcuccuacaucgcgcucgacagcggguacggcaagugggacugcaucaugaccuccuaccaguaccugaucauccagaacaccacgugggaggaccacugccaguucagccgccccucccccaucggguaccugggccuccugagccagcggacccgcgacaucuacaucagccggcgccugcucggcaccuucaccuggacgcuguccgacagcgaggggaaggacaccccgggcggguacugccugacccgguggaugcucaucgaggccgagcugaagugcuucggcaacaccgccgucgccaagugcaacgagaagcacgacgaggaguucugcgacaugcugcgccucuucgacuucugcaagcaggccauccagcggcugaagacggaggcgcagauguccauccagcugaucaacaaggccgugaacgcccucaucaacgaccagcugaucaugaagaaccaccuccgcgacaucauggggauccccuacugcaacuacagcaaguacugguaccugaaccacaccaccaccggcaagacgucccugcccaagugcuggcuggugagcaacggcuccuaccucaacgagacccacuucagcgacgacaucgagcagcaggccgacaacaugaucaccgagaugcugcagaaggaguacauggagcggcaggggaagacgccccugggccucgucgaccuguucguguucuccaccagcuucuaccugaucuccaucuuccugcaccucgugaagaucccgacccaccgccacaucgucggcaagagcugccccaagccccaccggcugaaccacauggggaucugcuccugcgggcuguacaagcagcccggcgugccggugcgcuggaagcggugaggacuaguuauaagacugacuagcccgaugggccucccaacgggcccuccuccccuccuugcaccgagauuaaucaaaggcucuuuucagagccaccaaaaaaaaaaaaaaaaaaaaaaaaaaaaaaaaaaaaaaaaaaaaaaaaaaaaaaaaaaaaaaaaaaaaaaaaaaaaaaaaaaaaaaaaaaaaaaaaaaaaa

SEQ ID NO: 37982 - RNA, 1689 nt, Artificial Sequence
  mRNA product Design i-3 (hSL-A100) comprising derived and/or modified sequence from LASV(G502-SLE-2009;Clade IV)__AIT17126__GPCmut10 (opt1)
aggagaaagcuuaccaugggccagaucgugaccuucuuccaggaggucccccacgugaucgaggaggugaugaacaucguccugaucgcccucagcauccuggccgugcugaaggggcucuacaacuucgcgaccugcggccugguggggcugcucacguuccugcugcucugcggccgcuccugcaccaccgggcuguacaagggcgucuacgagcugcagacccucgagcugaacauggagacgcugaacaugugcaugccgcucagcugcaccaagaacaacucccaccacuacaucauggugggcaacgagaccgggcuggagcugacgcucaccaacaccagcaucaucaaccacaaguucugcaaccuguccgacgcccacaagaagaaccuguacgaccacgcccucaugagcaucaucuccaccuuccaccugagcauccccaacuucaaccaguacgaggccauguccugcgacuucaacggcgggaagaucagcgugcaguacaaccugucccacagcuacgccggcgacgcggccgaccacugcgggacggucgccaacggcgugcuccagaccuucaugcggauggccuggggcggguccuacaucgcgcuggacagcggccgcgggcggugggacugcaucaugaccuccuaccaguaccugaucauccagaacaccacgugggaggaccacugccaguucagccgccccucccccaucggcuaccucggccugcugagccagcggacccgcgacaucuacaucucccggcgccuccuggggaccuucaccuggacgcugagcgacagcgagggcaaggacacccccgggggcuacugccucacccgguggaugcugaucgaggccgagcugaagugcuucgggaacaccgccguggccaagugcaacgagaagcacgacgaggaguucugcgacaugcuccgccuguucgacuucugcaagcaggccauccagcggcugaaggcggaggcccagauguccauccagcucaucaacaaggccgucaacgcccugaucaacgaccagcuggugaugaagaaccaccuccgcgacaucaugggcauccccuacugcaacuacagccgguacugguaccugaaccacacgaccaccggccgcaccucccugcccaagugcuggcucgugagcaacggguccuaccugaacgagacgcacuucagcgacgacaucgagcagcaggccgacaacaugaucaccgagaugcugcagaaggaguacauggagcggcagggcaagaccccgcucgggcuggucgaccuguucguguucuccaccagcuucuaccugaucuccaucuuccuccaccuggugaagaucccgacgcaccgccacaucgucggcaagagcugccccaagccccaccggcugaaccacauggggaucugcuccugcggccucuacaagcagcccggcgugccggugaaguggaagcgcugaggacuaguuauaagacugacuagcccgaugggccucccaacgggcccuccuccccuccuugcaccgagauuaaucaaaggcucuuuucagagccaccaaaaaaaaaaaaaaaaaaaaaaaaaaaaaaaaaaaaaaaaaaaaaaaaaaaaaaaaaaaaaaaaaaaaaaaaaaaaaaaaaaaaaaaaaaaaaaaaaaaaa

SEQ ID NO: 37983 - RNA, 1689 nt, Artificial Sequence
  mRNA product Design i-3 (hSL-A100) comprising derived and/or modified sequence from LASV(G733-SLE-2010;Clade IV)__AIT17154__GPCmut10 (opt1)
aggagaaagcuuaccaugggccagaucgugaccuucuuccaggaggucccccacgugaucgaggaggugaugaacaucguccugaucgcccucagcauccuggccgugcugaaggggcucuacaacuucgcgaccugcggcaucguggggcuggucuccuuccugcuccugugcggccgcagcugcacgaccucccuguacaaggggguguacgagcuccagacccuggagcugaacauggagacccucaacaugugcaugccgcugagcugcaccaagaacaacucccaccacuacaucauggugggcaacgagaccggccuggagcucacccugacgaacaccagcaucaucaaccacaaguucugcaaccuguccgacgcccacaagaagaaccucuacgaccacgcccugaugagcaucaucuccaccuuccaccugagcauccccaacuucaaccaguacgaggccauguccugcgacuucaacgggggcaagaucagcguccaguacaaccucucccacagcuacgccggggacgcggccaaccacugcggcaccaucgccaacggggugcugcagacguucaugcggauggccuggggcggcuccuacaucgcgcuggacagcgggcgcgaccggugggacugcaucaugaccuccuaccaguaccucaucauccagaacaccaccugggaggaccacugccaguucagccgccccucccccaucggcuaccuggggcugcucagccagcggacgcgcgacaucuacaucagccggcgccugcugggcaccuucaccuggacccucuccgacagcgagggcaaggacacgcccgggggcuacugccugacccgguggaugcugaucgaggccgagcucaagugcuucgggaacaccgccguggccaagugcaacgagaagcacgacgaggaguucugcgacaugcugcgccuguucgacuucugcaagcaggccauccagcggcucaaggcggaggcccagauguccauccagcugaucaacaaggccgucaacgcccugaucaacgaccagcucaucaugaagaaccaccuccgcgacaucaugggcauccccuacugcaacuacagcaaguacugguaccugaaccacaccacgaccgggaagaccucccugcccaagugcuggcuggugagcaacggcuccuaccugaacgagacccacuucagcgacgacaucgagcagcaggccgacaacaugaucacggagaugcuccagaaggaguacauggagcggcagggcaagaccccgcuggggcugguggaccucuucgucuucuccaccagcuucuaccugaucuccaucuuccugcaccuggugaagaucccgacccaccgccacguggucggcaagagcugccccaagccccaccggcucaaccacauggggaucugcuccugcggccuguacgggcagcccggcgugccggugaaguggaagcgcugaggacuaguuauaagacugacuagcccgaugggccucccaacgggcccuccuccccuccuugcaccgagauuaaucaaaggcucuuuucagagccaccaaaaaaaaaaaaaaaaaaaaaaaaaaaaaaaaaaaaaaaaaaaaaaaaaaaaaaaaaaaaaaaaaaaaaaaaaaaaaaaaaaaaaaaaaaaaaaaaaaaaa

SEQ ID NO: 37984 - RNA, 1689 nt, Artificial Sequence
  mRNA product Design i-3 (hSL-A100) comprising derived and/or modified sequence from MOPV/LASV reassortant(IGS-1;Clade IV)__AFY05576__GPCmut10 (opt1)
aggagaaagcuuaccaugggccagaucgugaccuucuuccaggaggucccccacgugaucgaggaggugaugaacaucguccugaucgcccucagcgugcuggccgugcugaaggggcucuacaacuucgcgaccugcggccuggucgggcuggugacguuccuccugcugugcggccgcuccugcaccaccagccucuacaaggggguguacgagcugcagacccuggagcucaacauggagacgcugaacaugugcaugccgcuguccugcaccaagaacaacagccaccacuacaucauggucggcaacgagaccggccucgagcugacgcugaccaacaccuccaucaucaaccacaaguucugcaaccucagcgacgcccacaagaagaaccuguacgaccacgcccugauguccaucaucagcaccuuccaccucuccauccccaacuucaaccaguacgaggccaugagcugcgacuucaacgggggcaagaucuccgugcaguacaaccugagccacuccuacgccggggacgcggccaaccacugcggcacgguggccaacgggguccugcagaccuucaugcggauggccuggggcggcagcuacaucgcgcucgacuccgggcgcggcaacugggacugcaucaugaccagcuaccaguaccugaucauccagaacaccacgugggaggaccacugccaguucucccggcccagccccaucggguaccugggccuccugucccagcgcacccgggacaucuacaucagccgccggcugcucggcaccuucaccuggacgcugagcgacuccgagggggaggacaccccgggcggguacugccugacccgcuggaugcucaucgaggccgagcugaagugcuucggcaacaccgccguggccaagugcaacgagaagcacgacgaggaguucugcgacaugcugcggcuguucgacuucugcaagcaggccauccagcgccugaaggcggaggcccagaugagcauccagcugaucaacaaggccgugaacgcccucaucaacgaccagcugaucaugaagaaccaccuccgggacaucauggggauccccuacugcaacuacuccaaguacugguaccucaaccacacgaccaccggccgcaccagccugcccaagugcuggcuggucuccaacggcagcuaccucaacgagacgcacuucuccgacgacaucgagcagcaggccgacaacaugaucaccgagaugcugcagaaggaguacauggagcggcaggggaagacgccccugggccucguggaccuguucguguucagcaccuccuucuaccugaucagcaucuuccugcaccucgucaagaucccgacccaccgccacaucguggggaaguccugccccaagccccaccggcugaaccacaugggcaucugcagcugcgggcuguacaagcagcccggcgugccggucaaguggaagcgcugaggacuaguuauaagacugacuagcccgaugggccucccaacgggcccuccuccccuccuugcaccgagauuaaucaaaggcucuuuucagagccaccaaaaaaaaaaaaaaaaaaaaaaaaaaaaaaaaaaaaaaaaaaaaaaaaaaaaaaaaaaaaaaaaaaaaaaaaaaaaaaaaaaaaaaaaaaaaaaaaaaaaa

SEQ ID NO: 37985 - RNA, 1689 nt, Artificial Sequence
  mRNA product Design i-3 (hSL-A100) comprising derived and/or modified sequence from LASV(LM765-SLE-2012;Clade IV)__AIT17814__GPCmut10 (opt1)
aggagaaagcuuaccaugggccagaucgugaccuucuuccaggaggucccccacgugaucgaggaggugaugaacaucguccugaucgcccucagcauccuggccgugcugaaggggcucuacaacuucgcgaccugcggccugguggggcuggucacguuccuccugcugugcggccgcuccugcaccaccagccucuacaaggggguguacgagcugcagacccuggagcucaacauggagacgcugaacaugugcaugccgcuguccugcaccaagaacaacagccaccacuacaucauggugggcaacgagaccggccucgagcugacgcugaccaacaccuccaucaucgaccacaaguucugcaaccucagcgacgcccaccggaagaaccuguacgaccacgcccugauguccaucaucagcaccuuccaccucuccauccccaacuucaaccaguacgaggccaugagcugcgacuucaacgggggcaagaucuccguccaguacaaccugagccacuccuacgccaaggacgcggccgaccacugcgggacgguggccaacggcgugcugcagaccuucaugcgcauggccuggggcgggagcuacaucgcgcucgacuccggccgggggcgcugggacugcaucaugaccagcuaccaguaccugaucauccagaacaccacgugggaggaccacugccaguucucccggcccagccccaucggcuaccuggggcuccugucccagcgcacccgggacaucuacaucagccgccggcugcucggcaccuucaccuggacgcugagcgacuccgagggcaaggacacccccgggggcuacugccugacccgcuggaugcucaucgaggccgagcugaagugcuucgggaacaccgccgucgccaagugcaacgagaagcacgacgaggaguucugcgacaugcugcggcuguucgacuucugcaagcaggccauccagcgccugaaggcggaggcccagaugagcauccagcugaucaacaaggccgugaacgcccucaucaacgaccagcugaucaugaagaaccaccuccgggacaucaugggcauccccuacugcaacuacuccaaguacugguaccucaaccacacgaccaccgggaagaccagccugcccaagugcuggcugguguccaacggcagcuaccucaacgagacgcacuucuccgacgacaucgagcagcaggccgacaacaugaucaccgagaugcugcagaaggaguacauggagcgccagggcaagaccccgcuggggcucgucgaccuguucguguucagcaccuccuucuaccugaucagcaucuuccugcaccucgugaagaucccgacgcaccggcacaucgucggcaagcccugccccaagccccaccgccugaaccacauggggaucugcuccugcggccuguacaagcagccgggggugcccgugaaguggaagcggugaggacuaguuauaagacugacuagcccgaugggccucccaacgggcccuccuccccuccuugcaccgagauuaaucaaaggcucuuuucagagccaccaaaaaaaaaaaaaaaaaaaaaaaaaaaaaaaaaaaaaaaaaaaaaaaaaaaaaaaaaaaaaaaaaaaaaaaaaaaaaaaaaaaaaaaaaaaaaaaaaaaaa

SEQ ID NO: 37986 - RNA, 1689 nt, Artificial Sequence
  mRNA product Design i-3 (hSL-A100) comprising derived and/or modified sequence from LASV(LM776-SLE-2012;Clade IV)__AIT17824__GPCmut10 (opt1)
aggagaaagcuuaccaugggccagaucgugaccuucuuccaggaggucccccacgugaucgaggaggugaugaacaucguccugaucgcccucagcauccuggccgugcugaaggggcucuacaacuucgcgaccugcggccugguggggcuggucacguuccuccugcugugcggccgcuccugcaccaccagcguguacaaggggguguacgagcuccagacccuggagcugaacauggagacgcucaacaugugcaugccgcuguccugcaccaagaacaacagccaccacuacaucauggucggcaacgagaccggccuggagcucacgcugaccaacaccuccaucaucaaccacaaguucugcaaccugagcgacgcccacaagaagaaccucuacgaccacgcccugauguccaucaucagcaccuuccaccuguccauccccaacuucaaccaguacgaggccaugagcugcgacuucaacgggggcaagaucuccgugcaguacaaccucagccacuccuacgccggggacgcggccaaccacugcggcacgguggccaacgggguccugcagaccuucaugcggauggccuggggcggcagcuacaucgcgcuggacuccgggcacggcaagugggacugcaucaugaccagcuaccaguaccucaucauccagaacaccacgugggaggaccacugccaguucucccgccccagccccaucggguaccugggccugcucucccagcggacccgcgacaucuacaucagccggcgccugcugggcaccuucaccuggacgcucagcgacuccgaggggaaggacaccccgggcggguacugccugacccgguggaugcugaucgaggccgagcucaagugcuucggcaacaccgccguggccaagugcaacgagaagcacgacgaggaguucugcgacaugcugcgccuguucgacuucugcaagcaggccauccagcggcucaaggcggaggcccagaugagcauccagcugaucaacaaggccgugaacgcccugaucaacgaccagcucaucaugaagaaccaccuccgcgacaucauggggauccccuacugcaacuacuccaaguacugguaccugaaccacacgaccaccggcaagaccagccugcccaagugcuggcuggucuccaacggcagcuaccugaacgagacgcacuucuccgacgacaucgagcagcaggccgacaacaugaucaccgagaugcuccagaaggaguacauggagcggcaggggaagacgccccugggccugguggaccucuucguguucagcaccuccuucuaccugaucagcaucuuccugcaccuggucaagaucccgacccaccgccacaucguggggaaguccugccccaagccccaccggcucaaccacaugggcaucugcagcugcgggcuguacaagcagcccggcgugccgguccgcuggaagcggugaggacuaguuauaagacugacuagcccgaugggccucccaacgggcccuccuccccuccuugcaccgagauuaaucaaaggcucuuuucagagccaccaaaaaaaaaaaaaaaaaaaaaaaaaaaaaaaaaaaaaaaaaaaaaaaaaaaaaaaaaaaaaaaaaaaaaaaaaaaaaaaaaaaaaaaaaaaaaaaaaaaaa

SEQ ID NO: 37987 - RNA, 1689 nt, Artificial Sequence
  mRNA product Design i-3 (hSL-A100) comprising derived and/or modified sequence from LASV(Mad39;Clade IV)__ANH09722__GPCmut10 (opt1)
aggagaaagcuuaccaugggccagaucgugaccuucuuccaggaggucccccacgugaucgaggaggugaugaacaucguccugaucgcccucagcauccuggccgugcugaaggggcucuacaacguggcgaccugcggccugaucgggcuggucacguuccuccugcugugcggccgcuccugcaccaccacccucuacaaggggguguacgagcugcaggcccuggagcucaacauggagacgcugaacaugugcaugccgcugagcugcaccaagaacaacucccaccacuacauccgggugggcaacgagaccggccucgagcugacgcugaccaacaccagccucaucaaccacaaguucugcaaccuguccgacgcccacaagaagaaccuguacgaccacgcccucaugagcaucaucuccaccuuccaccugagcauccccaacuucaaccaguacgaggccauguccugcgacuucaacgacgggaagaucagcguccaguacaaccugucccacacguacgcgggcgacaccgccaaccacugcgggaccguggccaacggcgugcuccagaccuucaugcgcauggccuggggcgggagcuacaucgcgcuggacuccggccgcgggggcugggacugcaucaugacgagcuaccaguaccugaucauccagaacaccaccugggaggaccacugccaguucucccggcccagccccaucggguaccucggccugcugucccagcggacccgcgacaucuacaucagccggcgccuccugggcacguucaccuggacccuguccgacagcgaggggaaggacaccccgggcggguacugccucacgcgguggaugcugaucgaggccgagcugaagugcuucggcaacaccgccgucgccaagugcaacgagaagcacgacgaggaguucugcgacaugcuccgccuguucgacuucugcaagcaggccauccagcggcugaaggcggaggcccagaugagcauccagcucaucaacaaggccgugaacgcccugaucaacgaccagcugaucaugaagaaccaccuccgcgacaucauggggauccccuacugcaacuacuccaaguacugguaccugaaccacaccgugaccggcaagacgagccugcccaagugcuggcucgucuccaacggcagcuaccugaacgagacccacuucuccgacgacaucgagcagcaggccgacaacaugaucaccgagaugcugcagaaggaguacauggagcggcaggggaagacgccccucggccugguggaccuguucguguucagcaccuccuucuaccugaucagcaucuuccuccaccuggucaagaucccgacccaccgccacgugguggggaagcccugccccaagccccaccggcugaaccacaugggcaucugcuccugcggguucuacaagcagccgggcguccccgugcgcuggaagcggugaggacuaguuauaagacugacuagcccgaugggccucccaacgggcccuccuccccuccuugcaccgagauuaaucaaaggcucuuuucagagccaccaaaaaaaaaaaaaaaaaaaaaaaaaaaaaaaaaaaaaaaaaaaaaaaaaaaaaaaaaaaaaaaaaaaaaaaaaaaaaaaaaaaaaaaaaaaaaaaaaaaaa

SEQ ID NO: 37988 - RNA, 1689 nt, Artificial Sequence
  mRNA product Design i-3 (hSL-A100) comprising derived and/or modified sequence from LASV(Z0947-SLE-2011;Clade IV)__AIT17840__GPCmut10 (opt1)
aggagaaagcuuaccaugggccagaucgugaccuucuuccaggaggucccccacgugaucgaggaggugaugaacaucguccugaucgcccucagcauccuggccgugcugaaggggcucuacaacuucgcgaccugcggccugguggggcuggucacguuccuccugcugugcggccgcuccugcaccaucagccucuacaaggggguguacgagcugcagacccuggagcucaacauggagacccugaacaugugcaugccgcuguccugcaccaagaacaacagccaccacuacaucauggugggcaacgagaccggccucgagcugacccugacgaacaccuccaucaucaaccacaaguucugcaaccucagcgacgcccacaagaagaaccuguacgaccacgcccugauguccaucaucagcaccuuccaccucuccauccccaacuucaaccaguacgaggccaugagcugcgacuucaacgggggcaagaucuccguccaguacaaccugagccacuccuacgccggggacgcggccaaccacugcggcaccguggccaacggggugcugcagacguucaugcggauggccuggggcggcagcuacaucgcgcucgacuccgggcgcgaccggugggacugcaucaugaccagcuaccaguaccugaucauccagaacaccaccugggaggaccacugccaguucucccgccccagccccaucggcuaccuggggcuccugucccagcggacgcgcgacaucuacaucagccggcgccugcucggcaccuucaccuggacccugagcgacuccgagggcaaggacacgcccgggggcuacugccugacccgguggaugcucaucgaggccgagcugaagugcuucgggaacaccgccgucgccaagugcaacgagaagcacgacgaggaguucugcgacaugcugcgccucuucgacuucugcaagcaggccauccagcggcugaaggcggaggcccagaugagcauccagcugaucaacaaggccgugaacgcccucaucaacgaccagcugaucaugaagaaccaccuccgcgacaucaugggcauccccuacugcaacuacuccaaguacugguaccugaaccacaccacgaccgggaagaccagccugcccaagugcuggcugguguccaacggcagcuaccucaacgagacccacuucuccgacgacaucgagcagcaggccgacaacaugaucacggagaugcugcagaaggaguacauggagcggcagggcaagaccccgcuggggcucgucgaccuguucguguucagcaccuccuucuaccugaucagcaucuuccugcaccucgugaagaucccgacccaccgccacaucgucggcaagcccugccccaagccccaccggcugaaccacauggggaucugcuccugcggccuguacaagcagccgggggugcccgugaaguggaagcgcugaggacuaguuauaagacugacuagcccgaugggccucccaacgggcccuccuccccuccuugcaccgagauuaaucaaaggcucuuuucagagccaccaaaaaaaaaaaaaaaaaaaaaaaaaaaaaaaaaaaaaaaaaaaaaaaaaaaaaaaaaaaaaaaaaaaaaaaaaaaaaaaaaaaaaaaaaaaaaaaaaaaaa

SEQ ID NO: 37989 - RNA, 1689 nt, Artificial Sequence
  mRNA product Design i-3 (hSL-A100) comprising derived and/or modified sequence from LASV(Josiah;Clade IV)__NP_694870__GPCmut10 (opt1)
aggagaaagcuuaccaugggccagaucgugaccuucuuccaggaggucccccacgugaucgaggaggugaugaacaucguccugaucgcccucagcgugcuggccgugcugaaggggcucuacaacuucgcgaccugcggccuggucgggcuggugaccuuccuccugcugugcggccgcuccugcaccaccagccucuacaaggggguguacgagcugcagacccuggagcucaacauggagacgcugaacaugugcaugccgcuguccugcaccaagaacaacagccaccacuacaucauggucggcaacgagaccggccucgagcugacccugacgaacaccuccaucaucaaccacaaguucugcaaccucagcgacgcccacaagaagaaccuguacgaccacgcccugauguccaucaucagcaccuuccaccucuccauccccaacuucaaccaguacgaggccaugagcugcgacuucaacgggggcaagaucuccgugcaguacaaccugagccacuccuacgccggggacgcggccaaccacugcggcaccguggccaacgggguccugcagacguucaugcggauggccuggggcggcagcuacaucgcgcucgacuccgggcgcggcaacugggacugcaucaugaccagcuaccaguaccugaucauccagaacaccaccugggaggaccacugccaguucucccggcccagccccaucggguaccugggccuccugucccagcgcacgcgggacaucuacaucagccgccggcugcucggcaccuucaccuggacccugagcgacuccgaggggaaggacacgccgggcggguacugccugacccgcuggaugcucaucgaggccgagcugaagugcuucggcaacaccgccguggccaagugcaacgagaagcacgacgaggaguucugcgacaugcugcggcuguucgacuucugcaagcaggccauccagcgccugaaggcggaggcccagaugagcauccagcugaucaacaaggccgugaacgcccucaucaacgaccagcugaucaugaagaaccaccuccgggacaucauggggauccccuacugcaacuacuccaaguacugguaccucaaccacaccacgaccggccgcaccagccugcccaagugcuggcuggucuccaacggcagcuaccucaacgagacccacuucuccgacgacaucgagcagcaggccgacaacaugaucacggagaugcugcagaaggaguacauggagcggcaggggaagacgccccugggccugguggaccucuucguguucagcaccuccuucuaccugaucagcaucuuccugcaccucgucaagaucccgacccaccgccacaucguggggaaguccugccccaagccccaccggcugaaccacaugggcaucugcagcugcgggcuguacaagcagcccggcgugccggucaaguggaagcgcugaggacuaguuauaagacugacuagcccgaugggccucccaacgggcccuccuccccuccuugcaccgagauuaaucaaaggcucuuuucagagccaccaaaaaaaaaaaaaaaaaaaaaaaaaaaaaaaaaaaaaaaaaaaaaaaaaaaaaaaaaaaaaaaaaaaaaaaaaaaaaaaaaaaaaaaaaaaaaaaaaaaaa

SEQ ID NO: 37990 - RNA, 1686 nt, Artificial Sequence
  mRNA product Design i-3 (hSL-A100) comprising derived and/or modified sequence from LASV(LP;Clade I)__AAF86701__GPCmut10 (opt1)
aggagaaagcuuaccaugggccagaucaucaccuucuuccaggaggugccccacgucaucgaggaggugaugaacaucgugcugaucgcccucagccugcuggccauccucaaggggcuguacaacaucgcgaccugcggcaucaucgggcuggucgccuuccucuuccugugcggcaaguccugcagccugacgcucaagggcggguacgagcugcagacccuggagcucaacauggagacccugaacaugugcaugccgcuguccugcaccaagaacagcucccaccacuacauccgcgugggcaacgagacggggcucgagcugacccugaccaacaccagcaucaucaaccacaaguucugcaaccucuccgacgcccacaagaagaaccuguacgaccacgcccugaugagcaucaucuccacguuccaccucagcauccccaacuucaaccaguacgaggccauguccugcgacuucaacggcgggaagaucagcgugcaguacaaccugucccacagcuacgcgggcgacgccgccgagcacugcgggaccgucgccaacggcgugcugcagaccuucaugcggauggcguggggcgggcgcuacaucgcccucgacuccggcaaggggaacugggacugcaucaugaccagcuaccaguaccugaucauccagaacacgaccugggaggaccacugccaguucucccggcccagccccaucggcuaccugggccuccugucccagcgcacccgggacaucuacaucagccgccggcugcucgggaccuucacguggacccugagcgacuccgagggcaacgagacccccgggggcuacugccugacccgcuggaugcucaucgaggccgagcugaagugcuucgggaacacggccguggccaagugcaacgagaagcacgacgaggaguucugcgacaugcugcggcuguucgacuucugcaagcaggcgauccgccggcugaaggccgaggcccagaugagcauccagcugaucaacaaggccgucaacgcccucaucaacgaccagcugaucaugaagaaccaccuccgcgacaucaugggcauccccuacugcaacuacuccaaguacugguaccucaaccacaccagcuccggccggaccagccugcccaagugcuggcugaucuccaacgggagcuaccucaacgagacccaguucuccgacgacaucgagcagcaggcggacaacaugaucacggagaugcugcagaaggaguacaucgagcgccagggcaagaccccgcuggggcugguggacaucuucaucuucagcaccuccuucuaccucaucagcaucuuccugcaccugaucaagaucccgacccaccggcacaucgugggcaagcccugccccaagccccaccgccucaaccacaugggggucugcuccugcggccuguacaagcacccgggcgugcccacgaaguggaagcggugaggacuaguuauaagacugacuagcccgaugggccucccaacgggcccuccuccccuccuugcaccgagauuaaucaaaggcucuuuucagagccaccaaaaaaaaaaaaaaaaaaaaaaaaaaaaaaaaaaaaaaaaaaaaaaaaaaaaaaaaaaaaaaaaaaaaaaaaaaaaaaaaaaaaaaaaaaaaaaaaaaaaa

SEQ ID NO: 37991 - RNA, 1686 nt, Artificial Sequence
  mRNA product Design i-3 (hSL-A100) comprising derived and/or modified sequence from LASV(803213;Clade II)__AAF86703__GPCmut10 (opt1)
aggagaaagcuuaccaugggccagaucaucaccuucuuccaggaggugccccacgucaucgaggaggugaugaacaucgugcugaucgcccucagccugcuggccauccucaaggggaucuacaacgucgcgaccugcggccuguucgggcugaucuccuuccuccugcugugcggccgcagcugcuccgugacguacaaggggguguacgagcuccagacccuggagcugaacauggccaaccucaacaugugcaugccgcugagcugcaccaagaacaacucccaccacuacaucauggucggcaacgagaccggccuggagcucacgcugaccaacaccagcaucaucaaccacaaguucugcaaccuguccgacgcccacaagaagaaccucuacgaccacgcccugaugagcaucaucuccaccuuccaccugagcauccccaacuucaaccaguacgaggccauguccugcgacuucaacgggggcaagaucagcgugcaguacaaccucucccacagcuucgcgguggacgccgccaaccacugcgggacgaucgccaacggcguccugcagaccuucaugcggauggcguggggcggguccuacaucgcccuggacagcggcaaggggaacugggacugcaucaugaccuccuaccaguaccucaucauccagaacaccacgugggaggaccacugccaguucagccgccccucccccaucggcuaccuggggcugcucagccagcggacccgcgacaucuacaucagccggcgccugcugggcaccuucaccuggacgcucuccgacagcgagggcaacgaggcccccgggggcuacugccugacccgguggaugcugaucgaggccgagcucaagugcuucgggaacaccgccguggcgaagugcaacgagaagcacgacgaggaguucugcgacaugcugcgccuguucgacuucugcaagcaggccaucaagcggcucaagaccgaggcccagauguccauccagcugaucaacaaggccgugaacgcccugaucaacgaccagcucaucaugaagaaccaccuccgcgacaucaugggcauccccuacugcaacuacagccgguacugguaccugaaccacacggucaccgggaagaccucccugccccgcugcuggcuggugagcaacggcuccuaccugaacgagacccacuucagcgacgacaucgagcagcaggcggacaacaugaucacggagaugcuccagaaggaguacauggaccggcagggcaagaccccgcuggggcugguggaccuguucgucuucuccaccagcuucuaccucaucuccaucuuccugcaccuggugaagaucccgacccaccgccacaucgugggcaagcccugccccaagccccaccggcucaaccacauggggaucugcagcugcggccuguacaagcacccggggguccccgugaaguggaagcgcugaggacuaguuauaagacugacuagcccgaugggccucccaacgggcccuccuccccuccuugcaccgagauuaaucaaaggcucuuuucagagccaccaaaaaaaaaaaaaaaaaaaaaaaaaaaaaaaaaaaaaaaaaaaaaaaaaaaaaaaaaaaaaaaaaaaaaaaaaaaaaaaaaaaaaaaaaaaaaaaaaaaaa

SEQ ID NO: 37992 - RNA, 1686 nt, Artificial Sequence
  mRNA product Design i-3 (hSL-A100) comprising derived and/or modified sequence from LASV(GA391;Clade III)__CAA36645__GPCmut10 (opt1)
aggagaaagcuuaccaugggccagaucgugaccuucuuccaggaggucccccacgugaucgaggaggugaugaacaucguccugaucgcccucagcauccuggccauccugaaggggcucuacaacguggcgaccugcggccugaucgggcuggugaccuuccuccugcuguccggccgcagcugcucccucaucuacaaggggaccuacgagcugcagacccuggagcucaacauggagacccugaacaugugcaugccgcugagcugcacgaagaacaacucccaccacuacauccgggucggcaacgagaccggccucgagcugacccugaccaacacgagcauccucaaccacaaguucugcaaccuguccgacgcccacaagcgcaaccuguacgaccacagccucauguccaucaucagcaccuuccaccuguccauccccaacuucaaccaguacgaggccaugagcugcgacuucaacgggggcaagaucaccgugcaguacaaccugucccacagcuucgccguggacgccgcggggcacugcggcacccucgccaacgggguccugcagacguucaugcggauggccuggggcggcuccuacaucgcccuggacagcgggcgcggcaacugggacugcaucaugaccuccuaccaguaccucaucauccagaacaccaccugggacgaccacugccaguucagccggcccucccccaucggguaccugggccugcucagccagcgcacgcgggacaucuacaucagccgccggcugcugggcaccuucaccuggacccucuccgacagcgaggggaacgagacgccgggcggguacugccugacccgcuggaugcugaucgaggcggagcucaagugcuucggcaacaccgccguggccaagugcaacgagaagcacgacgaggaguucugcgacaugcugcggcuguucgacuucugcaagcaggccauccgccggcucaagaccgaggcccagauguccauccagcugaucaacaaggcggugaacgcccugaucaacgaccagcucaucaugaagaaccaccuccgcgacaucauggggauccccuacugcaacuacagccgguacugguaccugaaccacacguccaccggcaagaccagccugccccgcugcuggcugaucuccaacggcagcuaccugaacgagaccaaguucuccgacgacaucgagcagcaggccgacaacaugaucacggagaugcugcagaaggaguacaucgaccggcaggggaagacgccccucggccuggucgaccuguucguguucagcaccuccuucuaccucaucagcaucuuccugcaccuggugaagaucccgacccaccgccacaucgucgggaagcccugccccaagccccaccggcucaaccacaugggcaucugcuccugcgggcuguacaagcagccgggcgugcccgugcgcuggaagcggugaggacuaguuauaagacugacuagcccgaugggccucccaacgggcccuccuccccuccuugcaccgagauuaaucaaaggcucuuuucagagccaccaaaaaaaaaaaaaaaaaaaaaaaaaaaaaaaaaaaaaaaaaaaaaaaaaaaaaaaaaaaaaaaaaaaaaaaaaaaaaaaaaaaaaaaaaaaaaaaaaaaaa

SEQ ID NO: 37993 - RNA, 1689 nt, Artificial Sequence
  mRNA product Design i-3 (hSL-A100) comprising derived and/or modified sequence from LASV(AV;Clade V)__CCA30314__GPCmut10 (opt1)
aggagaaagcuuaccaugggccagaucgugaccuucuuccaggaggucccccacgugaucgaggaggugaugaacaucguccugaucgcccucagcauccuggccgugcugaaggggcucuacaacaucgcgaccugcggccugaucgggcugaucacguuccuccugcugugcggccgcuccugcagcuccaaccucuacaaggggguguacgagcugcagagccuggaccucaacauggagacccugaacaugugcaugccgcuguccugcaccaagaacaacagccaccacuacauccgggucggcaacgacaccggccucgagcugacgcugaccaacaccuccauccucaaccacaaguucugcaaccugagcgacgcccacaagaaggaccuguacgaccacgcccucauguccaucaucagcaccuuccaccuguccauccccaacuucaaccaguacgaggccaugagcugcgacuucaacgggggcaagaucuccgugcaguacaaccugagccacuccuacgccaucgacgcggccaaccacugcgggacgguggccaacggcauccuccagaccuucaugcgcauggccuggggcgggagcuacaucgcgcuggacuccggccgggggaacugggacugcaucaugaccagcuaccaguaccugaucauccagaacaccacgugggagaaccacugccaguucucccgccccagccccaucggcuaccucgggcugcugagccagcggacccgcgacaucuacaucucccggcgccuccugggcaccuucaccuggacgcugagcgacuccgagggcaacgccacccccgggggcuacugccucacccgguggaugcugaucgaggccgagcugaagugcuucgggaacaccgccgucgccaagugcaacgagaagcacgacgaggaguucugcgacaugcuccgccuguucgacuucugcaagcaggcgaucagccggcugaaguccgaggcccagaugagcauccagcucaucaacaaggccgugaacgcccugaucaacgaccagcugaucaugaagaaccaccuccgcgacaucaugggcauccccuacugcaacuacuccaaguacugguaccugaaccacacgaucaccgggaagaccagccugcccaagugcuggcucguguccaacggcagcuaccugaacgagacccacuucuccgacgacaucgagcagcaggccgacaacaugaucacggagaugcugcagaaggaguacauggagcggcagggcaagaccccgcuggggcucgucgaccuguucguguucagcaccuccuucuaccugaucagcaucuuccuccgccuggugaagaucccgacccaccggcacaucgucggcaagcccugccccaagccccaccgccugaaccacauggggaucugcuccugcggccucuacaagcagccgggggugcccgugcgguggaagcgcugaggacuaguuauaagacugacuagcccgaugggccucccaacgggcccuccuccccuccuugcaccgagauuaaucaaaggcucuuuucagagccaccaaaaaaaaaaaaaaaaaaaaaaaaaaaaaaaaaaaaaaaaaaaaaaaaaaaaaaaaaaaaaaaaaaaaaaaaaaaaaaaaaaaaaaaaaaaaaaaaaaaaa

SEQ ID NO: 37994 - RNA, 1686 nt, Artificial Sequence
  mRNA product Design i-3 (hSL-A100) comprising derived and/or modified sequence from LASV(Togo/2016/7082;Clade VI)__AMR44577__GPCmut10 (opt1)
aggagaaagcuuaccaugggccagaucaucaccuucuuccaggaggugccccacgucaucgaggaggugaugaacaucgugcugaucgcccucagccugcuggccauccucaagggggucuacaacguggcgaccugcggcaucaucgggcuggugacguuccuguuccucugcggccgcuccugcagccugaucuacaagggguccuacgagcugcagacccucgagcugaacauggagacccugaacaugugcaugccgcucagcugcaccaagaacuccagccaccacuacauccgggucggcaacgagacgggccuggagcugacccucaccaacaccuccaucaucaaccacaaguucugcaaccugagcgacgcccacaagcgcaaccuguacgaccacgcccucauguccauccugagcacguuccaccuguccauccccaacuucaaccaguacgaggccaugagcugcgacuucaacgggggcaagaucuccgugcaguacaaccucagccacgccuacgcgguggacgccgccgagcacugcgggaccgucgccaacggcgugcugcagaccuucaugcggauggcguggggcggguccuacaucgcccuggacagcggccgcgggaacugggacugcaucaugaccuccuaccaguaccucaucauccagaacacgaccugggaggaccacugccaguucagccggcccucccccaucggcuaccuggggcugcucagccagcgcacccgggacaucuacaucagccgccggcugcugggcaccuucacguggacccucuccgacagcgagggcaacgagacccccgggggcuacugccugacccgcuggaugcugaucgaggccgagcucaagugcuucgggaacacggccguggccaagugcaacgagaagcacgacgaggaguucugcgacaugcugcggcuguucgacuucugcaagcaggcgauccagcgccucaaguccgaggcccagaugagcauccagcugaucaacaaggccgucaacgcccugaucaacgaccagcucaucaugaagaaccaccuccgggacaugaugggcauccccuacugcaacuacuccaaguacugguaccugaaccacaccagcuccgggcgcaccagccugcccaagugcuggcugguguccaacggcagcuaccugaacgagacccacuucuccgacgacaucgagcagcaggccgacaacaugaucacggagaugcuccagaaggaguacaucgaccggcagggcaagaccccgcuggggcugguggaccuguucgucuucagcaccuccuucuaccucaucagcaucuuccugcaccugaucaagaucccgacccaccgccacaucgugggcaagcccugccccaagccccaccggcucaaccacauggggaucugcuccugcggccuguacaagcagccgggggugcccacgcgcuggaagcggugaggacuaguuauaagacugacuagcccgaugggccucccaacgggcccuccuccccuccuugcaccgagauuaaucaaaggcucuuuucagagccaccaaaaaaaaaaaaaaaaaaaaaaaaaaaaaaaaaaaaaaaaaaaaaaaaaaaaaaaaaaaaaaaaaaaaaaaaaaaaaaaaaaaaaaaaaaaaaaaaaaaaa

SEQ ID NO: 37995 - RNA, 1686 nt, Artificial Sequence
  mRNA product Design i-3 (hSL-A100) comprising derived and/or modified sequence from LASV(KAK-428;Clade n.d. (VII))__ANH09740__GPCmut10 (opt1)
aggagaaagcuuaccaugggccagaucgugaccuucuuccaggaggucccccacgugaucgaggaggugaugaacaucguccugaucgcccucagccugcuggccauccucaaggggcuguacaacuucgcgaccugcggcgugaucgggcugaucacguuccuccugcugugcggccgcuccugcagcgccaccuacaaggggcaguacgagcuccagacccuggagcugaacauggagucccucaacaugugcaugccgcugagcugcaccaagaacaacucccaccacuacauccgggccggcaacaacacgggccuggagcucacccugaccaacaccagcaucaucucccacaaguucugcaaccugagcgacgcccacaagaagaaccucuacgaccacacgcugauguccaucaucaccaccuuccaccugagcauccccaacuucaaccaguacgaggccauguccugcgacuucaacgggggcaagaucagcauccaguacaaccucucccacagcuacgcgggggacgccgcccagcacugcggcaccguggccaacgggguccugcagacguucaugcgcauggcguggggcggcuccuaccuggcccucgacagcgggcggcgcggcugggacugcaucaucuccagcuaccaguaccugaucauccagaacaccaccugggacgaccacugccaguucucccggcccagccccaucggguaccugggcuucgugagccagaagacccgcgacaucuacaucucccggcgccuccugggcacguucaccuggacccugagcgacuccgaggggcacgacaugccgggcggguacugccucacccgguggaugcugaucgaggccgaccugaagugcuucggcaacacggccguggccaagugcaacgagaagcacgacgaggaguucugcgacauguggcgccucuucgacuucugcaagcaggcgauccagcggcugaaggccgaggcccagaugaacauccagcugaucaacaaggccgucaacgcccucaucaacgaccagcugaugaugaagaaccaccuccgcgacaucauggggauccccuacugcaacuacagcaaguucugguaccugaacaacaccaccaccggccggacgucccugccccgcugcuggcugaucagcaacggcuccuaccucaacgagacccacuucagcgacgacaucgagcagcaggcggacaacaugaucaccgagaugcugcagaaggaguacauggaccggcaggggaagacgccccugggccucguggaccuguucguguucuccaccagcuucuaccugaucaccaucuuccugcaccucgucaagaucccgacccaccgccacaucguggggaagcccugccccaagccccaccggcugaaccacaugggcaucugcuccugcgggcuguacaagcagccgggcgugcccguccgcuggaagcggugaggacuaguuauaagacugacuagcccgaugggccucccaacgggcccuccuccccuccuugcaccgagauuaaucaaaggcucuuuucagagccaccaaaaaaaaaaaaaaaaaaaaaaaaaaaaaaaaaaaaaaaaaaaaaaaaaaaaaaaaaaaaaaaaaaaaaaaaaaaaaaaaaaaaaaaaaaaaaaaaaaaaa

SEQ ID NO: 37996 - RNA, 1686 nt, Artificial Sequence; identical to SEQ ID NO: 37990
  mRNA product Design i-3 (hSL-A100) comprising derived and/or modified sequence from LASV(Pinneo-NIG-1969;Clade I)__AIT17836__GPCmut10 (opt1)

SEQ ID NO: 37997 - RNA, 1686 nt, Artificial Sequence
  mRNA product Design i-3 (hSL-A100) comprising derived and/or modified sequence from LASV(ISTH0009-NIG-2011;Clade II)__AIT17404__GPCmut10 (opt1)
aggagaaagcuuaccaugggccagaucaucaccuucuuccaggaggugccccacgucaucgaggaggugaugaacaucgugcugaucgcccucagccugcuggccauccucaaggggaucuacaacgucgcgaccugcggccuguucgggcugguguccuuccuccugcugugcggccgcagcugcuccacgaccuacaaggggguguacgagcuccagacccuggagcuggacauggccagccucaacaugugcaugccgcuguccugcaccaagaacaacagccaccacuacaucauggucggcaacgagacgggccuggagcucacccugaccaacaccuccaucaucaaccacaaguucugcaaccugagcgacgcccacaagaagaaccucuacgaccacgcccugauguccaucaucagcacguuccaccuguccauccccaacuucaaccaguacgaggccaugagcugcgacuucaacgggggcaagaucuccgugcaguacaaccucagccacgcguacgccguggacgccgccaaccacugcgggaccaucgcgaacggcguccugcagaccuucaugcggauggccuggggcggguccuacaucgcccuggacagcggcaagggguccugggacugcaucaugaccagcuaccaguaccucaucauccagaacacgaccugggaggaccacugccaguucucccgccccagccccaucggcuaccuggggcugcucagccagcggacccgcgacaucuacaucucccggcgccugcugggcaccuucacguggacccucagcgacuccgagggcaacgagacccccgggggcuacugccugacccgguggaugcugaucgaggccgagcucaagugcuucgggaacacggccguggcgaagugcaacgagaagcacgacgaggaguucugcgacaugcugcgccuguucgacuucugcaagcaggccauccggcgccucaagaccgaggcccagaugagcauccagcugaucaacaaggccgugaacgcccugaucaacgaccagcucaucaugaagaaccaccuccgggacaucaugggcauccccuacugcaacuacuccaaguacugguaccugaaccacaccgucaccgggaagacgagccugccccgcugcuggcugguguccaacggcagcuaccugaacgagacccacuucuccgacgacaucgagcagcaggcggacaacaugaucaccgagcuccugcagaaggaguacauggaccggcagggcaagaccccgcuggggcugguggaccucuucgucuucagcacguccuucuaccugaucagcaucuuccugcaccucaucaagaucccgacccaccgccacaucaccggcaagcccugccccaagccccaccggcugaaccacauggggaucugcuccugcggccuguacaagcacccgggggugcccgugaaguggaagcgcugaggacuaguuauaagacugacuagcccgaugggccucccaacgggcccuccuccccuccuugcaccgagauuaaucaaaggcucuuuucagagccaccaaaaaaaaaaaaaaaaaaaaaaaaaaaaaaaaaaaaaaaaaaaaaaaaaaaaaaaaaaaaaaaaaaaaaaaaaaaaaaaaaaaaaaaaaaaaaaaaaaaaa

SEQ ID NO: 37998 - RNA, 1686 nt, Artificial Sequence
  mRNA product Design i-3 (hSL-A100) comprising derived and/or modified sequence from LASV(ISTH2010-NIG-2012;Clade II)__AIT17482__GPCmut10 (opt1)
aggagaaagcuuaccaugggccagaucaucaccuucuuccaggaggugccccacgucaucgaggaggugaugaacaucgugcugaucgcccucagccugcuggccauccucaaggggaucuacaacgucgcgaccugcggccuguucgggcugguguccuuccuccugcugugcggccgcagcugcuccacgaccuacaaggggguguacgagcuccagacccuggagcuggacauggccagccucaacaugugcaugccgcuguccugcaccaagaacaacagccaccacuacaucauggucggcaacgagacgggccuggagcucacccugaccaacaccuccaucaucaaccacaaguucugcaaccugagcgacgcccacaagaagaaccucuacgaccacgcccugauguccaucaucagcacguuccaccuguccauccccaacuucaaccaguacgaggccaugagcugcgacuucaacgggggcaagaucuccgugcaguacaaccucagccacgcguacgccguggacgccgccaaccacugcgggaccaucgcgaacggcguccugcagaccuucaugcggauggccuggggcggguccuacaucgcccuggacagcggcaagggguccugggacugcaucaugaccagcuaccaguaccucaucauccagaacaucacgugggaggaccacugccaguucucccgccccagccccaucggcuaccuggggcugcucagccagcggacccgcgacaucuacaucucccggcgccugcugggcaccuucaccuggacgcucagcgacuccgagggcaacgagacccccgggggcuacugccugacccgguggaugcugaucgaggccgagcucaagugcuucgggaacaccgccguggcgaagugcaacgagaagcacgacgaggaguucugcgacaugcugcgccuguucgacuucugcaagcaggccauccggcgccucaagacggaggcccagaugagcauccagcugaucaacaaggccgugaacgcccugaucaacgaccagcucaucaugaagaaccaccuccgggacaucaugggcauccccuacugcaacuacuccaaguacugguaccugaaccacaccgucaccgggaagaccagccugccccgcugcuggcugguguccaacggcagcuaccugaacgagacgcacuucuccgacgacaucgagcagcaggcggacaacaugaucaccgagcuccugcagaaggaguacaucgaccggcagggcaagaccccgcuggggcugguggaccucuucgucuucagcaccuccuucuaccugaucagcaucuuccugcaccucgugaagaucccgacgcaccgccacguggucggcaagcccugccccaagccccaccggcugaaccacauggggaucugcuccugcggccuguacaagcacccgggggugcccgugaaguggaagcgcugaggacuaguuauaagacugacuagcccgaugggccucccaacgggcccuccuccccuccuugcaccgagauuaaucaaaggcucuuuucagagccaccaaaaaaaaaaaaaaaaaaaaaaaaaaaaaaaaaaaaaaaaaaaaaaaaaaaaaaaaaaaaaaaaaaaaaaaaaaaaaaaaaaaaaaaaaaaaaaaaaaaaa

SEQ ID NO: 37999 - RNA, 1686 nt, Artificial Sequence
  mRNA product Design i-3 (hSL-A100) comprising derived and/or modified sequence from LASV(Lassa virus/H.sapiens-wt/NGA/2015/ISTH_0543;Clade II)__AVO03639__GPCmut10 (opt1)
aggagaaagcuuaccaugggccagaucaucaccuucuuccaggaggugccccacgucaucgaggaggugaugaacaucgugcugaucgcccucagccugcuggccauccucaaggggaucuacaacgucgcgaccugcggccuguucgggcugguguccuuccuccugcugugcggccgcagcugcuccacgaccuacaaggggguguacgagcuccagacccuggagcuggacauggccaaccucaacaugugcaugccgcugagcugcaccaagaacaacucccaccacuacaucauggucggcaacgagacgggccuggagcucacccugaccaacaccagcaucaucaaccacaaguucugcaaccuguccgacgcccacaagaagaaccucuacgaccacgcccugaugagcaucaucuccacguuccaccugagcauccccaacuucaaccaguacgaggccauguccugcgacuucaacgggggcaagaucagcgugcaguacaaccucucccacaccuacgcgguggacgccgccaaccacugcgggaccaucgccaacggcguccugcagaccuucaugcggauggcguggggcgggagcuacaucgcccuggacuccggcaaggggagcugggacugcaucaugacguccuaccaguaccucgugauccagaacaccaccugggaggaccacugccaguucagccgccccucccccaucggcuaccuggggcugcucagccagcggacccgcgacaucuacaucagccggcgccugcugggcacguucaccuggacccucuccgacagcgagggcaacgagacccccgggggcuacugccugacgcgguggaugcugaucgaggccgagcucaagugcuucgggaacaccgccguggccaagugcaacgagaagcacgacgaggaguucugcgacaugcugcgccuguucgacuucugcaagcaggcgauccggcgccucaagaccgaggcccagauguccauccagcugaucaacaaggccgucaacgcccugaucaacgaccagcucaucaugaagaaccaccuccgggacaucaugggcaucccguacugcaacuacagcaaguacugguaccugaaccacaccgugacggggaagaccucccugccccgcugcuggcuggugagcaacggcuccuaccugaacgagacccacuucagcgacgacaucgagcagcaggccgacaacaugaucaccgagcuccugcagaaggaguacaucgaccggcagggcaagacgccccuggggcuggucgaccucuucguguucuccaccagcuucuaccugaucuccaucuuccugcaccucgugaagaucccgacccaccgccacaucaccggcaagcccugccccaagccccaccggcugaaccacauggggaucugcagcugcggccuguacaagcacccggggguccccgugaaguggaagcgcugaggacuaguuauaagacugacuagcccgaugggccucccaacgggcccuccuccccuccuugcaccgagauuaaucaaaggcucuuuucagagccaccaaaaaaaaaaaaaaaaaaaaaaaaaaaaaaaaaaaaaaaaaaaaaaaaaaaaaaaaaaaaaaaaaaaaaaaaaaaaaaaaaaaaaaaaaaaaaaaaaaaaa

SEQ ID NO: 38000 - RNA, 1686 nt, Artificial Sequence
  mRNA product Design i-3 (hSL-A100) comprising derived and/or modified sequence from LASV(Lassa virus/H.sapiens-wt/NGA/2016/ISTH_0009;Clade II)__AVO03571__GPCmut10 (opt1)
aggagaaagcuuaccaugggccagaucaucaccuucuuccaggaggugccccacgucaucgaggaggugaugaacaucgugcugaucgcccucagccugcuggccauccucaaggggaucuacaacgucgcgaccugcggccugcuggggcucguguccuuccugcugcucugcggccgcagcugcuccacgaccuacaaggggguguacgagcugcagacccuggagcucgacauggccagccugaacaugugcaugccgcuguccugcaccaagaacaacagccaccacuacaucauggucggcaacgagacgggccucgagcugacccugaccaacaccuccaucaucaaccacaaguucugcaaccucagcgacgcccacaagaagaaccuguacgaccacgcccugauguccaucaucagcacguuccaccucuccauccccaacuucaaccaguacgaggccaugagcugcgacuucaacgggggccggaucuccgugcaguacaaccugagccacuccuacgcgguggacgccgccaaccacugcgggaccaucgccaacggcguccugcagaccuucaugcgcauggcguggggcgggagcuacaucgcccucgacuccggcaaggggagcugggacugcaucaugaccuccuaccaguaccugaucauccagaacacgaccugggaggaccacugccaguucagccggcccagccccaucggcuaccuggggcuccugucccagcgcacccgggacaucuacaucagccgccggcugcucggcaccuucacguggacccuguccgacagcgagggcaacgagacccccgggggcuacugccugacccgcuggaugcucaucgaggccgagcugaagugcuucgggaacacggccguggccaagugcaacgagaagcacgacgaggaguucugcgacaugcugcggcuguucgacuucugcaagcaggcgauccgccggcugaagaccgaggcccagauguccauccagcugaucaacaaggccgugaacgcccucaucaacgaccagcugaucaugaagaaccaccuccgcgacaucaugggcauccccuacugcaacuacagcaaguacugguaccucaaccacaccgucaccgggaagacgucccugccccggugcuggcuggugagcaacggcuccuaccucaacgagacccacuucagcgacgacaucgagcagcaggccgacaacaugaucaccgagcugcugcagaaggaguacaucgaccgccagggcaagaccccgcuggggcucguggaccuguucgucuucuccacgagcuucuaccugaucuccaucuuccuccaccuggugaagaucccgacccaccggcacaucaccggcaagcccugccccaagccccaccgccugaaccacauggggaucugcagcugcggccucuacaaccacccgggggugcccgucaaguggaagcggugaggacuaguuauaagacugacuagcccgaugggccucccaacgggcccuccuccccuccuugcaccgagauuaaucaaaggcucuuuucagagccaccaaaaaaaaaaaaaaaaaaaaaaaaaaaaaaaaaaaaaaaaaaaaaaaaaaaaaaaaaaaaaaaaaaaaaaaaaaaaaaaaaaaaaaaaaaaaaaaaaaaaa

SEQ ID NO: 38001 - RNA, 1686 nt, Artificial Sequence
  mRNA product Design i-3 (hSL-A100) comprising derived and/or modified sequence from LASV(Lassa virus/H.sapiens-wt/NGA/2016/ISTH_0017;Clade II)__AVO03567__GPCmut10 (opt1)
aggagaaagcuuaccaugggccagaucaucaccuucuuccaggaggugccccacgucaucgaggaggugaugaacaucgugcugaucgcccucagccugcuggccauccucaaggggaucuacaacgucgcgaccugcggccuguucgggcugguguccuuccuccugcugugcggccgcagcugcuccacgaccuacaaggggguguacgagcuccagacccuggagcuggacauggccagccucaacaugugcaugccgcuguccugcaccaagaacaacagccaccacuacaucauggucggcaacgagacgggccuggagcucacccugaccaacaccuccaucaucaaccacaaguucugcaaccugagcgacgcccacaagaagaaccucuacgaccacgcccugauguccaucaucagcacguuccaccuguccauccccaacuucaaccaguacgaggccaugagcugcgacuucaacgggggcaagaucuccgugcaguacaaccucagccacaccuacgcgaucgacgccgccaaccacugcgggaccaucgccaacggcgugcugcagaccuucaugcggauggcguggggcggguccuacaucgcccuggacagcggcaagggguccugggacugcaucaugacgagcuaccaguaccucaucauccagaacaccaccugggaggaccacugccaguucucccgccccagccccaucggcuaccuggggcugcucagccagcggacccgcgacaucuacaucucccggcgccugcugggcacguucaccuggacccucagcgacuccgagggcaacgagacccccgggggcuacugccugacgcgguggaugcugaucgaggccgagcucaagugcuucgggaacaccgccgucgccaagugcaacgagaagcacgacgaggaguucugcgacaugcugcgccuguucgacuucugcaagcaggcgauccggcgccucaagaccgaggcccagaugagcauccagcugaucaacaaggccgugaacgcccugaucaacgaccagcucaucaugaagaaccaccuccgggacaucaugggcaucccguacugcaacuacuccaaguacugguaccugaaccacaccgugacggggaagaccagccugccccgcugcuggcuggucuccaacggcagcuaccugaacgagacccacuucuccgacgacaucgagcagcaggccgacaacaugaucaccgagcuccugcagaaggaguacauggaccggcagggcaagacgccccuggggcugguggaccucuucguguucagcaccuccuucuaccugaucagcaucuuccugcaccucguccgcaucccgacccaccggcacgugaucggcaagcccugccccaagccccaccgccugaaccacauggggaucugcuccugcggccuguacaagcacccgggggugcccgucaaguggaagcggugaggacuaguuauaagacugacuagcccgaugggccucccaacgggcccuccuccccuccuugcaccgagauuaaucaaaggcucuuuucagagccaccaaaaaaaaaaaaaaaaaaaaaaaaaaaaaaaaaaaaaaaaaaaaaaaaaaaaaaaaaaaaaaaaaaaaaaaaaaaaaaaaaaaaaaaaaaaaaaaaaaaaa

SEQ ID NO: 38002 - RNA, 1686 nt, Artificial Sequence
  mRNA product Design i-3 (hSL-A100) comprising derived and/or modified sequence from LASV(Lassa virus/H.sapiens-wt/NGA/2018/ISTH_0959;Clade II)__AVV65099__GPCmut10 (opt1)
aggagaaagcuuaccaugggccagaucaucaccuucuuccaggaggugccccacgucaucgaggaggugaugaacaucgugcugaucgcccucagccugcuggccauccucaaggggaucuacaacgucgugaccugcggccuguucgggcugguguccuuccuccugcugugcggccgcagcugcuccacgaccuacaagggggucuacgagcuccagacccuggagcuggacauggcgagccucaacaugugcaugccgcuguccugcaccaagaacaacagccaccacuacaucauggugggcaacgagacgggccuggagcucacccugaccaacaccuccaucaucaaccacaaguucugcaaccugagcgacgcccacaagaagaaccucuacgaccacgcccugauguccaucaucagcacguuccaccuguccauccccaacuucaaccaguacgaggccaugagcugcgacuucaacgggggcaagaucuccgugcaguacaaccucagccacgccuacgcgaucgacgccgccaaccacugcgggaccaucgccaacggcguccugcagaccuucaugcggauggcguggggcggguccuacaucgcccuggacagcggcaagggguccugggacugcaucaugaccagcuaccaguaccucaucauccagaacacgaccugggaggaccacugccaguucucccgccccagccccaucggcuaccuggggcugcucagccagcggacccgcgacaucuacaucucccggcgccugcugggcaccuucacguggacccucagcgacuccgagggcaacgagacccccgggggcuacugccugacccgguggaugcugaucgaggccgagcucaagugcuucgggaacacggccguggccaagugcaacgagaagcacgacgaggaguucugcgacaugcugcgccuguucgacuucugcaagcaggcgauccggcgccucaagaccgaggcccagaugagcauccagcugaucaacaaggccgugaacgcccugaucaacgaccagcucaucaugaagaaccaccuccgggacaucaugggcauccccuacugcaacuacuccaaguacugguaccugaaccacaccgucaccgggaagacgagccugccccgcugcuggcugguguccaacggcagcuaccugaacgagacccacuucuccgacgacaucgagcagcaggccgacaacaugaucaccgagcuccugcagaaggaguacaucgaccggcagggcaagaccccgcuggggcugguggaccucuucgucuucagcacguccuucuaccugaucagcaucuuccugcaccucgugaagaucccgacccaccgccacgugaucggcaagcccugccccaagccccaccggcugaaccacauggggaucugcuccugcggccuguacaagcacccggggguccccgugaaguggaagcgcugaggacuaguuauaagacugacuagcccgaugggccucccaacgggcccuccuccccuccuugcaccgagauuaaucaaaggcucuuuucagagccaccaaaaaaaaaaaaaaaaaaaaaaaaaaaaaaaaaaaaaaaaaaaaaaaaaaaaaaaaaaaaaaaaaaaaaaaaaaaaaaaaaaaaaaaaaaaaaaaaaaaaa

SEQ ID NO: 38003 - RNA, 1686 nt, Artificial Sequence
  mRNA product Design i-3 (hSL-A100) comprising derived and/or modified sequence from LASV(LASV003-NIG-2008;Clade II)__AIT17580__GPCmut10 (opt1)
aggagaaagcuuaccaugggccagaucaucaccuucuuccaggaggugccccacgucaucgaggaggugaugaacaucgugcugaucgcccucagccugcuggccauccucaaggggaucuacaacgucgcgaccugcggccuguucgggcugguguccuuccuccugcugugcggccgcagcugcuccacgaccuacaaggggguguacgagcuccagacccuggagcuggacauggccagccucaacaugugcaugccgcuguccugcaccaagaacaacagccaccacuacaucauggucggcaacgagacgggccuggagcucacccugaccaacaccuccaucaucaaccacaaguucugcaaccugagcgacgcccacaagaagaaccucuacgaccacgcccugauguccaucaucagcacguuccaccuguccauccccaacuucaaccaguacgaggccaugagcugcgacuucaacgggggcaagaucuccgugcaguacaaccucagccacaccuacgcgguggacgccgccaaccacugcgggaccaucgccaacggcguccugcagaccuucaugcggauggcguggggcggguccuacaucgcccuggacagcggcaagggguccugggacugcaucaugacgagcuaccaguaccucaucauccagaacaccaccugggaggaccacugccaguucucccgccccagccccaucggcuaccuggggcugcucagccagcggacccgcgacaucuacaucucccggcgccugcugggcacguucaccuggacccucagcgacuccgagagcaacgagaccccgggcggguacugccugacgcgguggaugcugaucgaggccgagcucaagugcuucggcaacaccgccguggccaagugcaacgagaagcacgacgaggaguucugcgacaugcugcgccuguucgacuucugcaagcaggcgauccggcgccucaaggccgaggcccagauguccauccagcugaucaacaaggccgugaacgcccugaucaacgaccagcucaucaugaagaaccaccuccgggacaucauggggauccccuacugcaacuacagcaaguacugguaccugaaccacaccgucaccggccgcacgucccugccccggugcuggcuggugagcaacggguccuaccugaacgagacccacuucagcgacgacaucgagcagcaggcggacaacaugaucaccgagcuccugcagaaggaguacauggaccgccagggcaagacgccccugggccugguggaccucuucgucuucuccaccagcuucuaccugaucuccaucuuccugcaccucgugaagaucccgacccaccggcacgugaucgggaagcccugccccaagccccaccgccugaaccacaugggcaucugcagcugcgggcuguacaagcacccgggcguccccgugaaguggaagcggugaggacuaguuauaagacugacuagcccgaugggccucccaacgggcccuccuccccuccuugcaccgagauuaaucaaaggcucuuuucagagccaccaaaaaaaaaaaaaaaaaaaaaaaaaaaaaaaaaaaaaaaaaaaaaaaaaaaaaaaaaaaaaaaaaaaaaaaaaaaaaaaaaaaaaaaaaaaaaaaaaaaaa

SEQ ID NO: 38004 - RNA, 1686 nt, Artificial Sequence
  mRNA product Design i-3 (hSL-A100) comprising derived and/or modified sequence from LASV(LASV035-NIG-2009;Clade II)__AIT17588__GPCmut10 (opt1)
aggagaaagcuuaccaugggccagaucaucaccuucuuccaggaggugccccacgucaucgaggaggugaugaacaucgugcugaucgcccucagccugcuggccauccucaaggggaucuacaacgucgcgaccugcggccuguucgggcugguguccuuccuccugcugugcggccgcagcugcuccacgaccuacaaggggguguacgagcuccagacccuggagcuggacauggccagccucaacaugugcaugccgcuguccugcaccaagaacaacagccaccacuacaucauggucggcaacgagacgggccuggagcucacccugaccaacaccuccaucaucaaccacaaguucugcaaccugagcgacgcccacaagaagaaccucuacgaccacgcccugauguccaucaucagcacguuccaccuguccauccccaacuucaaccaguacgaggccaugagcugcgacuucaacgggggcaagaucuccgugcaguacaaccucagccacgcguacgccguggacgccgccaaccacugcgggaccaucgcgaacggcguccugcagaccuucaugcggauggccuggggcggguccuacaucgcccuggacagcggcaagggguccugggacugcaucaugaccagcuaccaguaccucaucauccagaacacgaccugggaggaccacugccaguucucccgccccagccccaucggcuaccuggggcugcucagccagcggacccgcgacaucuacaucucccggcgccugcugggcaccuucacguggacccucagcgacuccgagggcaacgagacccccgggggcuacugccugacccgguggaugcugaucgaggccgagcucaagugcuucgggaacacggccguggcgaagugcaacgagaagcacgacgaggaguucugcgacaugcugcgccuguucgacuucugcaagcaggccauccggcgccucaaggccgaggcccagaugagcauccagcugaucaacaaggccgugaacgcgcugaucaacgaccagcucaucaugaagaaccaccuccgggacaucaugggcauccccuacugcaacuacuccaaguacugguaccugaaccacaccgucaccgggaagaccagccugccccgcugcuggcugguguccaacggcagcuaccugaacgagacgcacuucuccgacgacaucgagcagcaggccgacaacaugaucaccgagcuccugcagaaggaguacaucgaccggcagggcaagaccccgcuggggcugguggaccucuucgucuucagcaccuccuucuaccugaucagcaucuuccugcaccucgugaagaucccgacgcaccgccacgugaucggcaagcccugccccaagccccaccggcugaaccacauggggaucugcuccugcggccuguacaagcacccggggguccccgugaaguggaagcgcugaggacuaguuauaagacugacuagcccgaugggccucccaacgggcccuccuccccuccuugcaccgagauuaaucaaaggcucuuuucagagccaccaaaaaaaaaaaaaaaaaaaaaaaaaaaaaaaaaaaaaaaaaaaaaaaaaaaaaaaaaaaaaaaaaaaaaaaaaaaaaaaaaaaaaaaaaaaaaaaaaaaaa

SEQ ID NO: 38005 - RNA, 1686 nt, Artificial Sequence
  mRNA product Design i-3 (hSL-A100) comprising derived and/or modified sequence from LASV(LASV1000-NIG-2009;Clade II)__AIT17782__GPCmut10 (opt1)
aggagaaagcuuaccaugggccagaucaucaccuucuuccaggaggugccccacgucaucgaggaggugaugaacaucgugcugaucgcccucagccugcuggccauccucaaggggaucuacaacgucgcgaccugcggccuguucgggcugguguccuuccuccugcugugcggccgcagcugcuccacgaccuacaaggggguguacgagcuccagacccuggagcuggacauggccagccucaacaugugcaugccgcuguccugcaccaagaacaacagccaccacuacaucauggucggcaacgagacgggccuggagcucacccugaccaacaccuccaucaucaaccacaaguucugcaaccugagcgacgcccacaagaagaaccucuacgaccacgcccugauguccaucaucagcacguuccaccuguccauccccaacuucaaccaguacgaggccaugagcugcgacuucaacgggggcaagaucuccgugcaguacaaccucagccacaccuacgcgguggacgccgccaaccacugcgggaccaucgccaacggcguccugcagaccuucaugcggauggcguggggcggguccuacaucgcccuggacagcggcaagggguccugggacugcaucaugacgagcuaccaguaccucaucauccagaacaccaccugggaggaccacugccaguucucccgccccagccccaucggcuaccuggggcugcucagccagcggacccgcgacaucuacaucucccggcgccugcugggcacguucaccuggacccucagcgacuccgagggcaacgagacccccgggggcuacugccugacgcgguggaugcugaucgaggccgagcucaagugcuucgggaacaccgccguggccaagugcaacgagaagcacgacgaggaguucugcgacaugcugcgccuguucgacuucugcaagcaggcgaucaagcggcucaagaccgaggcccagaugagcauccagcugaucaacaaggccgugaacgcccugaucaacgaccagcucaucaugaagaaccaccuccgcgacaucaugggcaucccguacugcaacuacuccaaguacugguaccugaaccacaccgucacggggaagaccagccugccccggugcuggcugguguccaacggcagcuaccugaacgagacccacuucuccgacgacaucgagcagcaggccgacaacaugaucaccgagcuccugcagaaggaguacaucgaccgccagggcaagacgccccuggggcugguggaccucuucgucuucagcaccuccuucuaccugaucagcaucuuccugcaccucgugaagaucccgacccaccggcacguggucggcaagcccugccccaagccccaccgccugaaccacauggggaucugcuccugcggccuguacaagcacccgggggugcccgugaaguggaagcggugaggacuaguuauaagacugacuagcccgaugggccucccaacgggcccuccuccccuccuugcaccgagauuaaucaaaggcucuuuucagagccaccaaaaaaaaaaaaaaaaaaaaaaaaaaaaaaaaaaaaaaaaaaaaaaaaaaaaaaaaaaaaaaaaaaaaaaaaaaaaaaaaaaaaaaaaaaaaaaaaaaaaa

SEQ ID NO: 38006 - RNA, 1686 nt, Artificial Sequence
  mRNA product Design i-3 (hSL-A100) comprising derived and/or modified sequence from LASV(LASV221-NIG-2010;Clade II)__AIT17624__GPCmut10 (opt1)
aggagaaagcuuaccaugggccagaucaucaccuucuuccaggaggugccccacgucaucgaggaggugaugaacaucgugcugaucgcccucagccugcuggccauccucaaggggaucuacaacgucgcgaccugcggccuguucgggcugguguccuuccuccugcugugcggccgcagcugcuccacgaccuacaaggggguguacgagcuccagacccuggagcuggacauggccagccucaacaugugcaugccgcuguccugcaccaagaacaacagccaccacuacaucauggucggcaacgagacgggccuggagcucacccugaccaacaccuccaucaucaaccacaaguucugcaaccugagcgacgcccacaagaagaaccucuacgaccacgcccugauguccaucaucagcacguuccaccuguccauccccaacuucaaccaguacgaggccaugagcugcgacuucaacgggggcaagaucuccgugcaguacaaccucagccacaccuacgcgaucgacgccgccaaccacugcgggaccaucgccaacggcgugcugcagaccuucaugcggauggcguggggcggguccuacaucgcccuggacagcggcaagggguccugggacugcaucaugacgagcuaccaguaccucaucauccagaacaccaccugggaggaccacugccaguucucccgccccagccccaucggcuaccuggggcugcucagccagcggacccgcgacaucuacaucucccggcgccugcugggcacguucaccuggacccucagcgacuccgagggcaacgagacccccgggggcuacugccugacgcgguggaugcugaucgaggccgagcucaagugcuucgggaacaccgccgucgccaagugcaacgagaagcacgacgaggaguucugcgacaugcugcgccuguucgacuucugcaagcaggcgauccggcgccucaagaccgaggcccagaugagcauccagcugaucaacaaggccgugaacgcccugaucaacgaccagcucaucaugaagaaccaccuccgggacaucaugggcaucccguacugcaacuacuccaaguacugguaccugaaccacaccgugacggggaagaccagccugccccgcugcuggcuggucuccaacggcagcuaccugaacgagacccacuucuccgacgacaucgagcagcaggccgacaacaugaucaccgagaugcuccagaaggaguacauggaccggcagggcaagacgccccuggggcugguggaccuguucguguucagcaccuccuucuaccucaucagcaucuuccugcaccuggucaagaucccgacccaccgccacgugaucggcaagcccugccccaagccccaccggcucaaccacauggggaucugcuccugcggccuguacaagcacccgggggugcccgucaaguggaagcgcugaggacuaguuauaagacugacuagcccgaugggccucccaacgggcccuccuccccuccuugcaccgagauuaaucaaaggcucuuuucagagccaccaaaaaaaaaaaaaaaaaaaaaaaaaaaaaaaaaaaaaaaaaaaaaaaaaaaaaaaaaaaaaaaaaaaaaaaaaaaaaaaaaaaaaaaaaaaaaaaaaaaaa

SEQ ID NO: 38007 - RNA, 1686 nt, Artificial Sequence
  mRNA product Design i-3 (hSL-A100) comprising derived and/or modified sequence from LASV(LASV237-NIG-2010;Clade II)__AIT17638__GPCmut10 (opt1)
aggagaaagcuuaccaugggccagaucaucaccuucuuccaggaggugccccacgucaucgaggaggugaugaacaucgugcugaucgcccucagccugcuggccauccucaaggggaucuacaacgucgcgaccugcggccuguucgggcugguguccuuccuccugcugugcggccgcagcugcuccacgaccuacaaggggguguacgagcuccagacccuggagcuggacauggccagccucaacaugugcaugccgcuguccugcaccaagaacaacagccaccacuacaucauggucggcaacgagacgggccuggagcucacccugaccaacaccuccaucaucaaccacaaguucugcaaccugagcgacgcccacaagaaggaccucuacgaccacgcccugauguccaucaucagcacguuccaccuguccauccccaacuucaaccaguacgaggccaugagcugcgacuucaacgggggcaagaucuccgugcaguacaaccucagccacaccuacgcgguggacgccgccaaccacugcgggaccaucgccaacggcguccugcagaccuucaugcggauggcguggggcggguccuacaucgcccuggacagcggcaagggguccugggacugcaucaugacgagcuaccaguaccucaucauccagaacaccaccugggaggaccacugccaguucucccgccccagccccaucggcuaccuggggcugcucagccagcggacccgcgacaucuacaucucccggcgccugcugggcacguucaccuggacccucagcgacuccgagggcaacgagacccccgggggcuacugccugacgcgguggaugcugaucgaggccgagcucaagugcuucgggaacaccgccguggccaagugcaacgagaagcacgacgaggaguucugcgacaugcugcgccuguucgacuucugcaagcaggcgauccggcgccucaagaccgaggcccagaugagcauccagcugaucaacaaggccgugaacgcccugaucaacgaccagcucaucaugaagaaccaccuccgggacaucaugggcaucccguacugcaacuacuccaaguacugguaccugaaccacaccgucacggggaagaccagccugccccgcugcuggcugguguccaacggcagcuaccugaacgagacccacuucuccgacgacaucgagcagcaggccgacaacaugaucaccgagcuccugcagaaggaguacauggaccggcagggcaagacgccccuggggcugguggaccucuucgucuucagcaccuccuucuaccugaucagcaucuuccugcaccucaucaagaucccgacccaccgccacaucaccggcaagcccugccccaagccccaccggcugaaccacauggggaucugcuccugcggccuguacaagcacccgggggugcccgugaaguggaagcgcugaggacuaguuauaagacugacuagcccgaugggccucccaacgggcccuccuccccuccuugcaccgagauuaaucaaaggcucuuuucagagccaccaaaaaaaaaaaaaaaaaaaaaaaaaaaaaaaaaaaaaaaaaaaaaaaaaaaaaaaaaaaaaaaaaaaaaaaaaaaaaaaaaaaaaaaaaaaaaaaaaaaaa

SEQ ID NO: 38008 - RNA, 1686 nt, Artificial Sequence
  mRNA product Design i-3 (hSL-A100) comprising derived and/or modified sequence from LASV(LASV253-NIG-2011;Clade II)__AIT17670__GPCmut10 (opt1)
aggagaaagcuuaccaugggccagaucaucaccuucuuccaggaggugccccacgucaucgaggaggugaugaacaucgugcugaucgcccucagccugcuggccauccucaaggggaucuacaacgucgcgaccugcggccuguucgggcugguguccuuccuccugcugugcggccgcagcugcuccacgaccuacaaggggguguacgagcuccagacccuggagcuggacauggccagccucaacaugugcaugccgcuguccugcaccaagaacaacagccaccacuacaucauggucggcaacgagacgggccuggagcucacccugaccaacaccuccaucaucaaccacaaguucugcaaccugagcgacgcccacaagaagaaccucuacgaccacgcccugauguccaucaucagcacguuccaccuguccauccccaacuucaaccaguacgaggccaugagcugcgacuucaacgggggcaagaucuccgugcaguacaaccucagccacaccuacgcgguggacgccgccaaccacugcgggaccaucgccaacggcguccugcagaccuucaugcggauggcguggggcggguccuacaucgcccuggacagcggcaagggguccugggacugcaucaugacgagcuaccaguaccucaucauccagaacaccaccugggaggaccacugccaguucucccgccccagccccaucggcuaccuggggcugcucagccagcggacccgcgacaucuacaucucccggcgccugcugggcacguucaccuggacccucagcgacuccgagggcaacgagacccccgggggcuacugccugacgcgguggaugcugaucgaggccgagcucaagugcuucgggaacaccgccguggccaagugcaacgagaagcacgacgaggaguucugcgacaugcugcgccuguucgacuucugcaagcaggcgauccggcgccucaaggccgaggcccagaugagcauccagcugaucaacaaggccgugaacgcccugaucaacgaccagcucaucaugaagaaccaccuccgggacaucaugggcauccccuacugcaacuacuccaaguacugguaccugaaccacaccgucaccgggcgcacgagccugccccggugcuggcugguguccaacggcagcuaccugaacgagacccacuucuccgacgacaucgagcagcaggcggacaacaugaucaccgagcuccugcagaaggaguacaucgaccgccagggcaagaccccgcuggggcugguggaccucuucgucuucagcacguccuucuaccugaucagcaucuuccugcaccucgugaagaucccgacccaccggcacaucaucggcaagcccugccccaagccccaccgccugaaccacauggggaucugcuccugcggccuguacaagcacccgggggugcccgucaaguggaagcggugaggacuaguuauaagacugacuagcccgaugggccucccaacgggcccuccuccccuccuugcaccgagauuaaucaaaggcucuuuucagagccaccaaaaaaaaaaaaaaaaaaaaaaaaaaaaaaaaaaaaaaaaaaaaaaaaaaaaaaaaaaaaaaaaaaaaaaaaaaaaaaaaaaaaaaaaaaaaaaaaaaaaa

SEQ ID NO: 38009 - RNA, 1686 nt, Artificial Sequence
  mRNA product Design i-3 (hSL-A100) comprising derived and/or modified sequence from LASV(LASV254-NIG-2011;Clade II)__AIT17674__GPCmut10 (opt1)
aggagaaagcuuaccaugggccagaucaucaccuucuuccaggaggugccccacgucaucgaggaggugaugaacaucgugcugaucgcccucagccugcuggccauccucaaggggaucuacaacgucgcgaccugcggccuguucgggcugguguccuuccuccugcugugcggccgcagcugcuccacgaccuacaaggggguguacgagcuccagacccuggagcuggacaugaccaaccucaacaugugcaugccgcugagcugcacgaagaacaacucccaccacuacaucauggucggcaacgagaccggccuggagcucacccugaccaacacgagcaucaucaaccacaaguucugcaaccuguccgacgcccacaagaagaaccucuacaaccacgcccugaugagcaucaucuccaccuuccaccugagcauccccaacuucaaccaguacgaggccauguccugcgacuucaacgggggcaagaucagcgugcaguacaaccucucccacagcuacgccguggacgcggccaaccacugcgggaccaucgccaacggcguccugcagaccuucaugcggauggccuggggcggguccuacaucgcgcuggacagcggcaaggggaacugggacugcaucaugacguccuaccaguaccucaucauccagaacaccaccugggaggaccacugccaguucagccgccccucccccaucggcuaccuggggcugcucagccagcggacccgcgacaucuacaucagccggcgccugcugggcacguucaccuggacccucuccgacagcgagggcaacgagacccccgggggcuacugccugacgcgguggaugcugaucgaggccgagcucaagugcuucgggaacaccgccguggccaagugcaacgagaagcacgacgaggaguucugcgacaugcugcgccuguucgacuucugcaagcaggccauccggcgccucaagaccgaggcgcaggccaacauccagcugaucaacaaggccgugaacgcccugaucaacgaccagcucaucaugaagaaccaccuccgggacaucaugggcaucccguacugcaacuacuccaaguacugguaccugaaccacaccgucacggggaagaccagccugccccgcugcuggcugguguccaacggcagcuaccugaacgagacccacuucuccgacgacaucgagcagcaggccgacaacaugaucaccgagcuccugcagaaggaguacauggaccggcagggcaagacgccccuggggcugguggaccucuucgucuucagcaccuccuucuaccugaucagcaucuuccugcaccucgugaagaucccgacccaccgccacgugaucggcaagcccugccccaagccccaccggcugaaccacauggggaucugcuccugcggccuguacaagcacccggggguccccgugaaguggaagcgcugaggacuaguuauaagacugacuagcccgaugggccucccaacgggcccuccuccccuccuugcaccgagauuaaucaaaggcucuuuucagagccaccaaaaaaaaaaaaaaaaaaaaaaaaaaaaaaaaaaaaaaaaaaaaaaaaaaaaaaaaaaaaaaaaaaaaaaaaaaaaaaaaaaaaaaaaaaaaaaaaaaaaa

SEQ ID NO: 38010 - RNA, 1686 nt, Artificial Sequence
  mRNA product Design i-3 (hSL-A100) comprising derived and/or modified sequence from LASV(Nig08-A19;Clade III)__ADU56618__GPCmut10 (opt1)
aggagaaagcuuaccaugggccagaucgugaccuucuuccaggaggucccccacgugaucgaggaggugaugaacaucguccugaucgcccucagcauccuggccauccugaaggggcucuacaacaucgcgaccugcggccugaucgggcuggugacguuccuccugcuguccggccgcagcugcuccaugaccuacaaggggguguacgagcuccagacccuggagcugaacaugaacacccucaacaugugcaugccgcugagcugcacgaagaacaacucccaccacuacaucauggucggcaacgagaccggccuggagcucacccugaccaacacgagccugcuccaccacaaguucugcaaccuguccgacgcccacaagaagaaccuguacgaccacacccucaugagcaucaucuccaccuuccaccugagcauccccaacuucaaccaguacgaggccauguccugcgacuucaacgggggcaagaucaccgugcaguacaaccugagccacuccuacgccaucgacgccgcgaaccacugcgggacgguggccaacggcguccuccagaccuucaugcggauggccuggggcgggagcuacaucgcccuggacuccggccgcgggaagugggacugcaucaugaccagcuaccaguaccugaucauccagaacaccacgugggaggaccacugccaguucucccggcccagccccaucggcuaccucgggcugcugucccagcgcacccgggacaucuacaucagccgccggcuccugggcaccuucaccuggacgcugagcgacuccgagggcaacgagacccccgggggcuacugccucacccgcuggaugcugaucgaggcggagcugaagugcuucgggaacaccgccguggccaagugcaacgagaagcacgacgaggaguucugcgacaugcuccggcuguucgacuucugcaagcaggccauccgccggcugaaggccgaggcgcagaugagcauccagcucaucaacaaggccgugaacgcccugaucaacgaccagcugaucaugaagaaccaccuccgcgacaucaugggcauccccuacugcaacuacuccaaguacugguaccugaaccacacgagcaccgggcggaccucccugccccgcugcuggcucgucagcaacggcuccuaccugaacgagacccacuucagcgacgacaucgagcagcaggccgacaacaugaucacggagaugcugcagaaggaguaccuggaccggcagggcaagaccccgcucgggcugguggaccuguucguguucuccaccagcuucuaccucaucuccaucuuccugcaccuggucaagaucccgacccaccgccacaucgugggcaagcccugccccaagccccaccggcucaaccacauggggaucugcagcugcggccuguacaagcagccgggggugcccguccgcuggaagcggugaggacuaguuauaagacugacuagcccgaugggccucccaacgggcccuccuccccuccuugcaccgagauuaaucaaaggcucuuuucagagccaccaaaaaaaaaaaaaaaaaaaaaaaaaaaaaaaaaaaaaaaaaaaaaaaaaaaaaaaaaaaaaaaaaaaaaaaaaaaaaaaaaaaaaaaaaaaaaaaaaaaaa

SEQ ID NO: 38011 - RNA, 1689 nt, Artificial Sequence
  mRNA product Design i-3 (hSL-A100) comprising derived and/or modified sequence from LASV(G1180-SLE-2010;Clade IV)__AIT17168__GPCmut10 (opt1)
aggagaaagcuuaccaugggccagaucgugaccuucuuccaggaggucccccacgugaucgaggaggugaugaacaucguccugaucgcccucagcauccuggccgugcugaaggggcucuacaacuucgcgaccugcggccugguggggcugcucacguuccugcugcucugcggccgcuccugcaccgccagccgguacaagggggucuacgagcugcagacccuggagcucaacauggagacccugaacaugugcaugccgcuguccugcacgaagaacaacagccaccacuacaucauggugggcaacgagaccggccucgagcugacccugaccaacacguccaucaucaaccacaaguucugcaaccucagcgacgcccacaagaagaaccuguacgaccacgcccugauguccaucaucagcaccuuccaccucuccauccccaacuucaaccaguacgaggccaugagcugcgacuucaacgggggcaagaucuccgugcaguacaaccugagccacuccuacgcgggggacgccgccaaccacugcggcaccgucgccaacggggugcugcagaccuucaugcgcauggcguggggcggcagcuacaucgcccucgacuccgggcacggcagcugggacugcaucaugacguccuaccaguaccugaucauccagaacaccaccugggaggaccacugccaguucagccggcccucccccaucggguaccugggccuccugagccagcgcacccgggacaucuacaucagccgccggcugcucggcacguucaccuggacccuguccgacagcgaggggaaggacaccccgggcggguacugccugacgcgcuggaugcucaucgaggccgagcugaagugcuucggcaacaccgccguggccaagugcaacgagaagcacgacgaggaguucugcgacaugcugcggcuguucgacuucugcaagcaggcgauccagcgccugaaggccgaggcccagauguccauccagcugaucaacaaggccgucaacgcccucaucaacgaccagcugaucaugaagaaccaccuccgggacaucauggggauccccuacugcaacuacagcaaguacugguaccucaaccacaccaccacgggcaagaccucccugcccaagugcuggcuggugagcaacggcuccuaccucaacgagacccacuucagcgacgacaucgagcagcaggcggacaacaugaucaccgagaugcugcagaaggaguacauggagcgccaggggaagacgccccugggccugguggaccucuucgucuucuccaccagcuucuaccugaucuccaucuuccugcaccucgugaagaucccgacccaccggcacaucgugggcaagagcugccccaagccccaccgccugaaccacauggggaucugcuccugcgggcuguacaagcagcccggcgucccggugaaguggaagcggugaggacuaguuauaagacugacuagcccgaugggccucccaacgggcccuccuccccuccuugcaccgagauuaaucaaaggcucuuuucagagccaccaaaaaaaaaaaaaaaaaaaaaaaaaaaaaaaaaaaaaaaaaaaaaaaaaaaaaaaaaaaaaaaaaaaaaaaaaaaaaaaaaaaaaaaaaaaaaaaaaaaaa

SEQ ID NO: 38012 - RNA, 1689 nt, Artificial Sequence
  mRNA product Design i-3 (hSL-A100) comprising derived and/or modified sequence from LASV(G1442-SLE-2011;Clade IV)__AIT17180__GPCmut10 (opt1)
aggagaaagcuuaccaugggccagaucgugaccuucuuccaggaggucccccacgugaucgaggaggugaugaacaucguccugaucgcccucagcauccuggccgugcugaaggggcucuacaacguggcgaccugcggccugaucgggcuggucaccuuccuccugcugugcggccgcuccugcaccaccacccucuacaaggggguguacgagcugcagacgcuggagcucaacauggagacccugaacaugugcaugccgcugagcugcaccaagaacaacucccaccacuacauccgggugggcaacgagaccggccucgagcugacgcugaccaacaccagcaucaucaaccacaaguucugcaaccucuccgacgcccacaagaagaaccuguacgaccacgcccugaugagcaucaucuccaccuuccaccucagcauccccaacuucaaccaguacgaggccauguccugcgacuucaacgggggcaagaucagcguccaguacaaccugucccacagcuacgccggggacgcggccaaccacugcggcacgguggccaacggggugcugcagaccuucaugcgcauggccuggggcggcuccuacaucgcgcucgacagcgggcggggcaacugggacugcaucaugaccuccuaccaguaccugaucauccagaacaccacgugggacgaccacugccaguucagccgccccucccccaucggguaccugggccuccugagccagcggacccgcgacgucuacaucucccggcgccugcucggcaccuucaccuggacgcugagcgacagcgaggggaaggacaccccgggcggguacugccugacccgguggaugcucaucgaggccgagcugaagugcuucggcaacaccgccguggccaagugcaacgagaagcacgacgaggaguucugcgacaugcugcgccucuucgacuucugcaagcaggccauccagcggcugaaggcggaggcccagauguccauccagcugaucaacaaggccgugaacgcccucaucaacgaccagcugaucaugaagaaccaccuccgcgacaucauggggauccccuacugcaacuacagcaaguacugguaccugaacaacacggccaccggcaagaccucccugcccaagugcuggcugaucagcaacggcuccuaccucaacgagacccacuucagcgacgacaucgagcaggaggcggacaacaugaucacggagaugcugcagaaggaguacauggagcggcaggggaagacgccccugggccuggucgaccucuucguguucuccaccagcuucuaccugaucuccaucuuccugcaccucgugaagaucccgacccaccgccacaucgucggcaagagcugccccaagccccaccggcugaaccacauggggaucugcuccugcgggcuguacaagcagcccggcgugccggugcgcuggaagcggugaggacuaguuauaagacugacuagcccgaugggccucccaacgggcccuccuccccuccuugcaccgagauuaaucaaaggcucuuuucagagccaccaaaaaaaaaaaaaaaaaaaaaaaaaaaaaaaaaaaaaaaaaaaaaaaaaaaaaaaaaaaaaaaaaaaaaaaaaaaaaaaaaaaaaaaaaaaaaaaaaaaaa

SEQ ID NO: 38013 - RNA, 1689 nt, Artificial Sequence
  mRNA product Design i-3 (hSL-A100) comprising derived and/or modified sequence from LASV(G3010-SLE-2013;Clade IV)__AIT17344__GPCmut10 (opt1)
aggagaaagcuuaccaugggccagaucgugaccuucuuccaggaggucccccacgugaucgaggaggugaugaacaucguccugaucgcccucagcauccuggccgugcugaaggggcucuacaacuucgcgaccugcggccugguggggcuggucacguuccuccugcugugcggccgcuccugcaccaccagccucuacaaggggguguacgagcugcagacccuggagcucaacauggagacgcugaacaugugcaugccgcuguccugcaccaagaacaacagccaccacuacaucauggugggcaacgagaccggccucgagcugacccugacgaacaccuccaucaucaaccacaaguucugcaaccucagcgacgcccacaagaagaaccuguacaaccacgcccugauguccaucaucagcaccuuccaccucuccauccccaacuucaaccaguacgaggccaugagcugcgacuucaacgggggcaagaucuccguccaguacaaccugagccacuccuacgccggggacgcggccagccacugcggcaccguggccaacggggugcugcagacguucaugcggauggccuggggcggcuccuacaucgcgcucgacagcggguacggcaagugggacugcaucaugaccuccuaccaguaccugaucauccagaacaccaccugggaggaccacugccaguucagccgccccucccccaucggguaccugggccuccugagccagcggacgcgcgacaucuacaucagccggcgccugcucggcaccuucaccuggacccuguccgacagcgaggggaaggacacgccgggcggguacugccugacccgguggaugcucaucgaggccgagcugaagugcuucggcaacaccgccgucgccaagugcaacgagaagcacgacgaggaguucugcgacaugcugcgccucuucgacuucugcaagcaggccauccagcggcugaagaccgaggcgcagauguccauccagcugaucaacaaggccgugaacgcccucaucaacgaccagcugaucaugaagaaccaccuccgcgacaucauggggauccccuacugcaacuacagcaaguacugguaccugaaccacacgaccaccggcaagaccucccugcccaagugcuggcuggugagcaacggcuccuaccucaacgagacgcacuucagcgacgacaucgagcagcaggccgacaacaugaucaccgagaugcugcagaaggaguacauggagcggcaggggaagacgccccugggccuggucgaccucuucguguucuccaccagcuucuaccugaucuccaucuuccugcaccucgugaagaucccgacccaccgccacaucgucggcaagagcugccccaagccccaccggcugaaccacauggggaucugcuccugcgggcuguacaagcagcccggcgugccggugcgcuggaagcggugaggacuaguuauaagacugacuagcccgaugggccucccaacgggcccuccuccccuccuugcaccgagauuaaucaaaggcucuuuucagagccaccaaaaaaaaaaaaaaaaaaaaaaaaaaaaaaaaaaaaaaaaaaaaaaaaaaaaaaaaaaaaaaaaaaaaaaaaaaaaaaaaaaaaaaaaaaaaaaaaaaaaa

SEQ ID NO: 38014 - RNA, 1689 nt, Artificial Sequence
  mRNA product Design i-3 (hSL-A100) comprising derived and/or modified sequence from LASV(G502-SLE-2009;Clade IV)__AIT17126__GPCmut10 (opt1)
aggagaaagcuuaccaugggccagaucgugaccuucuuccaggaggucccccacgugaucgaggaggugaugaacaucguccugaucgcccucagcauccuggccgugcugaaggggcucuacaacuucgcgaccugcggccugguggggcugcucacguuccugcugcucugcggccgcuccugcaccaccgggcuguacaagggcgucuacgagcugcagacccucgagcugaacauggagacgcugaacaugugcaugccgcucagcugcaccaagaacaacucccaccacuacaucauggugggcaacgagaccgggcuggagcugacccucacgaacaccagcaucaucaaccacaaguucugcaaccuguccgacgcccacaagaagaaccuguacgaccacgcccucaugagcaucaucuccaccuuccaccugagcauccccaacuucaaccaguacgaggccauguccugcgacuucaacggcgggaagaucagcgugcaguacaaccugucccacagcuacgccggcgacgcggccgaccacugcgggaccgucgccaacggcgugcuccagacguucaugcggauggccuggggcggguccuacaucgcgcuggacagcggccgcgggcggugggacugcaucaugaccuccuaccaguaccugaucauccagaacaccaccugggaggaccacugccaguucagccgccccucccccaucggcuaccucggccugcugagccagcggacgcgcgacaucuacaucucccggcgccuccuggggaccuucaccuggacccugagcgacagcgagggcaaggacacgcccgggggcuacugccucacccgguggaugcugaucgaggccgagcugaagugcuucgggaacaccgccguggccaagugcaacgagaagcacgacgaggaguucugcgacaugcuccgccuguucgacuucugcaagcaggccauccagcggcugaaggcggaggcccagauguccauccagcucaucaacaaggccgucaacgcccugaucaacgaccagcuggugaugaagaaccaccuccgcgacaucaugggcauccccuacugcaacuacagccgguacugguaccugaaccacaccacgaccggccgcaccucccugcccaagugcuggcucgugagcaacggguccuaccugaacgagacccacuucagcgacgacaucgagcagcaggccgacaacaugaucacggagaugcugcagaaggaguacauggagcggcagggcaagaccccgcuggggcucgucgaccuguucguguucuccaccagcuucuaccugaucuccaucuuccuccaccuggugaagaucccgacccaccgccacaucgucggcaagagcugccccaagccccaccggcugaaccacauggggaucugcuccugcggccucuacaagcagcccggcgugccggugaaguggaagcgcugaggacuaguuauaagacugacuagcccgaugggccucccaacgggcccuccuccccuccuugcaccgagauuaaucaaaggcucuuuucagagccaccaaaaaaaaaaaaaaaaaaaaaaaaaaaaaaaaaaaaaaaaaaaaaaaaaaaaaaaaaaaaaaaaaaaaaaaaaaaaaaaaaaaaaaaaaaaaaaaaaaaaa

SEQ ID NO: 38015 - RNA, 1689 nt, Artificial Sequence
  mRNA product Design i-3 (hSL-A100) comprising derived and/or modified sequence from LASV(G733-SLE-2010;Clade IV)__AIT17154__GPCmut10 (opt1)
aggagaaagcuuaccaugggccagaucgugaccuucuuccaggaggucccccacgugaucgaggaggugaugaacaucguccugaucgcccucagcauccuggccgugcugaaggggcucuacaacuucgcgaccugcggcaucguggggcuggucuccuuccugcuccugugcggccgcagcugcacgaccucccuguacaaggggguguacgagcuccagacccuggagcugaacauggagacccucaacaugugcaugccgcugagcugcacgaagaacaacucccaccacuacaucauggugggcaacgagaccggccuggagcucacccugaccaacacgagcaucaucaaccacaaguucugcaaccuguccgacgcccacaagaagaaccucuacgaccacgcccugaugagcaucaucuccaccuuccaccugagcauccccaacuucaaccaguacgaggccauguccugcgacuucaacgggggcaagaucagcguccaguacaaccucucccacagcuacgccggggacgcggccaaccacugcggcaccaucgccaacggggugcugcagaccuucaugcggauggccuggggcggcuccuacaucgcgcuggacagcgggcgcgaccggugggacugcaucaugacguccuaccaguaccucaucauccagaacaccaccugggaggaccacugccaguucagccgccccucccccaucggcuaccuggggcugcucagccagcggacccgcgacaucuacaucagccggcgccugcugggcacguucaccuggacccucuccgacagcgagggcaaggacacccccgggggcuacugccugacgcgguggaugcugaucgaggccgagcucaagugcuucgggaacaccgccguggccaagugcaacgagaagcacgacgaggaguucugcgacaugcugcgccuguucgacuucugcaagcaggccauccagcggcucaaggcggaggcccagauguccauccagcugaucaacaaggccgucaacgcccugaucaacgaccagcucaucaugaagaaccaccuccgcgacaucaugggcaucccguacugcaacuacagcaaguacugguaccugaaccacaccaccacggggaagaccucccugcccaagugcuggcuggugagcaacggcuccuaccugaacgagacccacuucagcgacgacaucgagcagcaggccgacaacaugaucaccgagaugcuccagaaggaguacauggagcggcagggcaagacgccccuggggcugguggaccuguucgucuucuccaccagcuucuaccucaucuccaucuuccugcaccuggugaagaucccgacccaccgccacguggucggcaagagcugccccaagccccaccggcucaaccacauggggaucugcuccugcggccuguacgggcagcccggcgugccggugaaguggaagcgcugaggacuaguuauaagacugacuagcccgaugggccucccaacgggcccuccuccccuccuugcaccgagauuaaucaaaggcucuuuucagagccaccaaaaaaaaaaaaaaaaaaaaaaaaaaaaaaaaaaaaaaaaaaaaaaaaaaaaaaaaaaaaaaaaaaaaaaaaaaaaaaaaaaaaaaaaaaaaaaaaaaaaa

SEQ ID NO: 38016 - RNA, 1689 nt, Artificial Sequence
  mRNA product Design i-3 (hSL-A100) comprising derived and/or modified sequence from MOPV/LASV reassortant(IGS-1;Clade IV)__AFY05576__GPCmut10 (opt1)
aggagaaagcuuaccaugggccagaucgugaccuucuuccaggaggucccccacgugaucgaggaggugaugaacaucguccugaucgcccucagcgugcuggccgugcugaaggggcucuacaacuucgcgaccugcggccuggucgggcuggugaccuuccuccugcugugcggccgcuccugcaccaccagccucuacaaggggguguacgagcugcagacccuggagcucaacauggagacgcugaacaugugcaugccgcuguccugcaccaagaacaacagccaccacuacaucauggucggcaacgagaccggccucgagcugacccugacgaacaccuccaucaucaaccacaaguucugcaaccucagcgacgcccacaagaagaaccuguacgaccacgcccugauguccaucaucagcaccuuccaccucuccauccccaacuucaaccaguacgaggccaugagcugcgacuucaacgggggcaagaucuccgugcaguacaaccugagccacuccuacgccggggacgcggccaaccacugcggcaccguggccaacgggguccugcagacguucaugcggauggccuggggcggcagcuacaucgcgcucgacuccgggcgcggcaacugggacugcaucaugaccagcuaccaguaccugaucauccagaacaccaccugggaggaccacugccaguucucccggcccagccccaucggguaccugggccuccugucccagcgcacgcgggacaucuacaucagccgccggcugcucggcaccuucaccuggacccugagcgacuccgagggggaggacacgccgggcggguacugccugacccgcuggaugcucaucgaggccgagcugaagugcuucggcaacaccgccguggccaagugcaacgagaagcacgacgaggaguucugcgacaugcugcggcuguucgacuucugcaagcaggccauccagcgccugaaggcggaggcccagaugagcauccagcugaucaacaaggccgugaacgcccucaucaacgaccagcugaucaugaagaaccaccuccgggacaucauggggauccccuacugcaacuacuccaaguacugguaccucaaccacaccacgaccggccgcaccagccugcccaagugcuggcuggucuccaacggcagcuaccucaacgagacccacuucuccgacgacaucgagcagcaggccgacaacaugaucacggagaugcugcagaaggaguacauggagcggcaggggaagacgccccugggccugguggaccucuucguguucagcaccuccuucuaccugaucagcaucuuccugcaccucgucaagaucccgacccaccgccacaucguggggaaguccugccccaagccccaccggcugaaccacaugggcaucugcagcugcgggcuguacaagcagcccggcgugccggucaaguggaagcgcugaggacuaguuauaagacugacuagcccgaugggccucccaacgggcccuccuccccuccuugcaccgagauuaaucaaaggcucuuuucagagccaccaaaaaaaaaaaaaaaaaaaaaaaaaaaaaaaaaaaaaaaaaaaaaaaaaaaaaaaaaaaaaaaaaaaaaaaaaaaaaaaaaaaaaaaaaaaaaaaaaaaaa

SEQ ID NO: 38017 - RNA, 1689 nt, Artificial Sequence
  mRNA product Design i-3 (hSL-A100) comprising derived and/or modified sequence from LASV(LM765-SLE-2012;Clade IV)__AIT17814__GPCmut10 (opt1)
aggagaaagcuuaccaugggccagaucgugaccuucuuccaggaggucccccacgugaucgaggaggugaugaacaucguccugaucgcccucagcauccuggccgugcugaaggggcucuacaacuucgcgaccugcggccugguggggcuggucacguuccuccugcugugcggccgcuccugcaccaccagccucuacaaggggguguacgagcugcagacccuggagcucaacauggagacgcugaacaugugcaugccgcuguccugcaccaagaacaacagccaccacuacaucauggugggcaacgagaccggccucgagcugacccugacgaacaccuccaucaucgaccacaaguucugcaaccucagcgacgcccaccggaagaaccuguacgaccacgcccugauguccaucaucagcaccuuccaccucuccauccccaacuucaaccaguacgaggccaugagcugcgacuucaacgggggcaagaucuccguccaguacaaccugagccacuccuacgccaaggacgcggccgaccacugcgggaccguggccaacggcgugcugcagacguucaugcgcauggccuggggcgggagcuacaucgcgcucgacuccggccgggggcgcugggacugcaucaugaccagcuaccaguaccugaucauccagaacaccaccugggaggaccacugccaguucucccggcccagccccaucggcuaccuggggcuccugucccagcgcacgcgggacaucuacaucagccgccggcugcucggcaccuucaccuggacccugagcgacuccgagggcaaggacacgcccgggggcuacugccugacccgcuggaugcucaucgaggccgagcugaagugcuucgggaacaccgccgucgccaagugcaacgagaagcacgacgaggaguucugcgacaugcugcggcuguucgacuucugcaagcaggccauccagcgccugaaggcggaggcccagaugagcauccagcugaucaacaaggccgugaacgcccucaucaacgaccagcugaucaugaagaaccaccuccgggacaucaugggcauccccuacugcaacuacuccaaguacugguaccucaaccacaccacgaccgggaagaccagccugcccaagugcuggcugguguccaacggcagcuaccucaacgagacccacuucuccgacgacaucgagcagcaggccgacaacaugaucacggagaugcugcagaaggaguacauggagcgccagggcaagaccccgcuggggcuggucgaccucuucguguucagcaccuccuucuaccugaucagcaucuuccugcaccucgugaagaucccgacccaccggcacaucgucggcaagcccugccccaagccccaccgccugaaccacauggggaucugcuccugcggccuguacaagcagccgggggugcccgugaaguggaagcggugaggacuaguuauaagacugacuagcccgaugggccucccaacgggcccuccuccccuccuugcaccgagauuaaucaaaggcucuuuucagagccaccaaaaaaaaaaaaaaaaaaaaaaaaaaaaaaaaaaaaaaaaaaaaaaaaaaaaaaaaaaaaaaaaaaaaaaaaaaaaaaaaaaaaaaaaaaaaaaaaaaaaa

SEQ ID NO: 38018 - RNA, 1689 nt, Artificial Sequence
  mRNA product Design i-3 (hSL-A100) comprising derived and/or modified sequence from LASV(LM776-SLE-2012;Clade IV)__AIT17824__GPCmut10 (opt1)
aggagaaagcuuaccaugggccagaucgugaccuucuuccaggaggucccccacgugaucgaggaggugaugaacaucguccugaucgcccucagcauccuggccgugcugaaggggcucuacaacuucgcgaccugcggccugguggggcuggucaccuuccuccugcugugcggccgcuccugcaccaccagcguguacaaggggguguacgagcuccagacccuggagcugaacauggagacgcucaacaugugcaugccgcuguccugcaccaagaacaacagccaccacuacaucauggucggcaacgagaccggccuggagcucacccugacgaacaccuccaucaucaaccacaaguucugcaaccugagcgacgcccacaagaagaaccucuacgaccacgcccugauguccaucaucagcaccuuccaccuguccauccccaacuucaaccaguacgaggccaugagcugcgacuucaacgggggcaagaucuccgugcaguacaaccucagccacuccuacgccggggacgcggccaaccacugcggcaccguggccaacgggguccugcagacguucaugcggauggccuggggcggcagcuacaucgcgcuggacuccgggcacggcaagugggacugcaucaugaccagcuaccaguaccucaucauccagaacaccaccugggaggaccacugccaguucucccgccccagccccaucggguaccugggccugcucucccagcggacgcgcgacaucuacaucagccggcgccugcugggcaccuucaccuggacccucagcgacuccgaggggaaggacacgccgggcggguacugccugacccgguggaugcugaucgaggccgagcucaagugcuucggcaacaccgccguggccaagugcaacgagaagcacgacgaggaguucugcgacaugcugcgccuguucgacuucugcaagcaggccauccagcggcucaaggcggaggcccagaugagcauccagcugaucaacaaggccgugaacgcccugaucaacgaccagcucaucaugaagaaccaccuccgcgacaucauggggauccccuacugcaacuacuccaaguacugguaccugaaccacaccacgaccggcaagaccagccugcccaagugcuggcuggucuccaacggcagcuaccugaacgagacccacuucuccgacgacaucgagcagcaggccgacaacaugaucacggagaugcuccagaaggaguacauggagcggcaggggaagacgccccugggccugguggaccuguucguguucagcaccuccuucuaccucaucagcaucuuccugcaccuggucaagaucccgacccaccgccacaucguggggaaguccugccccaagccccaccggcucaaccacaugggcaucugcagcugcgggcuguacaagcagcccggcgugccgguccgcuggaagcggugaggacuaguuauaagacugacuagcccgaugggccucccaacgggcccuccuccccuccuugcaccgagauuaaucaaaggcucuuuucagagccaccaaaaaaaaaaaaaaaaaaaaaaaaaaaaaaaaaaaaaaaaaaaaaaaaaaaaaaaaaaaaaaaaaaaaaaaaaaaaaaaaaaaaaaaaaaaaaaaaaaaaa

SEQ ID NO: 38019 - RNA, 1689 nt, Artificial Sequence
  mRNA product Design i-3 (hSL-A100) comprising derived and/or modified sequence from LASV(Mad39;Clade IV)__ANH09722__GPCmut10 (opt1)
aggagaaagcuuaccaugggccagaucgugaccuucuuccaggaggucccccacgugaucgaggaggugaugaacaucguccugaucgcccucagcauccuggccgugcugaaggggcucuacaacguggcgaccugcggccugaucgggcuggucacguuccuccugcugugcggccgcuccugcaccaccacccucuacaaggggguguacgagcugcaggcccuggagcucaacauggagacgcugaacaugugcaugccgcugagcugcaccaagaacaacucccaccacuacauccgggugggcaacgagaccggccucgagcugacccugacgaacaccagccucaucaaccacaaguucugcaaccuguccgacgcccacaagaagaaccuguacgaccacgcccucaugagcaucaucuccaccuuccaccugagcauccccaacuucaaccaguacgaggccauguccugcgacuucaacgacgggaagaucagcguccaguacaaccugucccacaccuacgcgggcgacacggccaaccacugcgggaccguggccaacggcgugcuccagaccuucaugcgcauggccuggggcgggagcuacaucgcgcuggacuccggccgcgggggcugggacugcaucaugaccagcuaccaguaccugaucauccagaacacgaccugggaggaccacugccaguucucccggcccagccccaucggguaccucggccugcugucccagcggacccgcgacaucuacaucagccggcgccuccugggcaccuucacguggacccuguccgacagcgaggggaaggacaccccgggcggguacugccucacccgguggaugcugaucgaggccgagcugaagugcuucggcaacacggccgucgccaagugcaacgagaagcacgacgaggaguucugcgacaugcuccgccuguucgacuucugcaagcaggccauccagcggcugaaggcggaggcccagaugagcauccagcucaucaacaaggccgugaacgcccugaucaacgaccagcugaucaugaagaaccaccuccgcgacaucauggggauccccuacugcaacuacuccaaguacugguaccugaaccacaccgugaccggcaagaccagccugcccaagugcuggcucgucuccaacggcagcuaccugaacgagacgcacuucuccgacgacaucgagcagcaggccgacaacaugaucaccgagaugcugcagaaggaguacauggagcggcaggggaagacgccccugggccucguggaccuguucguguucagcaccuccuucuaccugaucagcaucuuccuccaccuggucaagaucccgacccaccgccacgugguggggaagcccugccccaagccccaccggcugaaccacaugggcaucugcuccugcggguucuacaagcagccgggcguccccgugcgcuggaagcggugaggacuaguuauaagacugacuagcccgaugggccucccaacgggcccuccuccccuccuugcaccgagauuaaucaaaggcucuuuucagagccaccaaaaaaaaaaaaaaaaaaaaaaaaaaaaaaaaaaaaaaaaaaaaaaaaaaaaaaaaaaaaaaaaaaaaaaaaaaaaaaaaaaaaaaaaaaaaaaaaaaaaa

SEQ ID NO: 38020 - RNA, 1689 nt, Artificial Sequence
  mRNA product Design i-3 (hSL-A100) comprising derived and/or modified sequence from LASV(Z0947-SLE-2011;Clade IV)__AIT17840__GPCmut10 (opt1)
aggagaaagcuuaccaugggccagaucgugaccuucuuccaggaggucccccacgugaucgaggaggugaugaacaucguccugaucgcccucagcauccuggccgugcugaaggggcucuacaacuucgcgaccugcggccugguggggcuggucacguuccuccugcugugcggccgcuccugcaccaucagccucuacaaggggguguacgagcugcagacccuggagcucaacauggagacccugaacaugugcaugccgcuguccugcacgaagaacaacagccaccacuacaucauggugggcaacgagaccggccucgagcugacccugaccaacacguccaucaucaaccacaaguucugcaaccucagcgacgcccacaagaagaaccuguacgaccacgcccugauguccaucaucagcaccuuccaccucuccauccccaacuucaaccaguacgaggccaugagcugcgacuucaacgggggcaagaucuccguccaguacaaccugagccacuccuacgccggggacgcggccaaccacugcggcaccguggccaacggggugcugcagaccuucaugcggauggccuggggcggcagcuacaucgcgcucgacuccgggcgcgaccggugggacugcaucaugacgagcuaccaguaccugaucauccagaacaccaccugggaggaccacugccaguucucccgccccagccccaucggcuaccuggggcuccugucccagcggacccgcgacaucuacaucagccggcgccugcucggcacguucaccuggacccugagcgacuccgagggcaaggacacccccgggggcuacugccugacgcgguggaugcucaucgaggccgagcugaagugcuucgggaacaccgccgucgccaagugcaacgagaagcacgacgaggaguucugcgacaugcugcgccucuucgacuucugcaagcaggccauccagcggcugaaggcggaggcccagaugagcauccagcugaucaacaaggccgugaacgcccucaucaacgaccagcugaucaugaagaaccaccuccgcgacaucaugggcaucccguacugcaacuacuccaaguacugguaccugaaccacaccaccacggggaagaccagccugcccaagugcuggcugguguccaacggcagcuaccucaacgagacccacuucuccgacgacaucgagcagcaggccgacaacaugaucaccgagaugcugcagaaggaguacauggagcggcagggcaagacgccccuggggcuggucgaccucuucguguucagcaccuccuucuaccugaucagcaucuuccugcaccucgugaagaucccgacccaccgccacaucgucggcaagcccugccccaagccccaccggcugaaccacauggggaucugcuccugcggccuguacaagcagccgggggugcccgugaaguggaagcgcugaggacuaguuauaagacugacuagcccgaugggccucccaacgggcccuccuccccuccuugcaccgagauuaaucaaaggcucuuuucagagccaccaaaaaaaaaaaaaaaaaaaaaaaaaaaaaaaaaaaaaaaaaaaaaaaaaaaaaaaaaaaaaaaaaaaaaaaaaaaaaaaaaaaaaaaaaaaaaaaaaaaaa

SEQ ID NO: 38021 - RNA, 1689 nt, Artificial Sequence
  mRNA product Design i-3 (hSL-A100) comprising derived and/or modified sequence from LASV(Josiah;Clade IV)__NP_694870__GPCmut10 (opt4)
aggagaaagcuuaccaugggccagaucgugaccuucuuccaggaggugccccacgugaucgaggaggugaugaacaucgugcugaucgcccugagcgugcuggccgugcugaagggccuguacaacuucgccaccugcggccuggugggccuggugaccuuccugcugcugugcggcagaagcugcaccaccagccuguacaagggcguguacgagcugcagacccuggagcugaacauggagacccugaacaugugcaugccccugagcugcaccaagaacaacagccaccacuacaucauggugggcaacgagaccggccuggagcugacccugaccaacaccagcaucaucaaccacaaguucugcaaccugagcgacgcccacaagaagaaccuguacgaccacgcccugaugagcaucaucagcaccuuccaccugagcauccccaacuucaaccaguacgaggccaugagcugcgacuucaacggcggcaagaucagcgugcaguacaaccugagccacagcuacgccggcgacgccgccaaccacugcggcaccguggccaacggcgugcugcagaccuucaugagaauggccuggggcggcagcuacaucgcccuggacagcggcagaggcaacugggacugcaucaugaccagcuaccaguaccugaucauccagaacaccaccugggaggaccacugccaguucagcagacccagccccaucggcuaccugggccugcugagccagagaaccagagacaucuacaucagcagaagacugcugggcaccuucaccuggacccugagcgacagcgagggcaaggacacccccggcggcuacugccugaccagauggaugcugaucgaggccgagcugaagugcuucggcaacaccgccguggccaagugcaacgagaagcacgacgaggaguucugcgacaugcugagacuguucgacuucugcaagcaggccauccagagacugaaggccgaggcccagaugagcauccagcugaucaacaaggccgugaacgcccugaucaacgaccagcugaucaugaagaaccaccugagagacaucaugggcauccccuacugcaacuacagcaaguacugguaccugaaccacaccaccaccggcagaaccagccugcccaagugcuggcuggugagcaacggcagcuaccugaacgagacccacuucagcgacgacaucgagcagcaggccgacaacaugaucaccgagaugcugcagaaggaguacauggagagacagggcaagaccccccugggccugguggaccuguucguguucagcaccagcuucuaccugaucagcaucuuccugcaccuggugaagauccccacccacagacacaucgugggcaagagcugccccaagccccacagacugaaccacaugggcaucugcagcugcggccuguacaagcagcccggcgugcccgugaaguggaagagaugaggacuaguuauaagacugacuagcccgaugggccucccaacgggcccuccuccccuccuugcaccgagauuaaucaaaggcucuuuucagagccaccaaaaaaaaaaaaaaaaaaaaaaaaaaaaaaaaaaaaaaaaaaaaaaaaaaaaaaaaaaaaaaaaaaaaaaaaaaaaaaaaaaaaaaaaaaaaaaaaaaaaa

SEQ ID NO: 38022 - RNA, 1686 nt, Artificial Sequence
  mRNA product Design i-3 (hSL-A100) comprising derived and/or modified sequence from LASV(LP;Clade I)__AAF86701__GPCmut10 (opt4)
aggagaaagcuuaccaugggccagaucaucaccuucuuccaggaggugccccacgugaucgaggaggugaugaacaucgugcugaucgcccugagccugcuggccauccugaagggccuguacaacaucgccaccugcggcaucaucggccugguggccuuccuguuccugugcggcaagagcugcagccugacccugaagggcggcuacgagcugcagacccuggagcugaacauggagacccugaacaugugcaugccccugagcugcaccaagaacagcagccaccacuacaucagagugggcaacgagaccggccuggagcugacccugaccaacaccagcaucaucaaccacaaguucugcaaccugagcgacgcccacaagaagaaccuguacgaccacgcccugaugagcaucaucagcaccuuccaccugagcauccccaacuucaaccaguacgaggccaugagcugcgacuucaacggcggcaagaucagcgugcaguacaaccugagccacagcuacgccggcgacgccgccgagcacugcggcaccguggccaacggcgugcugcagaccuucaugagaauggccuggggcggcagauacaucgcccuggacagcggcaagggcaacugggacugcaucaugaccagcuaccaguaccugaucauccagaacaccaccugggaggaccacugccaguucagcagacccagccccaucggcuaccugggccugcugagccagagaaccagagacaucuacaucagcagaagacugcugggcaccuucaccuggacccugagcgacagcgagggcaacgagacccccggcggcuacugccugaccagauggaugcugaucgaggccgagcugaagugcuucggcaacaccgccguggccaagugcaacgagaagcacgacgaggaguucugcgacaugcugagacuguucgacuucugcaagcaggccaucagaagacugaaggccgaggcccagaugagcauccagcugaucaacaaggccgugaacgcccugaucaacgaccagcugaucaugaagaaccaccugagagacaucaugggcauccccuacugcaacuacagcaaguacugguaccugaaccacaccagcagcggcagaaccagccugcccaagugcuggcugaucagcaacggcagcuaccugaacgagacccaguucagcgacgacaucgagcagcaggccgacaacaugaucaccgagaugcugcagaaggaguacaucgagagacagggcaagaccccccugggccugguggacaucuucaucuucagcaccagcuucuaccugaucagcaucuuccugcaccugaucaagauccccacccacagacacaucgugggcaagcccugccccaagccccacagacugaaccacaugggcgugugcagcugcggccuguacaagcaccccggcgugcccaccaaguggaagagaugaggacuaguuauaagacugacuagcccgaugggccucccaacgggcccuccuccccuccuugcaccgagauuaaucaaaggcucuuuucagagccaccaaaaaaaaaaaaaaaaaaaaaaaaaaaaaaaaaaaaaaaaaaaaaaaaaaaaaaaaaaaaaaaaaaaaaaaaaaaaaaaaaaaaaaaaaaaaaaaaaaaaa

SEQ ID NO: 38023 - RNA, 1686 nt, Artificial Sequence
  mRNA product Design i-3 (hSL-A100) comprising derived and/or modified sequence from LASV(803213;Clade II)__AAF86703__GPCmut10 (opt4)
aggagaaagcuuaccaugggccagaucaucaccuucuuccaggaggugccccacgugaucgaggaggugaugaacaucgugcugaucgcccugagccugcuggccauccugaagggcaucuacaacguggccaccugcggccuguucggccugaucagcuuccugcugcugugcggcagaagcugcagcgugaccuacaagggcguguacgagcugcagacccuggagcugaacauggccaaccugaacaugugcaugccccugagcugcaccaagaacaacagccaccacuacaucauggugggcaacgagaccggccuggagcugacccugaccaacaccagcaucaucaaccacaaguucugcaaccugagcgacgcccacaagaagaaccuguacgaccacgcccugaugagcaucaucagcaccuuccaccugagcauccccaacuucaaccaguacgaggccaugagcugcgacuucaacggcggcaagaucagcgugcaguacaaccugagccacagcuucgccguggacgccgccaaccacugcggcaccaucgccaacggcgugcugcagaccuucaugagaauggccuggggcggcagcuacaucgcccuggacagcggcaagggcaacugggacugcaucaugaccagcuaccaguaccugaucauccagaacaccaccugggaggaccacugccaguucagcagacccagccccaucggcuaccugggccugcugagccagagaaccagagacaucuacaucagcagaagacugcugggcaccuucaccuggacccugagcgacagcgagggcaacgaggcccccggcggcuacugccugaccagauggaugcugaucgaggccgagcugaagugcuucggcaacaccgccguggccaagugcaacgagaagcacgacgaggaguucugcgacaugcugagacuguucgacuucugcaagcaggccaucaagagacugaagaccgaggcccagaugagcauccagcugaucaacaaggccgugaacgcccugaucaacgaccagcugaucaugaagaaccaccugagagacaucaugggcauccccuacugcaacuacagcagauacugguaccugaaccacaccgugaccggcaagaccagccugcccagaugcuggcuggugagcaacggcagcuaccugaacgagacccacuucagcgacgacaucgagcagcaggccgacaacaugaucaccgagaugcugcagaaggaguacauggacagacagggcaagaccccccugggccugguggaccuguucguguucagcaccagcuucuaccugaucagcaucuuccugcaccuggugaagauccccacccacagacacaucgugggcaagcccugccccaagccccacagacugaaccacaugggcaucugcagcugcggccuguacaagcaccccggcgugcccgugaaguggaagagaugaggacuaguuauaagacugacuagcccgaugggccucccaacgggcccuccuccccuccuugcaccgagauuaaucaaaggcucuuuucagagccaccaaaaaaaaaaaaaaaaaaaaaaaaaaaaaaaaaaaaaaaaaaaaaaaaaaaaaaaaaaaaaaaaaaaaaaaaaaaaaaaaaaaaaaaaaaaaaaaaaaaaa

SEQ ID NO: 38024 - RNA, 1686 nt, Artificial Sequence
  mRNA product Design i-3 (hSL-A100) comprising derived and/or modified sequence from LASV(GA391;Clade III)__CAA36645__GPCmut10 (opt4)
aggagaaagcuuaccaugggccagaucgugaccuucuuccaggaggugccccacgugaucgaggaggugaugaacaucgugcugaucgcccugagcauccuggccauccugaagggccuguacaacguggccaccugcggccugaucggccuggugaccuuccugcugcugagcggcagaagcugcagccugaucuacaagggcaccuacgagcugcagacccuggagcugaacauggagacccugaacaugugcaugccccugagcugcaccaagaacaacagccaccacuacaucagagugggcaacgagaccggccuggagcugacccugaccaacaccagcauccugaaccacaaguucugcaaccugagcgacgcccacaagagaaaccuguacgaccacagccugaugagcaucaucagcaccuuccaccugagcauccccaacuucaaccaguacgaggccaugagcugcgacuucaacggcggcaagaucaccgugcaguacaaccugagccacagcuucgccguggacgccgccggccacugcggcacccuggccaacggcgugcugcagaccuucaugagaauggccuggggcggcagcuacaucgcccuggacagcggcagaggcaacugggacugcaucaugaccagcuaccaguaccugaucauccagaacaccaccugggacgaccacugccaguucagcagacccagccccaucggcuaccugggccugcugagccagagaaccagagacaucuacaucagcagaagacugcugggcaccuucaccuggacccugagcgacagcgagggcaacgagacccccggcggcuacugccugaccagauggaugcugaucgaggccgagcugaagugcuucggcaacaccgccguggccaagugcaacgagaagcacgacgaggaguucugcgacaugcugagacuguucgacuucugcaagcaggccaucagaagacugaagaccgaggcccagaugagcauccagcugaucaacaaggccgugaacgcccugaucaacgaccagcugaucaugaagaaccaccugagagacaucaugggcauccccuacugcaacuacagcagauacugguaccugaaccacaccagcaccggcaagaccagccugcccagaugcuggcugaucagcaacggcagcuaccugaacgagaccaaguucagcgacgacaucgagcagcaggccgacaacaugaucaccgagaugcugcagaaggaguacaucgacagacagggcaagaccccccugggccugguggaccuguucguguucagcaccagcuucuaccugaucagcaucuuccugcaccuggugaagauccccacccacagacacaucgugggcaagcccugccccaagccccacagacugaaccacaugggcaucugcagcugcggccuguacaagcagcccggcgugcccgugagauggaagagaugaggacuaguuauaagacugacuagcccgaugggccucccaacgggcccuccuccccuccuugcaccgagauuaaucaaaggcucuuuucagagccaccaaaaaaaaaaaaaaaaaaaaaaaaaaaaaaaaaaaaaaaaaaaaaaaaaaaaaaaaaaaaaaaaaaaaaaaaaaaaaaaaaaaaaaaaaaaaaaaaaaaaa

SEQ ID NO: 38025 - RNA, 1689 nt, Artificial Sequence
  mRNA product Design i-3 (hSL-A100) comprising derived and/or modified sequence from LASV(AV;Clade V)__CCA30314__GPCmut10 (opt4)
aggagaaagcuuaccaugggccagaucgugaccuucuuccaggaggugccccacgugaucgaggaggugaugaacaucgugcugaucgcccugagcauccuggccgugcugaagggccuguacaacaucgccaccugcggccugaucggccugaucaccuuccugcugcugugcggcagaagcugcagcagcaaccuguacaagggcguguacgagcugcagagccuggaccugaacauggagacccugaacaugugcaugccccugagcugcaccaagaacaacagccaccacuacaucagagugggcaacgacaccggccuggagcugacccugaccaacaccagcauccugaaccacaaguucugcaaccugagcgacgcccacaagaaggaccuguacgaccacgcccugaugagcaucaucagcaccuuccaccugagcauccccaacuucaaccaguacgaggccaugagcugcgacuucaacggcggcaagaucagcgugcaguacaaccugagccacagcuacgccaucgacgccgccaaccacugcggcaccguggccaacggcauccugcagaccuucaugagaauggccuggggcggcagcuacaucgcccuggacagcggcagaggcaacugggacugcaucaugaccagcuaccaguaccugaucauccagaacaccaccugggagaaccacugccaguucagcagacccagccccaucggcuaccugggccugcugagccagagaaccagagacaucuacaucagcagaagacugcugggcaccuucaccuggacccugagcgacagcgagggcaacgccacccccggcggcuacugccugaccagauggaugcugaucgaggccgagcugaagugcuucggcaacaccgccguggccaagugcaacgagaagcacgacgaggaguucugcgacaugcugagacuguucgacuucugcaagcaggccaucagcagacugaagagcgaggcccagaugagcauccagcugaucaacaaggccgugaacgcccugaucaacgaccagcugaucaugaagaaccaccugagagacaucaugggcauccccuacugcaacuacagcaaguacugguaccugaaccacaccaucaccggcaagaccagccugcccaagugcuggcuggugagcaacggcagcuaccugaacgagacccacuucagcgacgacaucgagcagcaggccgacaacaugaucaccgagaugcugcagaaggaguacauggagagacagggcaagaccccccugggccugguggaccuguucguguucagcaccagcuucuaccugaucagcaucuuccugagacuggugaagauccccacccacagacacaucgugggcaagcccugccccaagccccacagacugaaccacaugggcaucugcagcugcggccuguacaagcagcccggcgugcccgugagauggaagagaugaggacuaguuauaagacugacuagcccgaugggccucccaacgggcccuccuccccuccuugcaccgagauuaaucaaaggcucuuuucagagccaccaaaaaaaaaaaaaaaaaaaaaaaaaaaaaaaaaaaaaaaaaaaaaaaaaaaaaaaaaaaaaaaaaaaaaaaaaaaaaaaaaaaaaaaaaaaaaaaaaaaaa

SEQ ID NO: 38026 - RNA, 1686 nt, Artificial Sequence
  mRNA product Design i-3 (hSL-A100) comprising derived and/or modified sequence from LASV(Togo/2016/7082;Clade VI)__AMR44577__GPCmut10 (opt4)
aggagaaagcuuaccaugggccagaucaucaccuucuuccaggaggugccccacgugaucgaggaggugaugaacaucgugcugaucgcccugagccugcuggccauccugaagggcguguacaacguggccaccugcggcaucaucggccuggugaccuuccuguuccugugcggcagaagcugcagccugaucuacaagggcagcuacgagcugcagacccuggagcugaacauggagacccugaacaugugcaugccccugagcugcaccaagaacagcagccaccacuacaucagagugggcaacgagaccggccuggagcugacccugaccaacaccagcaucaucaaccacaaguucugcaaccugagcgacgcccacaagagaaaccuguacgaccacgcccugaugagcauccugagcaccuuccaccugagcauccccaacuucaaccaguacgaggccaugagcugcgacuucaacggcggcaagaucagcgugcaguacaaccugagccacgccuacgccguggacgccgccgagcacugcggcaccguggccaacggcgugcugcagaccuucaugagaauggccuggggcggcagcuacaucgcccuggacagcggcagaggcaacugggacugcaucaugaccagcuaccaguaccugaucauccagaacaccaccugggaggaccacugccaguucagcagacccagccccaucggcuaccugggccugcugagccagagaaccagagacaucuacaucagcagaagacugcugggcaccuucaccuggacccugagcgacagcgagggcaacgagacccccggcggcuacugccugaccagauggaugcugaucgaggccgagcugaagugcuucggcaacaccgccguggccaagugcaacgagaagcacgacgaggaguucugcgacaugcugagacuguucgacuucugcaagcaggccauccagagacugaagagcgaggcccagaugagcauccagcugaucaacaaggccgugaacgcccugaucaacgaccagcugaucaugaagaaccaccugagagacaugaugggcauccccuacugcaacuacagcaaguacugguaccugaaccacaccagcagcggcagaaccagccugcccaagugcuggcuggugagcaacggcagcuaccugaacgagacccacuucagcgacgacaucgagcagcaggccgacaacaugaucaccgagaugcugcagaaggaguacaucgacagacagggcaagaccccccugggccugguggaccuguucguguucagcaccagcuucuaccugaucagcaucuuccugcaccugaucaagauccccacccacagacacaucgugggcaagcccugccccaagccccacagacugaaccacaugggcaucugcagcugcggccuguacaagcagcccggcgugcccaccagauggaagagaugaggacuaguuauaagacugacuagcccgaugggccucccaacgggcccuccuccccuccuugcaccgagauuaaucaaaggcucuuuucagagccaccaaaaaaaaaaaaaaaaaaaaaaaaaaaaaaaaaaaaaaaaaaaaaaaaaaaaaaaaaaaaaaaaaaaaaaaaaaaaaaaaaaaaaaaaaaaaaaaaaaaaa

SEQ ID NO: 38027 - RNA, 1686 nt, Artificial Sequence
  mRNA product Design i-3 (hSL-A100) comprising derived and/or modified sequence from LASV(KAK-428;Clade n.d. (VII))__ANH09740__GPCmut10 (opt4)
aggagaaagcuuaccaugggccagaucgugaccuucuuccaggaggugccccacgugaucgaggaggugaugaacaucgugcugaucgcccugagccugcuggccauccugaagggccuguacaacuucgccaccugcggcgugaucggccugaucaccuuccugcugcugugcggcagaagcugcagcgccaccuacaagggccaguacgagcugcagacccuggagcugaacauggagagccugaacaugugcaugccccugagcugcaccaagaacaacagccaccacuacaucagagccggcaacaacaccggccuggagcugacccugaccaacaccagcaucaucagccacaaguucugcaaccugagcgacgcccacaagaagaaccuguacgaccacacccugaugagcaucaucaccaccuuccaccugagcauccccaacuucaaccaguacgaggccaugagcugcgacuucaacggcggcaagaucagcauccaguacaaccugagccacagcuacgccggcgacgccgcccagcacugcggcaccguggccaacggcgugcugcagaccuucaugagaauggccuggggcggcagcuaccuggcccuggacagcggcagaagaggcugggacugcaucaucagcagcuaccaguaccugaucauccagaacaccaccugggacgaccacugccaguucagcagacccagccccaucggcuaccugggcuucgugagccagaagaccagagacaucuacaucagcagaagacugcugggcaccuucaccuggacccugagcgacagcgagggccacgacaugcccggcggcuacugccugaccagauggaugcugaucgaggccgaccugaagugcuucggcaacaccgccguggccaagugcaacgagaagcacgacgaggaguucugcgacauguggagacuguucgacuucugcaagcaggccauccagagacugaaggccgaggcccagaugaacauccagcugaucaacaaggccgugaacgcccugaucaacgaccagcugaugaugaagaaccaccugagagacaucaugggcauccccuacugcaacuacagcaaguucugguaccugaacaacaccaccaccggcagaaccagccugcccagaugcuggcugaucagcaacggcagcuaccugaacgagacccacuucagcgacgacaucgagcagcaggccgacaacaugaucaccgagaugcugcagaaggaguacauggacagacagggcaagaccccccugggccugguggaccuguucguguucagcaccagcuucuaccugaucaccaucuuccugcaccuggugaagauccccacccacagacacaucgugggcaagcccugccccaagccccacagacugaaccacaugggcaucugcagcugcggccuguacaagcagcccggcgugcccgugagauggaagagaugaggacuaguuauaagacugacuagcccgaugggccucccaacgggcccuccuccccuccuugcaccgagauuaaucaaaggcucuuuucagagccaccaaaaaaaaaaaaaaaaaaaaaaaaaaaaaaaaaaaaaaaaaaaaaaaaaaaaaaaaaaaaaaaaaaaaaaaaaaaaaaaaaaaaaaaaaaaaaaaaaaaaa

SEQ ID NO: 38028 - RNA, 1686 nt, Artificial Sequence; identical to SEQ ID NO: 38022
  mRNA product Design i-3 (hSL-A100) comprising derived and/or modified sequence from LASV(Pinneo-NIG-1969;Clade I)__AIT17836__GPCmut10 (opt4)

SEQ ID NO: 38029 - RNA, 1686 nt, Artificial Sequence
  mRNA product Design i-3 (hSL-A100) comprising derived and/or modified sequence from LASV(ISTH0009-NIG-2011;Clade II)__AIT17404__GPCmut10 (opt4)
aggagaaagcuuaccaugggccagaucaucaccuucuuccaggaggugccccacgugaucgaggaggugaugaacaucgugcugaucgcccugagccugcuggccauccugaagggcaucuacaacguggccaccugcggccuguucggccuggugagcuuccugcugcugugcggcagaagcugcagcaccaccuacaagggcguguacgagcugcagacccuggagcuggacauggccagccugaacaugugcaugccccugagcugcaccaagaacaacagccaccacuacaucauggugggcaacgagaccggccuggagcugacccugaccaacaccagcaucaucaaccacaaguucugcaaccugagcgacgcccacaagaagaaccuguacgaccacgcccugaugagcaucaucagcaccuuccaccugagcauccccaacuucaaccaguacgaggccaugagcugcgacuucaacggcggcaagaucagcgugcaguacaaccugagccacgccuacgccguggacgccgccaaccacugcggcaccaucgccaacggcgugcugcagaccuucaugagaauggccuggggcggcagcuacaucgcccuggacagcggcaagggcagcugggacugcaucaugaccagcuaccaguaccugaucauccagaacaccaccugggaggaccacugccaguucagcagacccagccccaucggcuaccugggccugcugagccagagaaccagagacaucuacaucagcagaagacugcugggcaccuucaccuggacccugagcgacagcgagggcaacgagacccccggcggcuacugccugaccagauggaugcugaucgaggccgagcugaagugcuucggcaacaccgccguggccaagugcaacgagaagcacgacgaggaguucugcgacaugcugagacuguucgacuucugcaagcaggccaucagaagacugaagaccgaggcccagaugagcauccagcugaucaacaaggccgugaacgcccugaucaacgaccagcugaucaugaagaaccaccugagagacaucaugggcauccccuacugcaacuacagcaaguacugguaccugaaccacaccgugaccggcaagaccagccugcccagaugcuggcuggugagcaacggcagcuaccugaacgagacccacuucagcgacgacaucgagcagcaggccgacaacaugaucaccgagcugcugcagaaggaguacauggacagacagggcaagaccccccugggccugguggaccuguucguguucagcaccagcuucuaccugaucagcaucuuccugcaccugaucaagauccccacccacagacacaucaccggcaagcccugccccaagccccacagacugaaccacaugggcaucugcagcugcggccuguacaagcaccccggcgugcccgugaaguggaagagaugaggacuaguuauaagacugacuagcccgaugggccucccaacgggcccuccuccccuccuugcaccgagauuaaucaaaggcucuuuucagagccaccaaaaaaaaaaaaaaaaaaaaaaaaaaaaaaaaaaaaaaaaaaaaaaaaaaaaaaaaaaaaaaaaaaaaaaaaaaaaaaaaaaaaaaaaaaaaaaaaaaaaa

SEQ ID NO: 38030 - RNA, 1686 nt, Artificial Sequence
  mRNA product Design i-3 (hSL-A100) comprising derived and/or modified sequence from LASV(ISTH2010-NIG-2012;Clade II)__AIT17482__GPCmut10 (opt4)
aggagaaagcuuaccaugggccagaucaucaccuucuuccaggaggugccccacgugaucgaggaggugaugaacaucgugcugaucgcccugagccugcuggccauccugaagggcaucuacaacguggccaccugcggccuguucggccuggugagcuuccugcugcugugcggcagaagcugcagcaccaccuacaagggcguguacgagcugcagacccuggagcuggacauggccagccugaacaugugcaugccccugagcugcaccaagaacaacagccaccacuacaucauggugggcaacgagaccggccuggagcugacccugaccaacaccagcaucaucaaccacaaguucugcaaccugagcgacgcccacaagaagaaccuguacgaccacgcccugaugagcaucaucagcaccuuccaccugagcauccccaacuucaaccaguacgaggccaugagcugcgacuucaacggcggcaagaucagcgugcaguacaaccugagccacgccuacgccguggacgccgccaaccacugcggcaccaucgccaacggcgugcugcagaccuucaugagaauggccuggggcggcagcuacaucgcccuggacagcggcaagggcagcugggacugcaucaugaccagcuaccaguaccugaucauccagaacaucaccugggaggaccacugccaguucagcagacccagccccaucggcuaccugggccugcugagccagagaaccagagacaucuacaucagcagaagacugcugggcaccuucaccuggacccugagcgacagcgagggcaacgagacccccggcggcuacugccugaccagauggaugcugaucgaggccgagcugaagugcuucggcaacaccgccguggccaagugcaacgagaagcacgacgaggaguucugcgacaugcugagacuguucgacuucugcaagcaggccaucagaagacugaagaccgaggcccagaugagcauccagcugaucaacaaggccgugaacgcccugaucaacgaccagcugaucaugaagaaccaccugagagacaucaugggcauccccuacugcaacuacagcaaguacugguaccugaaccacaccgugaccggcaagaccagccugcccagaugcuggcuggugagcaacggcagcuaccugaacgagacccacuucagcgacgacaucgagcagcaggccgacaacaugaucaccgagcugcugcagaaggaguacaucgacagacagggcaagaccccccugggccugguggaccuguucguguucagcaccagcuucuaccugaucagcaucuuccugcaccuggugaagauccccacccacagacacguggugggcaagcccugccccaagccccacagacugaaccacaugggcaucugcagcugcggccuguacaagcaccccggcgugcccgugaaguggaagagaugaggacuaguuauaagacugacuagcccgaugggccucccaacgggcccuccuccccuccuugcaccgagauuaaucaaaggcucuuuucagagccaccaaaaaaaaaaaaaaaaaaaaaaaaaaaaaaaaaaaaaaaaaaaaaaaaaaaaaaaaaaaaaaaaaaaaaaaaaaaaaaaaaaaaaaaaaaaaaaaaaaaaa

SEQ ID NO: 38031 - RNA, 1686 nt, Artificial Sequence
  mRNA product Design i-3 (hSL-A100) comprising derived and/or modified sequence from LASV(Lassa virus/H.sapiens-wt/NGA/2015/ISTH_0543;Clade II)__AVO03639__GPCmut10 (opt4)
aggagaaagcuuaccaugggccagaucaucaccuucuuccaggaggugccccacgugaucgaggaggugaugaacaucgugcugaucgcccugagccugcuggccauccugaagggcaucuacaacguggccaccugcggccuguucggccuggugagcuuccugcugcugugcggcagaagcugcagcaccaccuacaagggcguguacgagcugcagacccuggagcuggacauggccaaccugaacaugugcaugccccugagcugcaccaagaacaacagccaccacuacaucauggugggcaacgagaccggccuggagcugacccugaccaacaccagcaucaucaaccacaaguucugcaaccugagcgacgcccacaagaagaaccuguacgaccacgcccugaugagcaucaucagcaccuuccaccugagcauccccaacuucaaccaguacgaggccaugagcugcgacuucaacggcggcaagaucagcgugcaguacaaccugagccacaccuacgccguggacgccgccaaccacugcggcaccaucgccaacggcgugcugcagaccuucaugagaauggccuggggcggcagcuacaucgcccuggacagcggcaagggcagcugggacugcaucaugaccagcuaccaguaccuggugauccagaacaccaccugggaggaccacugccaguucagcagacccagccccaucggcuaccugggccugcugagccagagaaccagagacaucuacaucagcagaagacugcugggcaccuucaccuggacccugagcgacagcgagggcaacgagacccccggcggcuacugccugaccagauggaugcugaucgaggccgagcugaagugcuucggcaacaccgccguggccaagugcaacgagaagcacgacgaggaguucugcgacaugcugagacuguucgacuucugcaagcaggccaucagaagacugaagaccgaggcccagaugagcauccagcugaucaacaaggccgugaacgcccugaucaacgaccagcugaucaugaagaaccaccugagagacaucaugggcauccccuacugcaacuacagcaaguacugguaccugaaccacaccgugaccggcaagaccagccugcccagaugcuggcuggugagcaacggcagcuaccugaacgagacccacuucagcgacgacaucgagcagcaggccgacaacaugaucaccgagcugcugcagaaggaguacaucgacagacagggcaagaccccccugggccugguggaccuguucguguucagcaccagcuucuaccugaucagcaucuuccugcaccuggugaagauccccacccacagacacaucaccggcaagcccugccccaagccccacagacugaaccacaugggcaucugcagcugcggccuguacaagcaccccggcgugcccgugaaguggaagagaugaggacuaguuauaagacugacuagcccgaugggccucccaacgggcccuccuccccuccuugcaccgagauuaaucaaaggcucuuuucagagccaccaaaaaaaaaaaaaaaaaaaaaaaaaaaaaaaaaaaaaaaaaaaaaaaaaaaaaaaaaaaaaaaaaaaaaaaaaaaaaaaaaaaaaaaaaaaaaaaaaaaaa

SEQ ID NO: 38032 - RNA, 1686 nt, Artificial Sequence
  mRNA product Design i-3 (hSL-A100) comprising derived and/or modified sequence from LASV(Lassa virus/H.sapiens-wt/NGA/2016/ISTH_0009;Clade II)__AVO03571__GPCmut10 (opt4)
aggagaaagcuuaccaugggccagaucaucaccuucuuccaggaggugccccacgugaucgaggaggugaugaacaucgugcugaucgcccugagccugcuggccauccugaagggcaucuacaacguggccaccugcggccugcugggccuggugagcuuccugcugcugugcggcagaagcugcagcaccaccuacaagggcguguacgagcugcagacccuggagcuggacauggccagccugaacaugugcaugccccugagcugcaccaagaacaacagccaccacuacaucauggugggcaacgagaccggccuggagcugacccugaccaacaccagcaucaucaaccacaaguucugcaaccugagcgacgcccacaagaagaaccuguacgaccacgcccugaugagcaucaucagcaccuuccaccugagcauccccaacuucaaccaguacgaggccaugagcugcgacuucaacggcggcagaaucagcgugcaguacaaccugagccacagcuacgccguggacgccgccaaccacugcggcaccaucgccaacggcgugcugcagaccuucaugagaauggccuggggcggcagcuacaucgcccuggacagcggcaagggcagcugggacugcaucaugaccagcuaccaguaccugaucauccagaacaccaccugggaggaccacugccaguucagcagacccagccccaucggcuaccugggccugcugagccagagaaccagagacaucuacaucagcagaagacugcugggcaccuucaccuggacccugagcgacagcgagggcaacgagacccccggcggcuacugccugaccagauggaugcugaucgaggccgagcugaagugcuucggcaacaccgccguggccaagugcaacgagaagcacgacgaggaguucugcgacaugcugagacuguucgacuucugcaagcaggccaucagaagacugaagaccgaggcccagaugagcauccagcugaucaacaaggccgugaacgcccugaucaacgaccagcugaucaugaagaaccaccugagagacaucaugggcauccccuacugcaacuacagcaaguacugguaccugaaccacaccgugaccggcaagaccagccugcccagaugcuggcuggugagcaacggcagcuaccugaacgagacccacuucagcgacgacaucgagcagcaggccgacaacaugaucaccgagcugcugcagaaggaguacaucgacagacagggcaagaccccccugggccugguggaccuguucguguucagcaccagcuucuaccugaucagcaucuuccugcaccuggugaagauccccacccacagacacaucaccggcaagcccugccccaagccccacagacugaaccacaugggcaucugcagcugcggccuguacaaccaccccggcgugcccgugaaguggaagagaugaggacuaguuauaagacugacuagcccgaugggccucccaacgggcccuccuccccuccuugcaccgagauuaaucaaaggcucuuuucagagccaccaaaaaaaaaaaaaaaaaaaaaaaaaaaaaaaaaaaaaaaaaaaaaaaaaaaaaaaaaaaaaaaaaaaaaaaaaaaaaaaaaaaaaaaaaaaaaaaaaaaaa

SEQ ID NO: 38033 - RNA, 1686 nt, Artificial Sequence
  mRNA product Design i-3 (hSL-A100) comprising derived and/or modified sequence from LASV(Lassa virus/H.sapiens-wt/NGA/2016/ISTH_0017;Clade II)__AVO03567__GPCmut10 (opt4)
aggagaaagcuuaccaugggccagaucaucaccuucuuccaggaggugccccacgugaucgaggaggugaugaacaucgugcugaucgcccugagccugcuggccauccugaagggcaucuacaacguggccaccugcggccuguucggccuggugagcuuccugcugcugugcggcagaagcugcagcaccaccuacaagggcguguacgagcugcagacccuggagcuggacauggccagccugaacaugugcaugccccugagcugcaccaagaacaacagccaccacuacaucauggugggcaacgagaccggccuggagcugacccugaccaacaccagcaucaucaaccacaaguucugcaaccugagcgacgcccacaagaagaaccuguacgaccacgcccugaugagcaucaucagcaccuuccaccugagcauccccaacuucaaccaguacgaggccaugagcugcgacuucaacggcggcaagaucagcgugcaguacaaccugagccacaccuacgccaucgacgccgccaaccacugcggcaccaucgccaacggcgugcugcagaccuucaugagaauggccuggggcggcagcuacaucgcccuggacagcggcaagggcagcugggacugcaucaugaccagcuaccaguaccugaucauccagaacaccaccugggaggaccacugccaguucagcagacccagccccaucggcuaccugggccugcugagccagagaaccagagacaucuacaucagcagaagacugcugggcaccuucaccuggacccugagcgacagcgagggcaacgagacccccggcggcuacugccugaccagauggaugcugaucgaggccgagcugaagugcuucggcaacaccgccguggccaagugcaacgagaagcacgacgaggaguucugcgacaugcugagacuguucgacuucugcaagcaggccaucagaagacugaagaccgaggcccagaugagcauccagcugaucaacaaggccgugaacgcccugaucaacgaccagcugaucaugaagaaccaccugagagacaucaugggcauccccuacugcaacuacagcaaguacugguaccugaaccacaccgugaccggcaagaccagccugcccagaugcuggcuggugagcaacggcagcuaccugaacgagacccacuucagcgacgacaucgagcagcaggccgacaacaugaucaccgagcugcugcagaaggaguacauggacagacagggcaagaccccccugggccugguggaccuguucguguucagcaccagcuucuaccugaucagcaucuuccugcaccuggugagaauccccacccacagacacgugaucggcaagcccugccccaagccccacagacugaaccacaugggcaucugcagcugcggccuguacaagcaccccggcgugcccgugaaguggaagagaugaggacuaguuauaagacugacuagcccgaugggccucccaacgggcccuccuccccuccuugcaccgagauuaaucaaaggcucuuuucagagccaccaaaaaaaaaaaaaaaaaaaaaaaaaaaaaaaaaaaaaaaaaaaaaaaaaaaaaaaaaaaaaaaaaaaaaaaaaaaaaaaaaaaaaaaaaaaaaaaaaaaaa

SEQ ID NO: 38034 - RNA, 1686 nt, Artificial Sequence
  mRNA product Design i-3 (hSL-A100) comprising derived and/or modified sequence from LASV(Lassa virus/H.sapiens-wt/NGA/2018/ISTH_0959;Clade II)__AVV65099__GPCmut10 (opt4)
aggagaaagcuuaccaugggccagaucaucaccuucuuccaggaggugccccacgugaucgaggaggugaugaacaucgugcugaucgcccugagccugcuggccauccugaagggcaucuacaacguggugaccugcggccuguucggccuggugagcuuccugcugcugugcggcagaagcugcagcaccaccuacaagggcguguacgagcugcagacccuggagcuggacauggccagccugaacaugugcaugccccugagcugcaccaagaacaacagccaccacuacaucauggugggcaacgagaccggccuggagcugacccugaccaacaccagcaucaucaaccacaaguucugcaaccugagcgacgcccacaagaagaaccuguacgaccacgcccugaugagcaucaucagcaccuuccaccugagcauccccaacuucaaccaguacgaggccaugagcugcgacuucaacggcggcaagaucagcgugcaguacaaccugagccacgccuacgccaucgacgccgccaaccacugcggcaccaucgccaacggcgugcugcagaccuucaugagaauggccuggggcggcagcuacaucgcccuggacagcggcaagggcagcugggacugcaucaugaccagcuaccaguaccugaucauccagaacaccaccugggaggaccacugccaguucagcagacccagccccaucggcuaccugggccugcugagccagagaaccagagacaucuacaucagcagaagacugcugggcaccuucaccuggacccugagcgacagcgagggcaacgagacccccggcggcuacugccugaccagauggaugcugaucgaggccgagcugaagugcuucggcaacaccgccguggccaagugcaacgagaagcacgacgaggaguucugcgacaugcugagacuguucgacuucugcaagcaggccaucagaagacugaagaccgaggcccagaugagcauccagcugaucaacaaggccgugaacgcccugaucaacgaccagcugaucaugaagaaccaccugagagacaucaugggcauccccuacugcaacuacagcaaguacugguaccugaaccacaccgugaccggcaagaccagccugcccagaugcuggcuggugagcaacggcagcuaccugaacgagacccacuucagcgacgacaucgagcagcaggccgacaacaugaucaccgagcugcugcagaaggaguacaucgacagacagggcaagaccccccugggccugguggaccuguucguguucagcaccagcuucuaccugaucagcaucuuccugcaccuggugaagauccccacccacagacacgugaucggcaagcccugccccaagccccacagacugaaccacaugggcaucugcagcugcggccuguacaagcaccccggcgugcccgugaaguggaagagaugaggacuaguuauaagacugacuagcccgaugggccucccaacgggcccuccuccccuccuugcaccgagauuaaucaaaggcucuuuucagagccaccaaaaaaaaaaaaaaaaaaaaaaaaaaaaaaaaaaaaaaaaaaaaaaaaaaaaaaaaaaaaaaaaaaaaaaaaaaaaaaaaaaaaaaaaaaaaaaaaaaaaa

SEQ ID NO: 38035 - RNA, 1686 nt, Artificial Sequence
  mRNA product Design i-3 (hSL-A100) comprising derived and/or modified sequence from LASV(LASV003-NIG-2008;Clade II)__AIT17580__GPCmut10 (opt4)
aggagaaagcuuaccaugggccagaucaucaccuucuuccaggaggugccccacgugaucgaggaggugaugaacaucgugcugaucgcccugagccugcuggccauccugaagggcaucuacaacguggccaccugcggccuguucggccuggugagcuuccugcugcugugcggcagaagcugcagcaccaccuacaagggcguguacgagcugcagacccuggagcuggacauggccagccugaacaugugcaugccccugagcugcaccaagaacaacagccaccacuacaucauggugggcaacgagaccggccuggagcugacccugaccaacaccagcaucaucaaccacaaguucugcaaccugagcgacgcccacaagaagaaccuguacgaccacgcccugaugagcaucaucagcaccuuccaccugagcauccccaacuucaaccaguacgaggccaugagcugcgacuucaacggcggcaagaucagcgugcaguacaaccugagccacaccuacgccguggacgccgccaaccacugcggcaccaucgccaacggcgugcugcagaccuucaugagaauggccuggggcggcagcuacaucgcccuggacagcggcaagggcagcugggacugcaucaugaccagcuaccaguaccugaucauccagaacaccaccugggaggaccacugccaguucagcagacccagccccaucggcuaccugggccugcugagccagagaaccagagacaucuacaucagcagaagacugcugggcaccuucaccuggacccugagcgacagcgagagcaacgagacccccggcggcuacugccugaccagauggaugcugaucgaggccgagcugaagugcuucggcaacaccgccguggccaagugcaacgagaagcacgacgaggaguucugcgacaugcugagacuguucgacuucugcaagcaggccaucagaagacugaaggccgaggcccagaugagcauccagcugaucaacaaggccgugaacgcccugaucaacgaccagcugaucaugaagaaccaccugagagacaucaugggcauccccuacugcaacuacagcaaguacugguaccugaaccacaccgugaccggcagaaccagccugcccagaugcuggcuggugagcaacggcagcuaccugaacgagacccacuucagcgacgacaucgagcagcaggccgacaacaugaucaccgagcugcugcagaaggaguacauggacagacagggcaagaccccccugggccugguggaccuguucguguucagcaccagcuucuaccugaucagcaucuuccugcaccuggugaagauccccacccacagacacgugaucggcaagcccugccccaagccccacagacugaaccacaugggcaucugcagcugcggccuguacaagcaccccggcgugcccgugaaguggaagagaugaggacuaguuauaagacugacuagcccgaugggccucccaacgggcccuccuccccuccuugcaccgagauuaaucaaaggcucuuuucagagccaccaaaaaaaaaaaaaaaaaaaaaaaaaaaaaaaaaaaaaaaaaaaaaaaaaaaaaaaaaaaaaaaaaaaaaaaaaaaaaaaaaaaaaaaaaaaaaaaaaaaaa

SEQ ID NO: 38036 - RNA, 1686 nt, Artificial Sequence
  mRNA product Design i-3 (hSL-A100) comprising derived and/or modified sequence from LASV(LASV035-NIG-2009;Clade II)__AIT17588__GPCmut10 (opt4)
aggagaaagcuuaccaugggccagaucaucaccuucuuccaggaggugccccacgugaucgaggaggugaugaacaucgugcugaucgcccugagccugcuggccauccugaagggcaucuacaacguggccaccugcggccuguucggccuggugagcuuccugcugcugugcggcagaagcugcagcaccaccuacaagggcguguacgagcugcagacccuggagcuggacauggccagccugaacaugugcaugccccugagcugcaccaagaacaacagccaccacuacaucauggugggcaacgagaccggccuggagcugacccugaccaacaccagcaucaucaaccacaaguucugcaaccugagcgacgcccacaagaagaaccuguacgaccacgcccugaugagcaucaucagcaccuuccaccugagcauccccaacuucaaccaguacgaggccaugagcugcgacuucaacggcggcaagaucagcgugcaguacaaccugagccacgccuacgccguggacgccgccaaccacugcggcaccaucgccaacggcgugcugcagaccuucaugagaauggccuggggcggcagcuacaucgcccuggacagcggcaagggcagcugggacugcaucaugaccagcuaccaguaccugaucauccagaacaccaccugggaggaccacugccaguucagcagacccagccccaucggcuaccugggccugcugagccagagaaccagagacaucuacaucagcagaagacugcugggcaccuucaccuggacccugagcgacagcgagggcaacgagacccccggcggcuacugccugaccagauggaugcugaucgaggccgagcugaagugcuucggcaacaccgccguggccaagugcaacgagaagcacgacgaggaguucugcgacaugcugagacuguucgacuucugcaagcaggccaucagaagacugaaggccgaggcccagaugagcauccagcugaucaacaaggccgugaacgcccugaucaacgaccagcugaucaugaagaaccaccugagagacaucaugggcauccccuacugcaacuacagcaaguacugguaccugaaccacaccgugaccggcaagaccagccugcccagaugcuggcuggugagcaacggcagcuaccugaacgagacccacuucagcgacgacaucgagcagcaggccgacaacaugaucaccgagcugcugcagaaggaguacaucgacagacagggcaagaccccccugggccugguggaccuguucguguucagcaccagcuucuaccugaucagcaucuuccugcaccuggugaagauccccacccacagacacgugaucggcaagcccugccccaagccccacagacugaaccacaugggcaucugcagcugcggccuguacaagcaccccggcgugcccgugaaguggaagagaugaggacuaguuauaagacugacuagcccgaugggccucccaacgggcccuccuccccuccuugcaccgagauuaaucaaaggcucuuuucagagccaccaaaaaaaaaaaaaaaaaaaaaaaaaaaaaaaaaaaaaaaaaaaaaaaaaaaaaaaaaaaaaaaaaaaaaaaaaaaaaaaaaaaaaaaaaaaaaaaaaaaaa

SEQ ID NO: 38037 - RNA, 1686 nt, Artificial Sequence
  mRNA product Design i-3 (hSL-A100) comprising derived and/or modified sequence from LASV(LASV1000-NIG-2009;Clade II)__AIT17782__GPCmut10 (opt4)
aggagaaagcuuaccaugggccagaucaucaccuucuuccaggaggugccccacgugaucgaggaggugaugaacaucgugcugaucgcccugagccugcuggccauccugaagggcaucuacaacguggccaccugcggccuguucggccuggugagcuuccugcugcugugcggcagaagcugcagcaccaccuacaagggcguguacgagcugcagacccuggagcuggacauggccagccugaacaugugcaugccccugagcugcaccaagaacaacagccaccacuacaucauggugggcaacgagaccggccuggagcugacccugaccaacaccagcaucaucaaccacaaguucugcaaccugagcgacgcccacaagaagaaccuguacgaccacgcccugaugagcaucaucagcaccuuccaccugagcauccccaacuucaaccaguacgaggccaugagcugcgacuucaacggcggcaagaucagcgugcaguacaaccugagccacaccuacgccguggacgccgccaaccacugcggcaccaucgccaacggcgugcugcagaccuucaugagaauggccuggggcggcagcuacaucgcccuggacagcggcaagggcagcugggacugcaucaugaccagcuaccaguaccugaucauccagaacaccaccugggaggaccacugccaguucagcagacccagccccaucggcuaccugggccugcugagccagagaaccagagacaucuacaucagcagaagacugcugggcaccuucaccuggacccugagcgacagcgagggcaacgagacccccggcggcuacugccugaccagauggaugcugaucgaggccgagcugaagugcuucggcaacaccgccguggccaagugcaacgagaagcacgacgaggaguucugcgacaugcugagacuguucgacuucugcaagcaggccaucaagagacugaagaccgaggcccagaugagcauccagcugaucaacaaggccgugaacgcccugaucaacgaccagcugaucaugaagaaccaccugagagacaucaugggcauccccuacugcaacuacagcaaguacugguaccugaaccacaccgugaccggcaagaccagccugcccagaugcuggcuggugagcaacggcagcuaccugaacgagacccacuucagcgacgacaucgagcagcaggccgacaacaugaucaccgagcugcugcagaaggaguacaucgacagacagggcaagaccccccugggccugguggaccuguucguguucagcaccagcuucuaccugaucagcaucuuccugcaccuggugaagauccccacccacagacacguggugggcaagcccugccccaagccccacagacugaaccacaugggcaucugcagcugcggccuguacaagcaccccggcgugcccgugaaguggaagagaugaggacuaguuauaagacugacuagcccgaugggccucccaacgggcccuccuccccuccuugcaccgagauuaaucaaaggcucuuuucagagccaccaaaaaaaaaaaaaaaaaaaaaaaaaaaaaaaaaaaaaaaaaaaaaaaaaaaaaaaaaaaaaaaaaaaaaaaaaaaaaaaaaaaaaaaaaaaaaaaaaaaaa

SEQ ID NO: 38038 - RNA, 1686 nt, Artificial Sequence
  mRNA product Design i-3 (hSL-A100) comprising derived and/or modified sequence from LASV(LASV221-NIG-2010;Clade II)__AIT17624__GPCmut10 (opt4)
aggagaaagcuuaccaugggccagaucaucaccuucuuccaggaggugccccacgugaucgaggaggugaugaacaucgugcugaucgcccugagccugcuggccauccugaagggcaucuacaacguggccaccugcggccuguucggccuggugagcuuccugcugcugugcggcagaagcugcagcaccaccuacaagggcguguacgagcugcagacccuggagcuggacauggccagccugaacaugugcaugccccugagcugcaccaagaacaacagccaccacuacaucauggugggcaacgagaccggccuggagcugacccugaccaacaccagcaucaucaaccacaaguucugcaaccugagcgacgcccacaagaagaaccuguacgaccacgcccugaugagcaucaucagcaccuuccaccugagcauccccaacuucaaccaguacgaggccaugagcugcgacuucaacggcggcaagaucagcgugcaguacaaccugagccacaccuacgccaucgacgccgccaaccacugcggcaccaucgccaacggcgugcugcagaccuucaugagaauggccuggggcggcagcuacaucgcccuggacagcggcaagggcagcugggacugcaucaugaccagcuaccaguaccugaucauccagaacaccaccugggaggaccacugccaguucagcagacccagccccaucggcuaccugggccugcugagccagagaaccagagacaucuacaucagcagaagacugcugggcaccuucaccuggacccugagcgacagcgagggcaacgagacccccggcggcuacugccugaccagauggaugcugaucgaggccgagcugaagugcuucggcaacaccgccguggccaagugcaacgagaagcacgacgaggaguucugcgacaugcugagacuguucgacuucugcaagcaggccaucagaagacugaagaccgaggcccagaugagcauccagcugaucaacaaggccgugaacgcccugaucaacgaccagcugaucaugaagaaccaccugagagacaucaugggcauccccuacugcaacuacagcaaguacugguaccugaaccacaccgugaccggcaagaccagccugcccagaugcuggcuggugagcaacggcagcuaccugaacgagacccacuucagcgacgacaucgagcagcaggccgacaacaugaucaccgagaugcugcagaaggaguacauggacagacagggcaagaccccccugggccugguggaccuguucguguucagcaccagcuucuaccugaucagcaucuuccugcaccuggugaagauccccacccacagacacgugaucggcaagcccugccccaagccccacagacugaaccacaugggcaucugcagcugcggccuguacaagcaccccggcgugcccgugaaguggaagagaugaggacuaguuauaagacugacuagcccgaugggccucccaacgggcccuccuccccuccuugcaccgagauuaaucaaaggcucuuuucagagccaccaaaaaaaaaaaaaaaaaaaaaaaaaaaaaaaaaaaaaaaaaaaaaaaaaaaaaaaaaaaaaaaaaaaaaaaaaaaaaaaaaaaaaaaaaaaaaaaaaaaaa

SEQ ID NO: 38039 - RNA, 1686 nt, Artificial Sequence
  mRNA product Design i-3 (hSL-A100) comprising derived and/or modified sequence from LASV(LASV237-NIG-2010;Clade II)__AIT17638__GPCmut10 (opt4)
aggagaaagcuuaccaugggccagaucaucaccuucuuccaggaggugccccacgugaucgaggaggugaugaacaucgugcugaucgcccugagccugcuggccauccugaagggcaucuacaacguggccaccugcggccuguucggccuggugagcuuccugcugcugugcggcagaagcugcagcaccaccuacaagggcguguacgagcugcagacccuggagcuggacauggccagccugaacaugugcaugccccugagcugcaccaagaacaacagccaccacuacaucauggugggcaacgagaccggccuggagcugacccugaccaacaccagcaucaucaaccacaaguucugcaaccugagcgacgcccacaagaaggaccuguacgaccacgcccugaugagcaucaucagcaccuuccaccugagcauccccaacuucaaccaguacgaggccaugagcugcgacuucaacggcggcaagaucagcgugcaguacaaccugagccacaccuacgccguggacgccgccaaccacugcggcaccaucgccaacggcgugcugcagaccuucaugagaauggccuggggcggcagcuacaucgcccuggacagcggcaagggcagcugggacugcaucaugaccagcuaccaguaccugaucauccagaacaccaccugggaggaccacugccaguucagcagacccagccccaucggcuaccugggccugcugagccagagaaccagagacaucuacaucagcagaagacugcugggcaccuucaccuggacccugagcgacagcgagggcaacgagacccccggcggcuacugccugaccagauggaugcugaucgaggccgagcugaagugcuucggcaacaccgccguggccaagugcaacgagaagcacgacgaggaguucugcgacaugcugagacuguucgacuucugcaagcaggccaucagaagacugaagaccgaggcccagaugagcauccagcugaucaacaaggccgugaacgcccugaucaacgaccagcugaucaugaagaaccaccugagagacaucaugggcauccccuacugcaacuacagcaaguacugguaccugaaccacaccgugaccggcaagaccagccugcccagaugcuggcuggugagcaacggcagcuaccugaacgagacccacuucagcgacgacaucgagcagcaggccgacaacaugaucaccgagcugcugcagaaggaguacauggacagacagggcaagaccccccugggccugguggaccuguucguguucagcaccagcuucuaccugaucagcaucuuccugcaccugaucaagauccccacccacagacacaucaccggcaagcccugccccaagccccacagacugaaccacaugggcaucugcagcugcggccuguacaagcaccccggcgugcccgugaaguggaagagaugaggacuaguuauaagacugacuagcccgaugggccucccaacgggcccuccuccccuccuugcaccgagauuaaucaaaggcucuuuucagagccaccaaaaaaaaaaaaaaaaaaaaaaaaaaaaaaaaaaaaaaaaaaaaaaaaaaaaaaaaaaaaaaaaaaaaaaaaaaaaaaaaaaaaaaaaaaaaaaaaaaaaa

SEQ ID NO: 38040 - RNA, 1686 nt, Artificial Sequence
  mRNA product Design i-3 (hSL-A100) comprising derived and/or modified sequence from LASV(LASV253-NIG-2011;Clade II)__AIT17670__GPCmut10 (opt4)
aggagaaagcuuaccaugggccagaucaucaccuucuuccaggaggugccccacgugaucgaggaggugaugaacaucgugcugaucgcccugagccugcuggccauccugaagggcaucuacaacguggccaccugcggccuguucggccuggugagcuuccugcugcugugcggcagaagcugcagcaccaccuacaagggcguguacgagcugcagacccuggagcuggacauggccagccugaacaugugcaugccccugagcugcaccaagaacaacagccaccacuacaucauggugggcaacgagaccggccuggagcugacccugaccaacaccagcaucaucaaccacaaguucugcaaccugagcgacgcccacaagaagaaccuguacgaccacgcccugaugagcaucaucagcaccuuccaccugagcauccccaacuucaaccaguacgaggccaugagcugcgacuucaacggcggcaagaucagcgugcaguacaaccugagccacaccuacgccguggacgccgccaaccacugcggcaccaucgccaacggcgugcugcagaccuucaugagaauggccuggggcggcagcuacaucgcccuggacagcggcaagggcagcugggacugcaucaugaccagcuaccaguaccugaucauccagaacaccaccugggaggaccacugccaguucagcagacccagccccaucggcuaccugggccugcugagccagagaaccagagacaucuacaucagcagaagacugcugggcaccuucaccuggacccugagcgacagcgagggcaacgagacccccggcggcuacugccugaccagauggaugcugaucgaggccgagcugaagugcuucggcaacaccgccguggccaagugcaacgagaagcacgacgaggaguucugcgacaugcugagacuguucgacuucugcaagcaggccaucagaagacugaaggccgaggcccagaugagcauccagcugaucaacaaggccgugaacgcccugaucaacgaccagcugaucaugaagaaccaccugagagacaucaugggcauccccuacugcaacuacagcaaguacugguaccugaaccacaccgugaccggcagaaccagccugcccagaugcuggcuggugagcaacggcagcuaccugaacgagacccacuucagcgacgacaucgagcagcaggccgacaacaugaucaccgagcugcugcagaaggaguacaucgacagacagggcaagaccccccugggccugguggaccuguucguguucagcaccagcuucuaccugaucagcaucuuccugcaccuggugaagauccccacccacagacacaucaucggcaagcccugccccaagccccacagacugaaccacaugggcaucugcagcugcggccuguacaagcaccccggcgugcccgugaaguggaagagaugaggacuaguuauaagacugacuagcccgaugggccucccaacgggcccuccuccccuccuugcaccgagauuaaucaaaggcucuuuucagagccaccaaaaaaaaaaaaaaaaaaaaaaaaaaaaaaaaaaaaaaaaaaaaaaaaaaaaaaaaaaaaaaaaaaaaaaaaaaaaaaaaaaaaaaaaaaaaaaaaaaaaa

SEQ ID NO: 38041 - RNA, 1686 nt, Artificial Sequence
  mRNA product Design i-3 (hSL-A100) comprising derived and/or modified sequence from LASV(LASV254-NIG-2011;Clade II)__AIT17674__GPCmut10 (opt4)
aggagaaagcuuaccaugggccagaucaucaccuucuuccaggaggugccccacgugaucgaggaggugaugaacaucgugcugaucgcccugagccugcuggccauccugaagggcaucuacaacguggccaccugcggccuguucggccuggugagcuuccugcugcugugcggcagaagcugcagcaccaccuacaagggcguguacgagcugcagacccuggagcuggacaugaccaaccugaacaugugcaugccccugagcugcaccaagaacaacagccaccacuacaucauggugggcaacgagaccggccuggagcugacccugaccaacaccagcaucaucaaccacaaguucugcaaccugagcgacgcccacaagaagaaccuguacaaccacgcccugaugagcaucaucagcaccuuccaccugagcauccccaacuucaaccaguacgaggccaugagcugcgacuucaacggcggcaagaucagcgugcaguacaaccugagccacagcuacgccguggacgccgccaaccacugcggcaccaucgccaacggcgugcugcagaccuucaugagaauggccuggggcggcagcuacaucgcccuggacagcggcaagggcaacugggacugcaucaugaccagcuaccaguaccugaucauccagaacaccaccugggaggaccacugccaguucagcagacccagccccaucggcuaccugggccugcugagccagagaaccagagacaucuacaucagcagaagacugcugggcaccuucaccuggacccugagcgacagcgagggcaacgagacccccggcggcuacugccugaccagauggaugcugaucgaggccgagcugaagugcuucggcaacaccgccguggccaagugcaacgagaagcacgacgaggaguucugcgacaugcugagacuguucgacuucugcaagcaggccaucagaagacugaagaccgaggcccaggccaacauccagcugaucaacaaggccgugaacgcccugaucaacgaccagcugaucaugaagaaccaccugagagacaucaugggcauccccuacugcaacuacagcaaguacugguaccugaaccacaccgugaccggcaagaccagccugcccagaugcuggcuggugagcaacggcagcuaccugaacgagacccacuucagcgacgacaucgagcagcaggccgacaacaugaucaccgagcugcugcagaaggaguacauggacagacagggcaagaccccccugggccugguggaccuguucguguucagcaccagcuucuaccugaucagcaucuuccugcaccuggugaagauccccacccacagacacgugaucggcaagcccugccccaagccccacagacugaaccacaugggcaucugcagcugcggccuguacaagcaccccggcgugcccgugaaguggaagagaugaggacuaguuauaagacugacuagcccgaugggccucccaacgggcccuccuccccuccuugcaccgagauuaaucaaaggcucuuuucagagccaccaaaaaaaaaaaaaaaaaaaaaaaaaaaaaaaaaaaaaaaaaaaaaaaaaaaaaaaaaaaaaaaaaaaaaaaaaaaaaaaaaaaaaaaaaaaaaaaaaaaaa

SEQ ID NO: 38042 - RNA, 1686 nt, Artificial Sequence
  mRNA product Design i-3 (hSL-A100) comprising derived and/or modified sequence from LASV(Nig08-A19;Clade III)__ADU56618__GPCmut10 (opt4)
aggagaaagcuuaccaugggccagaucgugaccuucuuccaggaggugccccacgugaucgaggaggugaugaacaucgugcugaucgcccugagcauccuggccauccugaagggccuguacaacaucgccaccugcggccugaucggccuggugaccuuccugcugcugagcggcagaagcugcagcaugaccuacaagggcguguacgagcugcagacccuggagcugaacaugaacacccugaacaugugcaugccccugagcugcaccaagaacaacagccaccacuacaucauggugggcaacgagaccggccuggagcugacccugaccaacaccagccugcugcaccacaaguucugcaaccugagcgacgcccacaagaagaaccuguacgaccacacccugaugagcaucaucagcaccuuccaccugagcauccccaacuucaaccaguacgaggccaugagcugcgacuucaacggcggcaagaucaccgugcaguacaaccugagccacagcuacgccaucgacgccgccaaccacugcggcaccguggccaacggcgugcugcagaccuucaugagaauggccuggggcggcagcuacaucgcccuggacagcggcagaggcaagugggacugcaucaugaccagcuaccaguaccugaucauccagaacaccaccugggaggaccacugccaguucagcagacccagccccaucggcuaccugggccugcugagccagagaaccagagacaucuacaucagcagaagacugcugggcaccuucaccuggacccugagcgacagcgagggcaacgagacccccggcggcuacugccugaccagauggaugcugaucgaggccgagcugaagugcuucggcaacaccgccguggccaagugcaacgagaagcacgacgaggaguucugcgacaugcugagacuguucgacuucugcaagcaggccaucagaagacugaaggccgaggcccagaugagcauccagcugaucaacaaggccgugaacgcccugaucaacgaccagcugaucaugaagaaccaccugagagacaucaugggcauccccuacugcaacuacagcaaguacugguaccugaaccacaccagcaccggcagaaccagccugcccagaugcuggcuggugagcaacggcagcuaccugaacgagacccacuucagcgacgacaucgagcagcaggccgacaacaugaucaccgagaugcugcagaaggaguaccuggacagacagggcaagaccccccugggccugguggaccuguucguguucagcaccagcuucuaccugaucagcaucuuccugcaccuggugaagauccccacccacagacacaucgugggcaagcccugccccaagccccacagacugaaccacaugggcaucugcagcugcggccuguacaagcagcccggcgugcccgugagauggaagagaugaggacuaguuauaagacugacuagcccgaugggccucccaacgggcccuccuccccuccuugcaccgagauuaaucaaaggcucuuuucagagccaccaaaaaaaaaaaaaaaaaaaaaaaaaaaaaaaaaaaaaaaaaaaaaaaaaaaaaaaaaaaaaaaaaaaaaaaaaaaaaaaaaaaaaaaaaaaaaaaaaaaaa

SEQ ID NO: 38043 - RNA, 1689 nt, Artificial Sequence
  mRNA product Design i-3 (hSL-A100) comprising derived and/or modified sequence from LASV(G1180-SLE-2010;Clade IV)__AIT17168__GPCmut10 (opt4)
aggagaaagcuuaccaugggccagaucgugaccuucuuccaggaggugccccacgugaucgaggaggugaugaacaucgugcugaucgcccugagcauccuggccgugcugaagggccuguacaacuucgccaccugcggccuggugggccugcugaccuuccugcugcugugcggcagaagcugcaccgccagcagauacaagggcguguacgagcugcagacccuggagcugaacauggagacccugaacaugugcaugccccugagcugcaccaagaacaacagccaccacuacaucauggugggcaacgagaccggccuggagcugacccugaccaacaccagcaucaucaaccacaaguucugcaaccugagcgacgcccacaagaagaaccuguacgaccacgcccugaugagcaucaucagcaccuuccaccugagcauccccaacuucaaccaguacgaggccaugagcugcgacuucaacggcggcaagaucagcgugcaguacaaccugagccacagcuacgccggcgacgccgccaaccacugcggcaccguggccaacggcgugcugcagaccuucaugagaauggccuggggcggcagcuacaucgcccuggacagcggccacggcagcugggacugcaucaugaccagcuaccaguaccugaucauccagaacaccaccugggaggaccacugccaguucagcagacccagccccaucggcuaccugggccugcugagccagagaaccagagacaucuacaucagcagaagacugcugggcaccuucaccuggacccugagcgacagcgagggcaaggacacccccggcggcuacugccugaccagauggaugcugaucgaggccgagcugaagugcuucggcaacaccgccguggccaagugcaacgagaagcacgacgaggaguucugcgacaugcugagacuguucgacuucugcaagcaggccauccagagacugaaggccgaggcccagaugagcauccagcugaucaacaaggccgugaacgcccugaucaacgaccagcugaucaugaagaaccaccugagagacaucaugggcauccccuacugcaacuacagcaaguacugguaccugaaccacaccaccaccggcaagaccagccugcccaagugcuggcuggugagcaacggcagcuaccugaacgagacccacuucagcgacgacaucgagcagcaggccgacaacaugaucaccgagaugcugcagaaggaguacauggagagacagggcaagaccccccugggccugguggaccuguucguguucagcaccagcuucuaccugaucagcaucuuccugcaccuggugaagauccccacccacagacacaucgugggcaagagcugccccaagccccacagacugaaccacaugggcaucugcagcugcggccuguacaagcagcccggcgugcccgugaaguggaagagaugaggacuaguuauaagacugacuagcccgaugggccucccaacgggcccuccuccccuccuugcaccgagauuaaucaaaggcucuuuucagagccaccaaaaaaaaaaaaaaaaaaaaaaaaaaaaaaaaaaaaaaaaaaaaaaaaaaaaaaaaaaaaaaaaaaaaaaaaaaaaaaaaaaaaaaaaaaaaaaaaaaaaa

SEQ ID NO: 38044 - RNA, 1689 nt, Artificial Sequence
  mRNA product Design i-3 (hSL-A100) comprising derived and/or modified sequence from LASV(G1442-SLE-2011;Clade IV)__AIT17180__GPCmut10 (opt4)
aggagaaagcuuaccaugggccagaucgugaccuucuuccaggaggugccccacgugaucgaggaggugaugaacaucgugcugaucgcccugagcauccuggccgugcugaagggccuguacaacguggccaccugcggccugaucggccuggugaccuuccugcugcugugcggcagaagcugcaccaccacccuguacaagggcguguacgagcugcagacccuggagcugaacauggagacccugaacaugugcaugccccugagcugcaccaagaacaacagccaccacuacaucagagugggcaacgagaccggccuggagcugacccugaccaacaccagcaucaucaaccacaaguucugcaaccugagcgacgcccacaagaagaaccuguacgaccacgcccugaugagcaucaucagcaccuuccaccugagcauccccaacuucaaccaguacgaggccaugagcugcgacuucaacggcggcaagaucagcgugcaguacaaccugagccacagcuacgccggcgacgccgccaaccacugcggcaccguggccaacggcgugcugcagaccuucaugagaauggccuggggcggcagcuacaucgcccuggacagcggcagaggcaacugggacugcaucaugaccagcuaccaguaccugaucauccagaacaccaccugggacgaccacugccaguucagcagacccagccccaucggcuaccugggccugcugagccagagaaccagagacguguacaucagcagaagacugcugggcaccuucaccuggacccugagcgacagcgagggcaaggacacccccggcggcuacugccugaccagauggaugcugaucgaggccgagcugaagugcuucggcaacaccgccguggccaagugcaacgagaagcacgacgaggaguucugcgacaugcugagacuguucgacuucugcaagcaggccauccagagacugaaggccgaggcccagaugagcauccagcugaucaacaaggccgugaacgcccugaucaacgaccagcugaucaugaagaaccaccugagagacaucaugggcauccccuacugcaacuacagcaaguacugguaccugaacaacaccgccaccggcaagaccagccugcccaagugcuggcugaucagcaacggcagcuaccugaacgagacccacuucagcgacgacaucgagcaggaggccgacaacaugaucaccgagaugcugcagaaggaguacauggagagacagggcaagaccccccugggccugguggaccuguucguguucagcaccagcuucuaccugaucagcaucuuccugcaccuggugaagauccccacccacagacacaucgugggcaagagcugccccaagccccacagacugaaccacaugggcaucugcagcugcggccuguacaagcagcccggcgugcccgugagauggaagagaugaggacuaguuauaagacugacuagcccgaugggccucccaacgggcccuccuccccuccuugcaccgagauuaaucaaaggcucuuuucagagccaccaaaaaaaaaaaaaaaaaaaaaaaaaaaaaaaaaaaaaaaaaaaaaaaaaaaaaaaaaaaaaaaaaaaaaaaaaaaaaaaaaaaaaaaaaaaaaaaaaaaaa

SEQ ID NO: 38045 - RNA, 1689 nt, Artificial Sequence
  mRNA product Design i-3 (hSL-A100) comprising derived and/or modified sequence from LASV(G3010-SLE-2013;Clade IV)__AIT17344__GPCmut10 (opt4)
aggagaaagcuuaccaugggccagaucgugaccuucuuccaggaggugccccacgugaucgaggaggugaugaacaucgugcugaucgcccugagcauccuggccgugcugaagggccuguacaacuucgccaccugcggccuggugggccuggugaccuuccugcugcugugcggcagaagcugcaccaccagccuguacaagggcguguacgagcugcagacccuggagcugaacauggagacccugaacaugugcaugccccugagcugcaccaagaacaacagccaccacuacaucauggugggcaacgagaccggccuggagcugacccugaccaacaccagcaucaucaaccacaaguucugcaaccugagcgacgcccacaagaagaaccuguacaaccacgcccugaugagcaucaucagcaccuuccaccugagcauccccaacuucaaccaguacgaggccaugagcugcgacuucaacggcggcaagaucagcgugcaguacaaccugagccacagcuacgccggcgacgccgccagccacugcggcaccguggccaacggcgugcugcagaccuucaugagaauggccuggggcggcagcuacaucgcccuggacagcggcuacggcaagugggacugcaucaugaccagcuaccaguaccugaucauccagaacaccaccugggaggaccacugccaguucagcagacccagccccaucggcuaccugggccugcugagccagagaaccagagacaucuacaucagcagaagacugcugggcaccuucaccuggacccugagcgacagcgagggcaaggacacccccggcggcuacugccugaccagauggaugcugaucgaggccgagcugaagugcuucggcaacaccgccguggccaagugcaacgagaagcacgacgaggaguucugcgacaugcugagacuguucgacuucugcaagcaggccauccagagacugaagaccgaggcccagaugagcauccagcugaucaacaaggccgugaacgcccugaucaacgaccagcugaucaugaagaaccaccugagagacaucaugggcauccccuacugcaacuacagcaaguacugguaccugaaccacaccaccaccggcaagaccagccugcccaagugcuggcuggugagcaacggcagcuaccugaacgagacccacuucagcgacgacaucgagcagcaggccgacaacaugaucaccgagaugcugcagaaggaguacauggagagacagggcaagaccccccugggccugguggaccuguucguguucagcaccagcuucuaccugaucagcaucuuccugcaccuggugaagauccccacccacagacacaucgugggcaagagcugccccaagccccacagacugaaccacaugggcaucugcagcugcggccuguacaagcagcccggcgugcccgugagauggaagagaugaggacuaguuauaagacugacuagcccgaugggccucccaacgggcccuccuccccuccuugcaccgagauuaaucaaaggcucuuuucagagccaccaaaaaaaaaaaaaaaaaaaaaaaaaaaaaaaaaaaaaaaaaaaaaaaaaaaaaaaaaaaaaaaaaaaaaaaaaaaaaaaaaaaaaaaaaaaaaaaaaaaaa

SEQ ID NO: 38046 - RNA, 1689 nt, Artificial Sequence
  mRNA product Design i-3 (hSL-A100) comprising derived and/or modified sequence from LASV(G502-SLE-2009;Clade IV)__AIT17126__GPCmut10 (opt4)
aggagaaagcuuaccaugggccagaucgugaccuucuuccaggaggugccccacgugaucgaggaggugaugaacaucgugcugaucgcccugagcauccuggccgugcugaagggccuguacaacuucgccaccugcggccuggugggccugcugaccuuccugcugcugugcggcagaagcugcaccaccggccuguacaagggcguguacgagcugcagacccuggagcugaacauggagacccugaacaugugcaugccccugagcugcaccaagaacaacagccaccacuacaucauggugggcaacgagaccggccuggagcugacccugaccaacaccagcaucaucaaccacaaguucugcaaccugagcgacgcccacaagaagaaccuguacgaccacgcccugaugagcaucaucagcaccuuccaccugagcauccccaacuucaaccaguacgaggccaugagcugcgacuucaacggcggcaagaucagcgugcaguacaaccugagccacagcuacgccggcgacgccgccgaccacugcggcaccguggccaacggcgugcugcagaccuucaugagaauggccuggggcggcagcuacaucgcccuggacagcggcagaggcagaugggacugcaucaugaccagcuaccaguaccugaucauccagaacaccaccugggaggaccacugccaguucagcagacccagccccaucggcuaccugggccugcugagccagagaaccagagacaucuacaucagcagaagacugcugggcaccuucaccuggacccugagcgacagcgagggcaaggacacccccggcggcuacugccugaccagauggaugcugaucgaggccgagcugaagugcuucggcaacaccgccguggccaagugcaacgagaagcacgacgaggaguucugcgacaugcugagacuguucgacuucugcaagcaggccauccagagacugaaggccgaggcccagaugagcauccagcugaucaacaaggccgugaacgcccugaucaacgaccagcuggugaugaagaaccaccugagagacaucaugggcauccccuacugcaacuacagcagauacugguaccugaaccacaccaccaccggcagaaccagccugcccaagugcuggcuggugagcaacggcagcuaccugaacgagacccacuucagcgacgacaucgagcagcaggccgacaacaugaucaccgagaugcugcagaaggaguacauggagagacagggcaagaccccccugggccugguggaccuguucguguucagcaccagcuucuaccugaucagcaucuuccugcaccuggugaagauccccacccacagacacaucgugggcaagagcugccccaagccccacagacugaaccacaugggcaucugcagcugcggccuguacaagcagcccggcgugcccgugaaguggaagagaugaggacuaguuauaagacugacuagcccgaugggccucccaacgggcccuccuccccuccuugcaccgagauuaaucaaaggcucuuuucagagccaccaaaaaaaaaaaaaaaaaaaaaaaaaaaaaaaaaaaaaaaaaaaaaaaaaaaaaaaaaaaaaaaaaaaaaaaaaaaaaaaaaaaaaaaaaaaaaaaaaaaaa

SEQ ID NO: 38047 - RNA, 1689 nt, Artificial Sequence
  mRNA product Design i-3 (hSL-A100) comprising derived and/or modified sequence from LASV(G733-SLE-2010;Clade IV)__AIT17154__GPCmut10 (opt4)
aggagaaagcuuaccaugggccagaucgugaccuucuuccaggaggugccccacgugaucgaggaggugaugaacaucgugcugaucgcccugagcauccuggccgugcugaagggccuguacaacuucgccaccugcggcaucgugggccuggugagcuuccugcugcugugcggcagaagcugcaccaccagccuguacaagggcguguacgagcugcagacccuggagcugaacauggagacccugaacaugugcaugccccugagcugcaccaagaacaacagccaccacuacaucauggugggcaacgagaccggccuggagcugacccugaccaacaccagcaucaucaaccacaaguucugcaaccugagcgacgcccacaagaagaaccuguacgaccacgcccugaugagcaucaucagcaccuuccaccugagcauccccaacuucaaccaguacgaggccaugagcugcgacuucaacggcggcaagaucagcgugcaguacaaccugagccacagcuacgccggcgacgccgccaaccacugcggcaccaucgccaacggcgugcugcagaccuucaugagaauggccuggggcggcagcuacaucgcccuggacagcggcagagacagaugggacugcaucaugaccagcuaccaguaccugaucauccagaacaccaccugggaggaccacugccaguucagcagacccagccccaucggcuaccugggccugcugagccagagaaccagagacaucuacaucagcagaagacugcugggcaccuucaccuggacccugagcgacagcgagggcaaggacacccccggcggcuacugccugaccagauggaugcugaucgaggccgagcugaagugcuucggcaacaccgccguggccaagugcaacgagaagcacgacgaggaguucugcgacaugcugagacuguucgacuucugcaagcaggccauccagagacugaaggccgaggcccagaugagcauccagcugaucaacaaggccgugaacgcccugaucaacgaccagcugaucaugaagaaccaccugagagacaucaugggcauccccuacugcaacuacagcaaguacugguaccugaaccacaccaccaccggcaagaccagccugcccaagugcuggcuggugagcaacggcagcuaccugaacgagacccacuucagcgacgacaucgagcagcaggccgacaacaugaucaccgagaugcugcagaaggaguacauggagagacagggcaagaccccccugggccugguggaccuguucguguucagcaccagcuucuaccugaucagcaucuuccugcaccuggugaagauccccacccacagacacguggugggcaagagcugccccaagccccacagacugaaccacaugggcaucugcagcugcggccuguacggccagcccggcgugcccgugaaguggaagagaugaggacuaguuauaagacugacuagcccgaugggccucccaacgggcccuccuccccuccuugcaccgagauuaaucaaaggcucuuuucagagccaccaaaaaaaaaaaaaaaaaaaaaaaaaaaaaaaaaaaaaaaaaaaaaaaaaaaaaaaaaaaaaaaaaaaaaaaaaaaaaaaaaaaaaaaaaaaaaaaaaaaaa

SEQ ID NO: 38048 - RNA, 1689 nt, Artificial Sequence
  mRNA product Design i-3 (hSL-A100) comprising derived and/or modified sequence from MOPV/LASV reassortant(IGS-1;Clade IV)__AFY05576__GPCmut10 (opt4)
aggagaaagcuuaccaugggccagaucgugaccuucuuccaggaggugccccacgugaucgaggaggugaugaacaucgugcugaucgcccugagcgugcuggccgugcugaagggccuguacaacuucgccaccugcggccuggugggccuggugaccuuccugcugcugugcggcagaagcugcaccaccagccuguacaagggcguguacgagcugcagacccuggagcugaacauggagacccugaacaugugcaugccccugagcugcaccaagaacaacagccaccacuacaucauggugggcaacgagaccggccuggagcugacccugaccaacaccagcaucaucaaccacaaguucugcaaccugagcgacgcccacaagaagaaccuguacgaccacgcccugaugagcaucaucagcaccuuccaccugagcauccccaacuucaaccaguacgaggccaugagcugcgacuucaacggcggcaagaucagcgugcaguacaaccugagccacagcuacgccggcgacgccgccaaccacugcggcaccguggccaacggcgugcugcagaccuucaugagaauggccuggggcggcagcuacaucgcccuggacagcggcagaggcaacugggacugcaucaugaccagcuaccaguaccugaucauccagaacaccaccugggaggaccacugccaguucagcagacccagccccaucggcuaccugggccugcugagccagagaaccagagacaucuacaucagcagaagacugcugggcaccuucaccuggacccugagcgacagcgagggcgaggacacccccggcggcuacugccugaccagauggaugcugaucgaggccgagcugaagugcuucggcaacaccgccguggccaagugcaacgagaagcacgacgaggaguucugcgacaugcugagacuguucgacuucugcaagcaggccauccagagacugaaggccgaggcccagaugagcauccagcugaucaacaaggccgugaacgcccugaucaacgaccagcugaucaugaagaaccaccugagagacaucaugggcauccccuacugcaacuacagcaaguacugguaccugaaccacaccaccaccggcagaaccagccugcccaagugcuggcuggugagcaacggcagcuaccugaacgagacccacuucagcgacgacaucgagcagcaggccgacaacaugaucaccgagaugcugcagaaggaguacauggagagacagggcaagaccccccugggccugguggaccuguucguguucagcaccagcuucuaccugaucagcaucuuccugcaccuggugaagauccccacccacagacacaucgugggcaagagcugccccaagccccacagacugaaccacaugggcaucugcagcugcggccuguacaagcagcccggcgugcccgugaaguggaagagaugaggacuaguuauaagacugacuagcccgaugggccucccaacgggcccuccuccccuccuugcaccgagauuaaucaaaggcucuuuucagagccaccaaaaaaaaaaaaaaaaaaaaaaaaaaaaaaaaaaaaaaaaaaaaaaaaaaaaaaaaaaaaaaaaaaaaaaaaaaaaaaaaaaaaaaaaaaaaaaaaaaaaa

SEQ ID NO: 38049 - RNA, 1689 nt, Artificial Sequence
  mRNA product Design i-3 (hSL-A100) comprising derived and/or modified sequence from LASV(LM765-SLE-2012;Clade IV)__AIT17814__GPCmut10 (opt4)
aggagaaagcuuaccaugggccagaucgugaccuucuuccaggaggugccccacgugaucgaggaggugaugaacaucgugcugaucgcccugagcauccuggccgugcugaagggccuguacaacuucgccaccugcggccuggugggccuggugaccuuccugcugcugugcggcagaagcugcaccaccagccuguacaagggcguguacgagcugcagacccuggagcugaacauggagacccugaacaugugcaugccccugagcugcaccaagaacaacagccaccacuacaucauggugggcaacgagaccggccuggagcugacccugaccaacaccagcaucaucgaccacaaguucugcaaccugagcgacgcccacagaaagaaccuguacgaccacgcccugaugagcaucaucagcaccuuccaccugagcauccccaacuucaaccaguacgaggccaugagcugcgacuucaacggcggcaagaucagcgugcaguacaaccugagccacagcuacgccaaggacgccgccgaccacugcggcaccguggccaacggcgugcugcagaccuucaugagaauggccuggggcggcagcuacaucgcccuggacagcggcagaggcagaugggacugcaucaugaccagcuaccaguaccugaucauccagaacaccaccugggaggaccacugccaguucagcagacccagccccaucggcuaccugggccugcugagccagagaaccagagacaucuacaucagcagaagacugcugggcaccuucaccuggacccugagcgacagcgagggcaaggacacccccggcggcuacugccugaccagauggaugcugaucgaggccgagcugaagugcuucggcaacaccgccguggccaagugcaacgagaagcacgacgaggaguucugcgacaugcugagacuguucgacuucugcaagcaggccauccagagacugaaggccgaggcccagaugagcauccagcugaucaacaaggccgugaacgcccugaucaacgaccagcugaucaugaagaaccaccugagagacaucaugggcauccccuacugcaacuacagcaaguacugguaccugaaccacaccaccaccggcaagaccagccugcccaagugcuggcuggugagcaacggcagcuaccugaacgagacccacuucagcgacgacaucgagcagcaggccgacaacaugaucaccgagaugcugcagaaggaguacauggagagacagggcaagaccccccugggccugguggaccuguucguguucagcaccagcuucuaccugaucagcaucuuccugcaccuggugaagauccccacccacagacacaucgugggcaagcccugccccaagccccacagacugaaccacaugggcaucugcagcugcggccuguacaagcagcccggcgugcccgugaaguggaagagaugaggacuaguuauaagacugacuagcccgaugggccucccaacgggcccuccuccccuccuugcaccgagauuaaucaaaggcucuuuucagagccaccaaaaaaaaaaaaaaaaaaaaaaaaaaaaaaaaaaaaaaaaaaaaaaaaaaaaaaaaaaaaaaaaaaaaaaaaaaaaaaaaaaaaaaaaaaaaaaaaaaaaa

SEQ ID NO: 38050 - RNA, 1689 nt, Artificial Sequence
  mRNA product Design i-3 (hSL-A100) comprising derived and/or modified sequence from LASV(LM776-SLE-2012;Clade IV)__AIT17824__GPCmut10 (opt4)
aggagaaagcuuaccaugggccagaucgugaccuucuuccaggaggugccccacgugaucgaggaggugaugaacaucgugcugaucgcccugagcauccuggccgugcugaagggccuguacaacuucgccaccugcggccuggugggccuggugaccuuccugcugcugugcggcagaagcugcaccaccagcguguacaagggcguguacgagcugcagacccuggagcugaacauggagacccugaacaugugcaugccccugagcugcaccaagaacaacagccaccacuacaucauggugggcaacgagaccggccuggagcugacccugaccaacaccagcaucaucaaccacaaguucugcaaccugagcgacgcccacaagaagaaccuguacgaccacgcccugaugagcaucaucagcaccuuccaccugagcauccccaacuucaaccaguacgaggccaugagcugcgacuucaacggcggcaagaucagcgugcaguacaaccugagccacagcuacgccggcgacgccgccaaccacugcggcaccguggccaacggcgugcugcagaccuucaugagaauggccuggggcggcagcuacaucgcccuggacagcggccacggcaagugggacugcaucaugaccagcuaccaguaccugaucauccagaacaccaccugggaggaccacugccaguucagcagacccagccccaucggcuaccugggccugcugagccagagaaccagagacaucuacaucagcagaagacugcugggcaccuucaccuggacccugagcgacagcgagggcaaggacacccccggcggcuacugccugaccagauggaugcugaucgaggccgagcugaagugcuucggcaacaccgccguggccaagugcaacgagaagcacgacgaggaguucugcgacaugcugagacuguucgacuucugcaagcaggccauccagagacugaaggccgaggcccagaugagcauccagcugaucaacaaggccgugaacgcccugaucaacgaccagcugaucaugaagaaccaccugagagacaucaugggcauccccuacugcaacuacagcaaguacugguaccugaaccacaccaccaccggcaagaccagccugcccaagugcuggcuggugagcaacggcagcuaccugaacgagacccacuucagcgacgacaucgagcagcaggccgacaacaugaucaccgagaugcugcagaaggaguacauggagagacagggcaagaccccccugggccugguggaccuguucguguucagcaccagcuucuaccugaucagcaucuuccugcaccuggugaagauccccacccacagacacaucgugggcaagagcugccccaagccccacagacugaaccacaugggcaucugcagcugcggccuguacaagcagcccggcgugcccgugagauggaagagaugaggacuaguuauaagacugacuagcccgaugggccucccaacgggcccuccuccccuccuugcaccgagauuaaucaaaggcucuuuucagagccaccaaaaaaaaaaaaaaaaaaaaaaaaaaaaaaaaaaaaaaaaaaaaaaaaaaaaaaaaaaaaaaaaaaaaaaaaaaaaaaaaaaaaaaaaaaaaaaaaaaaaa

SEQ ID NO: 38051 - RNA, 1689 nt, Artificial Sequence
  mRNA product Design i-3 (hSL-A100) comprising derived and/or modified sequence from LASV(Mad39;Clade IV)__ANH09722__GPCmut10 (opt4)
aggagaaagcuuaccaugggccagaucgugaccuucuuccaggaggugccccacgugaucgaggaggugaugaacaucgugcugaucgcccugagcauccuggccgugcugaagggccuguacaacguggccaccugcggccugaucggccuggugaccuuccugcugcugugcggcagaagcugcaccaccacccuguacaagggcguguacgagcugcaggcccuggagcugaacauggagacccugaacaugugcaugccccugagcugcaccaagaacaacagccaccacuacaucagagugggcaacgagaccggccuggagcugacccugaccaacaccagccugaucaaccacaaguucugcaaccugagcgacgcccacaagaagaaccuguacgaccacgcccugaugagcaucaucagcaccuuccaccugagcauccccaacuucaaccaguacgaggccaugagcugcgacuucaacgacggcaagaucagcgugcaguacaaccugagccacaccuacgccggcgacaccgccaaccacugcggcaccguggccaacggcgugcugcagaccuucaugagaauggccuggggcggcagcuacaucgcccuggacagcggcagaggcggcugggacugcaucaugaccagcuaccaguaccugaucauccagaacaccaccugggaggaccacugccaguucagcagacccagccccaucggcuaccugggccugcugagccagagaaccagagacaucuacaucagcagaagacugcugggcaccuucaccuggacccugagcgacagcgagggcaaggacacccccggcggcuacugccugaccagauggaugcugaucgaggccgagcugaagugcuucggcaacaccgccguggccaagugcaacgagaagcacgacgaggaguucugcgacaugcugagacuguucgacuucugcaagcaggccauccagagacugaaggccgaggcccagaugagcauccagcugaucaacaaggccgugaacgcccugaucaacgaccagcugaucaugaagaaccaccugagagacaucaugggcauccccuacugcaacuacagcaaguacugguaccugaaccacaccgugaccggcaagaccagccugcccaagugcuggcuggugagcaacggcagcuaccugaacgagacccacuucagcgacgacaucgagcagcaggccgacaacaugaucaccgagaugcugcagaaggaguacauggagagacagggcaagaccccccugggccugguggaccuguucguguucagcaccagcuucuaccugaucagcaucuuccugcaccuggugaagauccccacccacagacacguggugggcaagcccugccccaagccccacagacugaaccacaugggcaucugcagcugcggcuucuacaagcagcccggcgugcccgugagauggaagagaugaggacuaguuauaagacugacuagcccgaugggccucccaacgggcccuccuccccuccuugcaccgagauuaaucaaaggcucuuuucagagccaccaaaaaaaaaaaaaaaaaaaaaaaaaaaaaaaaaaaaaaaaaaaaaaaaaaaaaaaaaaaaaaaaaaaaaaaaaaaaaaaaaaaaaaaaaaaaaaaaaaaaa

SEQ ID NO: 38052 - RNA, 1689 nt, Artificial Sequence
  mRNA product Design i-3 (hSL-A100) comprising derived and/or modified sequence from LASV(Z0947-SLE-2011;Clade IV)__AIT17840__GPCmut10 (opt4)
aggagaaagcuuaccaugggccagaucgugaccuucuuccaggaggugccccacgugaucgaggaggugaugaacaucgugcugaucgcccugagcauccuggccgugcugaagggccuguacaacuucgccaccugcggccuggugggccuggugaccuuccugcugcugugcggcagaagcugcaccaucagccuguacaagggcguguacgagcugcagacccuggagcugaacauggagacccugaacaugugcaugccccugagcugcaccaagaacaacagccaccacuacaucauggugggcaacgagaccggccuggagcugacccugaccaacaccagcaucaucaaccacaaguucugcaaccugagcgacgcccacaagaagaaccuguacgaccacgcccugaugagcaucaucagcaccuuccaccugagcauccccaacuucaaccaguacgaggccaugagcugcgacuucaacggcggcaagaucagcgugcaguacaaccugagccacagcuacgccggcgacgccgccaaccacugcggcaccguggccaacggcgugcugcagaccuucaugagaauggccuggggcggcagcuacaucgcccuggacagcggcagagacagaugggacugcaucaugaccagcuaccaguaccugaucauccagaacaccaccugggaggaccacugccaguucagcagacccagccccaucggcuaccugggccugcugagccagagaaccagagacaucuacaucagcagaagacugcugggcaccuucaccuggacccugagcgacagcgagggcaaggacacccccggcggcuacugccugaccagauggaugcugaucgaggccgagcugaagugcuucggcaacaccgccguggccaagugcaacgagaagcacgacgaggaguucugcgacaugcugagacuguucgacuucugcaagcaggccauccagagacugaaggccgaggcccagaugagcauccagcugaucaacaaggccgugaacgcccugaucaacgaccagcugaucaugaagaaccaccugagagacaucaugggcauccccuacugcaacuacagcaaguacugguaccugaaccacaccaccaccggcaagaccagccugcccaagugcuggcuggugagcaacggcagcuaccugaacgagacccacuucagcgacgacaucgagcagcaggccgacaacaugaucaccgagaugcugcagaaggaguacauggagagacagggcaagaccccccugggccugguggaccuguucguguucagcaccagcuucuaccugaucagcaucuuccugcaccuggugaagauccccacccacagacacaucgugggcaagcccugccccaagccccacagacugaaccacaugggcaucugcagcugcggccuguacaagcagcccggcgugcccgugaaguggaagagaugaggacuaguuauaagacugacuagcccgaugggccucccaacgggcccuccuccccuccuugcaccgagauuaaucaaaggcucuuuucagagccaccaaaaaaaaaaaaaaaaaaaaaaaaaaaaaaaaaaaaaaaaaaaaaaaaaaaaaaaaaaaaaaaaaaaaaaaaaaaaaaaaaaaaaaaaaaaaaaaaaaaaa

SEQ ID NO: 38053 - RNA, 1689 nt, Artificial Sequence
  mRNA product Design i-3 (hSL-A100) comprising derived and/or modified sequence from LASV(Josiah;Clade IV)__NP_694870__GPCmut10 (opt5)
aggagaaagcuuaccaugggccagaucgugaccuucuuucaagaggucccccacguuauugaagaggugaugaacaucgugcugauugcccucagcguccuggcugugcuuaaggggcuguacaauuucgccacaugcggacucguuggccuggugacguuucuucugcucugugggagauccugcaccacaucucuguauaaaggagucuacgaacugcagacccucgagcugaacauggaaacacuuaauauguguaugccucugagcugcaccaagaacaauucccaucacuauaucauggugggcaacgagacagggcucgagcugacccuuacgaauaccucuauuaucaaccauaaauucuguaaucugagcgacgcgcacaagaaaaaccucuacgaucaugcucugauguccaucauuucuacauuucaccugagcaucccgaauuucaaccaguaugaagccauguccugcgacuuuaauggaggcaagauuagcguucaguacaaccucucucacuccuaugccggcgaugcugccaaucauugugggaccguggcuaacggaguccugcaaacauucaugcggauggccuggggcgggagcuacaucgcgcuugacucuggacgcggcaacugggauugcauuaugaccuccuaccaguaucugaucauucagaauacgacaugggaggaccacugucaguuuagcagacccucuccuaucggguaccucggacugcuuucccaacggacccgcgauaucuauauuagcagacggcugcucggcacauucaccuggacccuguccgacucugaaggcaaggauacacccgggggauacugccugacgcgcuggaugcucaucgaggccgagcugaaauguuuuggcaacaccgcuguggccaagugcaaugaaaaacaugacgaggaguucugcgauaugcuuagacuguuugacuucuguaagcaggcuauucagcggcucaaagccgaagcgcagaugagcauccaacugauuaacaaggccgugaaugcucuuaucaacgaucagcugaucaugaagaaucaccuccgcgacauuauggggaucccuuauugcaacuacuccaaauauugguaccugaaucacacaaccacaggaagaaccagccugcccaaguguuggcucgucucuaacggcuccuaccugaaugaaacgcauuucagcgacgauauugagcagcaagccgacaacaugaucacagagaugcuucagaaagaauauauggagcggcaggggaagaccccucugggacucguugaucuguuuguguucucuaccagcuuuuaccugauuuccaucuuccuucaccucgugaaaaucccgacacaucgccacauugucggcaagucuugccccaaaccucauagacugaaucacaugggcaucuguagcugcgggcuguauaagcagcccggagugccuguuaaguggaaacggugaggacuaguuauaagacugacuagcccgaugggccucccaacgggcccuccuccccuccuugcaccgagauuaaucaaaggcucuuuucagagccaccaaaaaaaaaaaaaaaaaaaaaaaaaaaaaaaaaaaaaaaaaaaaaaaaaaaaaaaaaaaaaaaaaaaaaaaaaaaaaaaaaaaaaaaaaaaaaaaaaaaaa

SEQ ID NO: 38054 - RNA, 1686 nt, Artificial Sequence
  mRNA product Design i-3 (hSL-A100) comprising derived and/or modified sequence from LASV(LP;Clade I)__AAF86701__GPCmut10 (opt5)
aggagaaagcuuaccaugggccagaucauuaccuucuuucaagaggugccccacgucaucgaagagguuaugaacauugugcugaucgcccucagccugcuugcuauucugaaggggcucuacaauaucgccacaugcggaaucauuggccugguggcguuccuuuuucugugugggaaauccugcucucucacgcugaagggaggcuaugaacugcagacccucgagcugaacauggaaacacuuaauauguguaugccucugagcugcaccaaaaacuccucucaucacuacaucagagucgggaaugagacaggacucgagcugacccuuacaaacaccagcauuaucaaucauaaguucuguaaccuguccgacgcucacaaaaagaaucucuaugaucaugcccugaugucuauuaucagcacguuucaccuguccauuccgaacuucaaucaguacgaagccaugagcugcgacuuuaacggcggcaagaucucugugcaguauaaucucucccacagcuacgcuggggaugccgcugagcauuguggaaccguugccaacggcgugcugcaaacauucaugcggauggcguggggagggcgcuauaucgcccuugacucuggcaaagggaauugggauugcauuaugaccuccuaccaguaccugaucauucagaacacaaccugggaagaccacugucaguuuagcagacccucuccuaucggauaucucggccugcuuucccaacggacgcgcgauauuuacaucagcagacggcugcucggcacauucaccuggacacuguccgacucugaggggaacgagacccccggaggcuauugccugacccgcuggaugcucaucgaagcugagcugaaguguuuugggaauacagccgucgcuaaaugcaacgaaaagcaugaugaggaguucugcgacaugcuuagacuguuugauuucuguaaacaggccauucggcgccucaaggcggaagcccagaugagcauccagcugauuaauaaggcugugaacgcccuuaucaaugaccaacugauuaugaaaaaccaccucagagauaucaugggaaucccuuacugcaauuauuccaaguacugguaucugaaccacacgagcucuggccggaccucccugcccaaauguuggcucauuagcaaugggucuuaccugaacgagacacaguucagcgacgacaucgaacagcaagcugauaauaugauuaccgagaugcuucagaaggaauacaucgagcgccagggaaaaacaccucugggccucguugacauuuuuaucuucuccaccucuuuuuaucugauuagcaucuuccugcaucuuaucaagauuccgacgcacagacauaucgugggcaaacccugcccuaagccccaccggcucaaccauaugggggucuguuccugcggacuguacaagcacccuggcgugcccacaaaauggaagcgcugaggacuaguuauaagacugacuagcccgaugggccucccaacgggcccuccuccccuccuugcaccgagauuaaucaaaggcucuuuucagagccaccaaaaaaaaaaaaaaaaaaaaaaaaaaaaaaaaaaaaaaaaaaaaaaaaaaaaaaaaaaaaaaaaaaaaaaaaaaaaaaaaaaaaaaaaaaaaaaaaaaaaa

SEQ ID NO: 38055 - RNA, 1686 nt, Artificial Sequence
  mRNA product Design i-3 (hSL-A100) comprising derived and/or modified sequence from LASV(803213;Clade II)__AAF86703__GPCmut10 (opt5)
aggagaaagcuuaccaugggccagaucauuaccuucuuucaagaggugccccacgucaucgaagagguuaugaacauugugcugaucgcccucagccugcuugcuauucugaaggggaucuacaauguggccacaugcggacucuucggccugaucuccuuucuucugcucugugggagaucuugcagcgucacguauaaaggaguguacgaacugcagacccuggagcucaacauggcgaaucugaacauguguaugccucuuuccugcacaaagaauaacucucaucacuauauuaugguuggcaaugaaaccgggcuggagcucacacugaccaacacaagcaucauuaaucauaaauucuguaaccuuuccgacgcucacaagaaaaaucuguacgaucaugcccucaugucuaucauuagcaccuuucaccuguccaucccgaacuucaaucaguaugaggccaugagcugcgacuuuaacggaggcaagauuucugugcaguacaaucugucccacagcuucgcugucgaugccgcuaaccauuguggcacgaucgccaacggggugcuccaaaccuuuaugcggauggcguggggaggcucuuauaucgcccuggacuccgggaagggaaauugggauugcauuaugacaagcuaccaguaccuuaucauucagaacaccacaugggaagaccacugucaguucucucgccccuccccuaucggcuaucuggggcuccugagccaaagaacccgggauauuuacaucucccgcagacuucugggaacguuuacauggacccucucugacagcgagggcaaugaagcucccggcggguauugccugacacgguggaugcugaucgaggccgagcucaaauguuucggaaacaccgcuguugccaagugcaaugaaaaacaugaugaggaauuuugcgacaugcugcgccuuuucgauuucuguaagcaggcgauuaaaagacugaagaccgaggcccagauguccauccagcucauuaacaaggcugugaaugcccugaucaacgaccaacuuauuaugaaaaaucaucugcgggauaucaugggcaucccuuacugcaacuauagccgcuacugguaucucaaucacacagucacggggaagaccucucugcccagauguuggcugguguccaacggaagcuaccucaaugaaacacacuuuucugacgacauugagcagcaggcugauaacaugaucaccgagaugcugcaaaaagaauacauggaccggcagggcaagacaccucuugggcugguggaucucuucgucuuuagcaccuccuucuaucugauuucuaucuuucugcaccuuguuaaaauuccgacgcaucgccacaucgugggaaagcccugcccuaaaccccauagacucaaucacaugggcauuuguagcugcggccuguacaagcacccuggggugcccgucaaguggaaacggugaggacuaguuauaagacugacuagcccgaugggccucccaacgggcccuccuccccuccuugcaccgagauuaaucaaaggcucuuuucagagccaccaaaaaaaaaaaaaaaaaaaaaaaaaaaaaaaaaaaaaaaaaaaaaaaaaaaaaaaaaaaaaaaaaaaaaaaaaaaaaaaaaaaaaaaaaaaaaaaaaaaaa

SEQ ID NO: 38056 - RNA, 1686 nt, Artificial Sequence
  mRNA product Design i-3 (hSL-A100) comprising derived and/or modified sequence from LASV(GA391;Clade III)__CAA36645__GPCmut10 (opt5)
aggagaaagcuuaccaugggccagaucgugaccuucuuucaagaggucccccacguuauugaagaggugaugaacaucgugcugauugcccucagcauccuggcuauucuuaaggggcuguacaaugucgccacaugcggacucaucggccuggugacguuccuucugcucuccgggagaucuuguagccugaucuauaaaggaaccuacgaacugcagacacucgagcugaacauggaaacccuuaauaugugcaugccucuguccuguacaaagaacaauucucaucacuauauucggguuggcaacgagaccgggcucgagcugacacuuaccaauacgagcauccugaaccauaaauuuugcaaucucuccgacgcgcacaagcgcaaccuguacgaucauucucugaugagcauuaucuccaccuuccaccucagcauuccgaauuuuaaccaguaugaagcuaugucuugugacuucaauggaggcaaaaucacagugcaguacaaccugucccacagcuuugccgucgaugccgcuggccauugcgggacccuugccaauggagugcugcaaacauucaugagaauggcuuggggcgggucuuauauugcccucgacuccggacggggcaacugggauuguaucaugaccagcuaccaguaccugaucauucagaacacgacaugggacgaucacugccaguuuucucgccccuccccuaucggguaucuuggacugcucagccaaagaacccgggacauuuacaucucccgcagacugcugggcacauucaccuggacccucucugauagcgagggcaaugaaacacccgggggauauugucugacgcgguggaugcuuauugaggcggagcugaagugcuuuggcaacaccgccguugcuaaguguaaugaaaaacaugacgaggaguucugcgauaugcuccgccuguuugacuucugcaagcaggccaucagacggcuuaaaacagaagcucagauguccauccagcugauuaacaaggccgugaaugcgcucaucaacgaucaacugauuaugaaaaaucaucugcgcgacaucauggggauuccuuacuguaacuauagcagauacugguaucucaaucacaccucuacaggaaagaccucccugccccggugcuggcuuaucagcaacggcucuuaccugaaugaaacgaaguucagcgacgauaucgagcagcaggccgacaacaugauuacagagaugcuccaaaaagaauacaucgaucgccaggggaagaccccucugggacuggucgaccuuuuuguguucuccaccucuuuuuaucucauuagcaucuuccugcaccuggugaaaauuccgacacacagacauaucgucggcaagcccuguccuaaaccccaccggcucaaucauaugggcauuugcuccugugggcuguacaagcagccuggaguucccgugagauggaaacgcugaggacuaguuauaagacugacuagcccgaugggccucccaacgggcccuccuccccuccuugcaccgagauuaaucaaaggcucuuuucagagccaccaaaaaaaaaaaaaaaaaaaaaaaaaaaaaaaaaaaaaaaaaaaaaaaaaaaaaaaaaaaaaaaaaaaaaaaaaaaaaaaaaaaaaaaaaaaaaaaaaaaaa

SEQ ID NO: 38057 - RNA, 1689 nt, Artificial Sequence
  mRNA product Design i-3 (hSL-A100) comprising derived and/or modified sequence from LASV(AV;Clade V)__CCA30314__GPCmut10 (opt5)
aggagaaagcuuaccaugggccagaucgugaccuucuuucaagaggucccccacguuauugaagaggugaugaacaucgugcugauugcccucagcauccuggcuguccuuaaggggcuguacaauauugccacaugcggacucaucggccugaucacguuccuucugcucugugggagauccugcucuagcaaccuguauaaaggaguguacgaacugcagucccucgaccugaauauggagacccuuaacauguguaugccucugucuugcacaaagaauaacagccaucacuauauucggguuggcaaugauaccgggcucgaacugacacuuaccaacacauccauccugaaucauaaauuuuguaaccucucugacgcgcacaagaaagaucuguacgaccaugcucugaugagcauuaucuccaccuuccaccucagcauuccgaauuuuaaccaguaugaggccaugucuugcgauuucaauggaggcaagaucuccgugcaguacaaccugagccacucuuaugccauugacgcugccaaucauuguggcacggucgcuaacgggauccuucaaaccuuuaugcgcauggccuggggaggcuccuacaucgcgcuggauagcgggagaggaaacugggacugcauuaugacaucuuaccaguaucucaucauucagaauaccacaugggagaaccacugucaguucucccggcccagcccuaucggcuaccuggggcuucugucccaacgcaccagagauauuuauaucucucggcgccuccugggaacguuuacauggacccugagcgacuccgaaggcaaugccacacccggcggguacugccucaccagauggaugcugaucgaggcugaacuuaaguguuucggaaacaccgccguggcuaaaugcaaugagaagcaugaugaggaauuuugcgacaugcugcgccucuucgauuuuuguaaacaggccauuagccggcugaagucugaggcgcagauguccauccagcuuauuaacaaagccguuaaugcucugaucaacgaccaacucauuaugaagaaucaccugagagacaucaugggcaucccuuauugcaacuacagcaaguauugguaccugaaucacacaauuacggggaaaaccucucuccccaaguguuggcuggugagcaacggauccuaccuuaaugaaacacauuucucugaugacaucgagcagcaggccgauaacaugauuaccgaaaugcugcaaaaagaguauauggagcggcagggcaagacaccucucgggcuggucgaccuguucguguuuagcaccuccuucuaccuuaucagcauuuuucuccgccuggugaaaaucccgacgcacagacauauugucggaaagcccugcccuaaaccccaccggcugaaucauaugggcaucuguucuugcggccucuauaagcagccugggguucccgugcgcuggaagagaugaggacuaguuauaagacugacuagcccgaugggccucccaacgggcccuccuccccuccuugcaccgagauuaaucaaaggcucuuuucagagccaccaaaaaaaaaaaaaaaaaaaaaaaaaaaaaaaaaaaaaaaaaaaaaaaaaaaaaaaaaaaaaaaaaaaaaaaaaaaaaaaaaaaaaaaaaaaaaaaaaaaaa

SEQ ID NO: 38058 - RNA, 1686 nt, Artificial Sequence
  mRNA product Design i-3 (hSL-A100) comprising derived and/or modified sequence from LASV(Togo/2016/7082;Clade VI)__AMR44577__GPCmut10 (opt5)
aggagaaagcuuaccaugggccagaucauuaccuucuuucaagaggugccccacgucaucgaagagguuaugaacauugugcugaucgcccucagccugcuugcuauucugaaggggguguacaaugucgccacaugcggaaucaucggccucgugacguuccuguuucuuugugggagauccugcucucugauuuauaaaggaagcuacgaacuccagacccuggagcugaacauggaaacacucaauauguguaugccucuguccugcaccaagaacucuagccaucacuauauccggguuggcaaugagacagggcuugagcugacccucacaaacaccuccauuaucaaucauaaauucuguaaccugucugacgcgcacaagcgcaaucuuuacgaucaugcucugaugagcauucucuccacguuucaccugagcaucccgaacuucaaucaguaugaagccaugucuugcgacuuuaacggaggcaaaauuuccgugcaguacaaucugagccacgccuaugcugucgaugccgcugagcauuguggcaccguggccaacgggguucuccaaacauucaugagaauggcguggggaggcucuuacaucgcccuggacuccgggcggggaaauugggauugcaucaugaccagcuaccaguaucuuauuauccagaacacaaccugggaagaccacugucaguuuucucgccccuccccuauuggcuaccuggggcuccugagccaaagaacgcgggauaucuauauuucccgcagacuucugggaacauucaccuggacacucucugacagcgagggcaacgagacccccggcggguacugccugacccgguggaugcugaucgaagcugagcucaaguguuuuggaaauacagccguggcuaagugcaacgaaaaacaugaugaggaguucugcgacaugcugcgccuuuuugauuucuguaagcaggccauccagagacugaaauccgaagcgcagaugagcauucaacucaucaauaaggccgucaacgcucugauuaaugaccagcuuaucaugaaaaaccaucugcgggauaugaugggcauuccuuauugcaauuacucuaaguauugguaccucaaccacacguccagcgggcgcaccucucugcccaaguguuggcuggugagcaauggauccuaccucaacgagacacacuucucugacgacaucgaacagcaagccgauaauaugaucaccgagaugcugcagaaagaauauauugacagacagggcaagacaccucuugggcugguggaucucuuugucuucagcaccuccuuuuaccugaucagcauuuuccugcaccuuaucaaaauuccgacgcaucggcacaucguuggaaagcccugcccuaaaccccaucgccucaaccacaugggcauuuguucuugcggccuguauaagcagccuggggugcccacaagauggaaacggugaggacuaguuauaagacugacuagcccgaugggccucccaacgggcccuccuccccuccuugcaccgagauuaaucaaaggcucuuuucagagccaccaaaaaaaaaaaaaaaaaaaaaaaaaaaaaaaaaaaaaaaaaaaaaaaaaaaaaaaaaaaaaaaaaaaaaaaaaaaaaaaaaaaaaaaaaaaaaaaaaaaaa

SEQ ID NO: 38059 - RNA, 1686 nt, Artificial Sequence
  mRNA product Design i-3 (hSL-A100) comprising derived and/or modified sequence from LASV(KAK-428;Clade n.d. (VII))__ANH09740__GPCmut10 (opt5)
aggagaaagcuuaccaugggccagaucgugaccuucuuucaagaggucccccacguuauugaagaggugaugaacaucgugcugauugcccucagccugcuugcuauccugaaggggcucuacaauuucgccacaugcggagucauuggccugaucacguuucuucugcucugugggagauccugcucugcgaccuauaaaggacaguacgaacugcagacacuggagcucaacauggaaagccugaauauguguaugccucuuuccugcaccaagaacaauucucaucacuauauccgggcuggcaacaauacagggcuggagcucacccugacaaacaccagcauuaucucccauaaauucuguaaucuuucugacgcccacaagaaaaaccuguacgaucauacgcucaugagcauuaucaccacauuucaccuguccauuccgaauuucaaccaguaugaggccaugagcugcgacuuuaauggaggcaagaucucuauucaauacaaccugucccacagcuaugcuggcgaugccgcucagcauugugggaccguggccaauggaguucuccagacauucaugcgcauggcguggggcgggucuuaccuggcccuugacuccggaagacggggcugggauugcaucaucagcucuuaccaguaucugauuauccaaaacaccacgugggacgaucacugucaguuuucccgccccagcccuauuggguaccucggauucgugucccagaagacaagagacaucuauauuucucggcgccugcuuggcaccuuuacauggacccugagcgauuccgaaggccaugacaugcccgggggauacugccucaccagauggaugcugaucgaggcugaucugaaauguuucggcaacacagccgucgcuaagugcaaugaaaaacacgacgaggaguuuugcgauauguggcgccucuucgacuucuguaagcaggccauccaacggcugaaagcggaagcccagaugaacauucagcuuaucaauaaggcugugaacgcccugauuaaugaccaacucaugaugaagaaccaccugagagauaucauggggauuccuuauugcaauuacagcaaauuuugguaucuuaacaauacgaccacaggacggaccucucugccccgcuguuggcucaucuccaacggcagcuaccugaaugagacacauuucucugacgauaucgaacagcaggcugacaacaugauuaccgagaugcugcagaaggaauacauggauagacaagggaaaacgccucucggacugguugaccuuuuuguguucagcacauccuuuuaucugaucaccauuuuccuccaccuggucaagaucccgacccaucggcacauugugggcaaacccugcccuaagccccaucgccugaaucacaugggcaucuguucuugcgggcuuuacaaacagccuggagugcccgucagauggaagcggugaggacuaguuauaagacugacuagcccgaugggccucccaacgggcccuccuccccuccuugcaccgagauuaaucaaaggcucuuuucagagccaccaaaaaaaaaaaaaaaaaaaaaaaaaaaaaaaaaaaaaaaaaaaaaaaaaaaaaaaaaaaaaaaaaaaaaaaaaaaaaaaaaaaaaaaaaaaaaaaaaaaaa

SEQ ID NO: 38060 - RNA, 1686 nt, Artificial Sequence; identical to SEQ ID NO: 38054
  mRNA product Design i-3 (hSL-A100) comprising derived and/or modified sequence from LASV(Pinneo-NIG-1969;Clade I)__AIT17836__GPCmut10 (opt5)

SEQ ID NO: 38061 - RNA, 1686 nt, Artificial Sequence
  mRNA product Design i-3 (hSL-A100) comprising derived and/or modified sequence from LASV(ISTH0009-NIG-2011;Clade II)__AIT17404__GPCmut10 (opt5)
aggagaaagcuuaccaugggccagaucauuaccuucuuucaagaggugccccacgucaucgaagagguuaugaacauugugcugaucgcccucagccugcuugcuauucugaaggggaucuacaauguggccacaugcggacucuucggccuggucuccuuucuucugcucugugggagaucuugcagcacgaccuauaaaggaguguacgaacugcagacacuggagcucgacauggcgucccugaacauguguaugccucuuucuugcaccaagaauaacagccaucacuauaucaugguuggcaaugaaacagggcuggagcucacccugacaaacaccuccauuaucaaucauaaauucuguaaccuuucugaugcucacaagaaaaaucuguacgaccaugcccucaugagcauuaucuccacguuucaccugagcauuccgaacuucaaucaguaugaggccaugucuugcgauuuuaacggaggcaagaucuccgugcaguacaaucugagccacgcuuaugccgucgacgcugccaaccauuguggcaccauugcgaauggggugcuccaaacauucaugcggauggccuggggaggcucuuacaucgcucuggauuccgggaagggaagcugggacugcaucaugaccucuuaccaguaucuuauuauccagaacacaaccugggaagaucacugucaguuuucccgccccagcccuauuggcuaccuggggcuccugucccaaagaacgcgggacaucuauauuucucgcagacuucugggaacauucaccuggacacucagcgauuccgagggcaacgaaacccccggcggguacugccugacccgguggaugcugaucgaggccgagcucaaauguuuuggaaauacagcuguugccaagugcaacgaaaaacaugacgaggaguucugcgauaugcugcgccuuuuugacuucuguaagcaggcgaucagacggcugaaaacggaagcccagaugagcauucagcucaucaauaaggcugugaacgcccugauuaaugaucaacuuaucaugaagaaccaucugcgcgacauuaugggcaucccuuauugcaauuacucuaaauauugguaccucaaccacaccgucacagggaagaccucccugcccagauguuggcuggugagcaauggaucuuaccucaacgaaacacacuucagcgacgauaucgagcagcaggcugacaauaugauuaccgagcugcuucaaaaagaauauauggaucggcagggcaagacgccucuggggcucguggaccuguuugucuucuccacaucuuuuuaccugaucagcauuuuccuucaccucaucaaaauuccgacccaucgccacaucaccggaaagcccugcccuaaaccccauagacugaaccacaugggcauuuguuccugcggccuguauaagcacccugggguucccgugaaguggaaacggugaggacuaguuauaagacugacuagcccgaugggccucccaacgggcccuccuccccuccuugcaccgagauuaaucaaaggcucuuuucagagccaccaaaaaaaaaaaaaaaaaaaaaaaaaaaaaaaaaaaaaaaaaaaaaaaaaaaaaaaaaaaaaaaaaaaaaaaaaaaaaaaaaaaaaaaaaaaaaaaaaaaaa

SEQ ID NO: 38062 - RNA, 1686 nt, Artificial Sequence
  mRNA product Design i-3 (hSL-A100) comprising derived and/or modified sequence from LASV(ISTH2010-NIG-2012;Clade II)__AIT17482__GPCmut10 (opt5)
aggagaaagcuuaccaugggccagaucauuaccuucuuucaagaggugccccacgucaucgaagagguuaugaacauugugcugaucgcccucagccugcuugcuauucugaaggggaucuacaauguggccacaugcggacucuucggccuggucuccuuucuucugcucugugggagaucuugcagcacgaccuauaaaggaguguacgaacugcagacacuggagcucgacauggcgucccugaacauguguaugccucuuucuugcaccaagaauaacagccaucacuauaucaugguuggcaaugaaacagggcuggagcucacccugacaaacaccuccauuaucaaucauaaauucuguaaccuuucugaugcucacaagaaaaaucuguacgaccaugcccucaugagcauuaucuccacguuucaccugagcauuccgaacuucaaucaguaugaggccaugucuugcgauuuuaacggaggcaagaucuccgugcaguacaaucugagccacgcuuaugccgucgacgcugccaaccauuguggcaccauugcgaauggggugcuccaaacauucaugcggauggccuggggaggcucuuacaucgcucuggauuccgggaagggaagcugggacugcaucaugaccucuuaccaguaucuuauuauccagaacauuacaugggaagaucacugucaguuuucccgccccagcccuaucggcuaccuggggcuccugucccaaagaacccgggacauuuauaucucucgcagacuucugggaacguucacauggacccucagcgauuccgagggcaacgaaacacccggcggguacugccugacccgguggaugcugaucgaggccgagcucaaauguuuuggaaauaccgcuguugccaagugcaacgaaaaacaugacgaggaguucugcgauaugcugcgccuuuuugacuucuguaagcaggcgauuagacggcugaaaacagaagcccagaugagcauccagcucauuaauaaggcugugaacgcccugaucaaugaucaacuuauuaugaagaaccaucugcgcgacaucaugggcaucccuuauugcaauuacucuaaauauugguaccucaaccacacggucaccgggaagacaucccugcccagauguuggcuggugagcaauggaucuuaccucaacgaaacccacuucagcgacgauauugagcagcaggcugacaauaugaucacagagcugcuucaaaaagaauauauugaucggcagggcaagaccccucuggggcucguggaccuguuugucuucuccacgucuuuuuaccugaucagcauuuuccuucaccucguuaaaaucccgacacaucgccacguggugggaaagcccugcccuaaaccccauagacugaaccacaugggcauuuguuccugcggccuguauaagcacccugggguccccgugaaguggaaacggugaggacuaguuauaagacugacuagcccgaugggccucccaacgggcccuccuccccuccuugcaccgagauuaaucaaaggcucuuuucagagccaccaaaaaaaaaaaaaaaaaaaaaaaaaaaaaaaaaaaaaaaaaaaaaaaaaaaaaaaaaaaaaaaaaaaaaaaaaaaaaaaaaaaaaaaaaaaaaaaaaaaaa

SEQ ID NO: 38063 - RNA, 1686 nt, Artificial Sequence
  mRNA product Design i-3 (hSL-A100) comprising derived and/or modified sequence from LASV(Lassa virus/H.sapiens-wt/NGA/2015/ISTH_0543;Clade II)__AVO03639__GPCmut10 (opt5)
aggagaaagcuuaccaugggccagaucauuaccuucuuucaagaggugccccacgucaucgaagagguuaugaacauugugcugaucgcccucagccugcuugcuauucugaaggggaucuacaauguggccacaugcggacucuucggccuggucuccuuucuucugcucugugggagaucuugcagcacgaccuauaaaggaguguacgaacugcagacacuggagcucgacauggcgaaccugaauauguguaugccucuuuccugcaccaagaacaauucucaucacuauaucaugguuggcaacgaaacagggcuggagcucacccugacaaauaccagcauuaucaaccauaaauucuguaaucuuuccgaugcucacaagaaaaaccuguacgaccaugcccucaugucuauuaucagcacguuucaccuguccauuccgaauuucaaccaguaugaggccaugagcugcgauuuuaauggaggcaagaucucugugcaguacaaccugucccacaccuaugcugucgacgccgcuaaucauuguggcacaauugccaacggggugcuccaaaccuucaugcggauggcguggggaggcagcuacaucgcccuggauucugggaagggauccugggacugcaucaugacaagcuaccaguaucuuguuauucagaacaccacgugggaagaucacugucaguuuucucgccccuccccuaucggcuaccuggggcuccugagccaaagaacacgggacauuuauaucucccgcagacuucugggaaccuucacauggacccucucugauagcgagggcaaugaaacccccggcggguacugccugacacgguggaugcugauugaggcugagcucaaauguuuuggaaacacggccguggcuaagugcaaugaaaaacaugacgaggaguucugcgauaugcugcgccuuuuugacuucuguaagcaggccaucagacggcugaaaaccgaagcgcagauguccauccagcucauuaacaaggccgucaaugcucugaucaacgaucaacuuauuaugaagaaucaucugcgcgacaucaugggcauuccuuauugcaacuacagcaaauauugguaccucaaucacacagugaccgggaagacaucucugcccagauguuggcugguguccaacggaagcuaccucaaugaaacccacuucucugacgauaucgagcagcaggccgacaacaugaucacggagcugcuucaaaaagaauauauugaucggcagggcaagacaccucuggggcucgucgaccuguuuguuuucagcaccuccuuuuaccugaucucuauuuuccuucaccucgugaaaaucccgacccaucgccacauuacaggaaagcccugcccuaaaccccauagacugaaucacaugggcaucuguagcugcggccuguauaagcacccuggggugcccgucaaguggaaacggugaggacuaguuauaagacugacuagcccgaugggccucccaacgggcccuccuccccuccuugcaccgagauuaaucaaaggcucuuuucagagccaccaaaaaaaaaaaaaaaaaaaaaaaaaaaaaaaaaaaaaaaaaaaaaaaaaaaaaaaaaaaaaaaaaaaaaaaaaaaaaaaaaaaaaaaaaaaaaaaaaaaaa

SEQ ID NO: 38064 - RNA, 1686 nt, Artificial Sequence
  mRNA product Design i-3 (hSL-A100) comprising derived and/or modified sequence from LASV(Lassa virus/H.sapiens-wt/NGA/2016/ISTH_0009;Clade II)__AVO03571__GPCmut10 (opt5)
aggagaaagcuuaccaugggccagaucauuaccuucuuucaagaggugccccacgucaucgaagagguuaugaacauugugcugaucgcccucagccugcuugcuauucugaaggggaucuacaauguggccacaugcggacuccugggccuugucuccuuccugcuccugugugggagaucuugcagcacgaccuauaaaggaguguacgaacugcagacacucgagcuggacauggcgucccuuaacauguguaugccucugucuugcaccaagaauaacagccaucacuauaucaugguuggcaaugaaacagggcucgagcugacccuuacaaacaccuccauuaucaaucauaaauuuuguaaccugucugaugcucacaagaaaaaucucuacgaccaugcccugaugagcauuaucuccacguuccaccugagcauuccgaacuuuaaucaguaugaggccaugucuugcgauuucaacggaggccggaucuccgugcaguacaaucucagccacucuuaugcugucgacgccgcuaaccauuguggcaccauugccaauggggugcugcaaacauuuaugcgcauggcguggggaggcuccuacaucgcccuugauagcgggaagggaucuugggacugcaucaugaccuccuaccaguaucugauuauccagaacacaaccugggaagaucacugucaguucagcagacccuccccuauuggcuaccucgggcugcuuucucaacggacgcgcgacaucuauauuagcagacggcugcucggaacauuuaccuggacacuguccgauagcgagggcaacgaaacccccggcggguacugccugacccgcuggaugcucaucgaggcugagcugaaguguuucggaaauacagccguugcuaaaugcaacgaaaagcaugacgaggaauuuugcgauaugcuuagacuguucgacuuuuguaaacaggccauccggcgccucaagacggaggcgcagaugucuauucagcugaucaauaaagccgugaacgcucuuauuaaugaucaacugaucaugaagaaccaccucagagacauuaugggcaucccuuauugcaauuacuccaaguauugguaccugaaccacaccgucacagggaaaaccagccugccccgguguuggcucgugucuaauggaagcuaccugaacgaaacacauuucuccgacgauaucgagcagcaggccgacaauaugauuaccgagcuucugcaaaaggaauauaucgaucgccagggcaaaacgccucucgggcugguggaccuguucgucuuuucuaccagcuucuaccuuauuuccaucuuucuccaccugguuaagauuccgacacauagacacaucaccggaaaacccugcccuaagccccaucggcugaaccacaugggcauuuguagcugcggccucuauaaucacccuggggugcccgugaaauggaagcgcugaggacuaguuauaagacugacuagcccgaugggccucccaacgggcccuccuccccuccuugcaccgagauuaaucaaaggcucuuuucagagccaccaaaaaaaaaaaaaaaaaaaaaaaaaaaaaaaaaaaaaaaaaaaaaaaaaaaaaaaaaaaaaaaaaaaaaaaaaaaaaaaaaaaaaaaaaaaaaaaaaaaaa

SEQ ID NO: 38065 - RNA, 1686 nt, Artificial Sequence
  mRNA product Design i-3 (hSL-A100) comprising derived and/or modified sequence from LASV(Lassa virus/H.sapiens-wt/NGA/2016/ISTH_0017;Clade II)__AVO03567__GPCmut10 (opt5)
aggagaaagcuuaccaugggccagaucauuaccuucuuucaagaggugccccacgucaucgaagagguuaugaacauugugcugaucgcccucagccugcuugcuauucugaaggggaucuacaauguggccacaugcggacucuucggccuggucuccuuucuucugcucugugggagaucuugcagcacgaccuauaaaggaguguacgaacugcagacacuggagcucgacauggcgucccugaacauguguaugccucuuucuugcaccaagaauaacagccaucacuauaucaugguuggcaaugaaacagggcuggagcucacccugacaaacaccuccauuaucaaucauaaauucuguaaccuuucugaugcucacaagaaaaaucuguacgaccaugcccucaugagcauuaucuccacguuucaccugagcauuccgaacuucaaucaguaugaggccaugucuugcgauuuuaacggaggcaagaucuccgugcaguacaaucugagccacaccuaugcuauugacgccgcuaaccauuguggcacaaucgccaaugggguccuccaaaccuucaugcggauggcguggggaggcucuuacaucgcccuggauuccgggaagggaagcugggacugcauuaugacaucuuaccaguaucuuaucauucagaacaccacgugggaagaucacugucaguuuucccgccccagcccuaucggcuaccuggggcuccugucccaaagaacacgggacauuuauaucucucgcagacuucugggaaccuucacauggacccucagcgauuccgagggcaacgaaacccccggcggguacugccugacacgguggaugcugaucgaggcugagcucaaauguuuuggaaauacggccguggcuaagugcaacgaaaaacaugacgaggaguucugcgauaugcugcgccuuuuugacuucuguaagcaggccauuagacggcugaaaaccgaagcgcagaugagcauccagcucauuaauaaggccguuaacgcucugaucaaugaucaacuuauuaugaagaaccaucugcgcgacaucaugggcaucccuuauugcaauuacucuaaauauugguaccucaaccacacagugaccgggaagacaucccugcccagauguuggcuggucagcaauggaucuuaccucaacgaaacccacuucagcgacgauauugagcagcaggccgacaauaugaucacggagcugcuucaaaaagaauauauggaucggcagggcaagacaccucuggggcucguggaccuguuuguguucuccaccucuuuuuaccugauuagcaucuuccuucaccucguccgcauuccgacccauagacacguuaucggaaaacccugcccuaagccccaucggcugaaccacaugggcauuuguuccugcggccuguauaaacacccuggggugcccgugaaguggaagcgcugaggacuaguuauaagacugacuagcccgaugggccucccaacgggcccuccuccccuccuugcaccgagauuaaucaaaggcucuuuucagagccaccaaaaaaaaaaaaaaaaaaaaaaaaaaaaaaaaaaaaaaaaaaaaaaaaaaaaaaaaaaaaaaaaaaaaaaaaaaaaaaaaaaaaaaaaaaaaaaaaaaaaa

SEQ ID NO: 38066 - RNA, 1686 nt, Artificial Sequence
  mRNA product Design i-3 (hSL-A100) comprising derived and/or modified sequence from LASV(Lassa virus/H.sapiens-wt/NGA/2018/ISTH_0959;Clade II)__AVV65099__GPCmut10 (opt5)
aggagaaagcuuaccaugggccagaucauuaccuucuuucaagaggugccccacgucaucgaagagguuaugaacauugugcugaucgcccucagccugcuugcuauucugaaggggaucuacaauguggucacaugcggacucuucggccugguguccuuucuucugcucugugggagaucuugcagcacgaccuauaaaggaguuuacgaacugcagacacuggagcucgacauggccucccugaacauguguaugccucuuucuugcaccaagaauaacagccaucacuauaucauggugggcaaugaaacagggcuggagcucacccugacaaacaccuccauuaucaaucauaaauucuguaaccuuucugaugcgcacaagaaaaaucuguacgaccaugcucucaugagcauuaucuccacguuucaccugagcauuccgaacuucaaucaguaugaggccaugucuugcgauuuuaacggaggcaagaucuccguccaguacaaucugagccacgccuaugcuauugacgccgcuaaccauuguggcaccaucgccaauggggugcuccaaacauucaugcggauggcguggggaggcucuuacaucgcccuggauuccgggaagggaagcugggacugcauuaugaccucuuaccaguaucuuaucauucagaacacaaccugggaagaucacugucaguuuucccgccccagcccuaucggcuaccuggggcuccugucccaaagaacgcgggacauuuauaucucucgcagacuucugggaacauucaccuggacacucagcgauuccgagggcaacgaaacccccggcggguacugccugacccgguggaugcugaucgaggcugagcucaaauguuuuggaaauacagccguugcuaagugcaacgaaaaacaugacgaggaguucugcgauaugcugcgccuuuuugacuucuguaagcaggccauuagacggcugaaaacggaagcgcagaugagcauccagcucauuaauaaggccgugaacgcucugaucaaugaucaacuuauuaugaagaaccaucugcgcgacaucaugggcaucccuuauugcaauuacucuaaauauugguaccucaaccacaccgucacagggaagaccucccugcccagauguuggcuggugagcaauggaucuuaccucaacgaaacacacuucagcgacgauauugagcagcaggccgacaauaugaucaccgagcugcuucaaaaagaauauauugaucggcagggcaagacgccucuggggcucguggaccuguuugucuucuccacaucuuuuuaccugaucagcauuuuccuucaccucguuaaaaucccgacccaucgccacgugauuggaaagcccugcccuaaaccccauagacugaaccacaugggcaucuguuccugcggccuguauaagcacccuggggugcccgucaaguggaaacggugaggacuaguuauaagacugacuagcccgaugggccucccaacgggcccuccuccccuccuugcaccgagauuaaucaaaggcucuuuucagagccaccaaaaaaaaaaaaaaaaaaaaaaaaaaaaaaaaaaaaaaaaaaaaaaaaaaaaaaaaaaaaaaaaaaaaaaaaaaaaaaaaaaaaaaaaaaaaaaaaaaaaa

SEQ ID NO: 38067 - RNA, 1686 nt, Artificial Sequence
  mRNA product Design i-3 (hSL-A100) comprising derived and/or modified sequence from LASV(LASV003-NIG-2008;Clade II)__AIT17580__GPCmut10 (opt5)
aggagaaagcuuaccaugggccagaucauuaccuucuuucaagaggugccccacgucaucgaagagguuaugaacauugugcugaucgcccucagccugcuugcuauucugaaggggaucuacaauguggccacaugcggacucuucggccuggucuccuuucuucugcucugugggagaucuugcagcacgaccuauaaaggaguguacgaacugcagacacuggagcucgacauggcgucccugaacauguguaugccucuuucuugcaccaagaauaacagccaucacuauaucaugguuggcaaugaaacagggcuggagcucacccugacaaacaccuccauuaucaaucauaaauucuguaaccuuucugaugcucacaagaaaaaucuguacgaccaugcccucaugagcauuaucuccacguuucaccugagcauuccgaacuucaaucaguaugaggccaugucuugcgauuuuaacggaggcaagaucuccgugcaguacaaucugagccacaccuaugcugucgacgccgcuaaccauuguggcacaauugccaauggggugcuccaaaccuucaugcggauggcguggggaggcucuuacaucgcccuggauuccgggaagggaagcugggacugcaucaugacaucuuaccaguaucuuauuauccagaacaccacgugggaagaucacugucaguuuucccgccccagcccuauuggcuaccuggggcuccugucccaaagaacacgggacaucuauauuucucgcagacuucugggaaccuucacauggacccucagcgauuccgagagcaacgaaacccccggcggcuacugccugacacgguggaugcugaucgaggcugagcucaaauguuuugggaauacggccguugcuaagugcaacgaaaaacaugacgaggaguucugcgauaugcugcgccuuuuugacuucuguaagcaggccaucagacggcugaaagcggaagcccagaugucuauucagcucaucaauaaggcugugaacgcccugauuaaugaucaacuuaucaugaagaaccaucugcgcgacauuaugggaaucccuuauugcaauuacuccaaauauugguaccucaaccacaccgucacaggcagaaccagccugccccgguguuggcuggugucuaaugggagcuaccucaacgaaacacacuucuccgacgauaucgagcagcaggcugacaauaugauuaccgagcugcuucaaaaggaauauauggaucgccagggaaaaacgccucugggccucguggaccuguuugucuucucuaccagcuuuuaccugaucuccauuuuccuucaccucguuaagaucccgacacauagacacgugauugggaaacccugcccuaagccccaucggcugaaccacaugggaaucuguagcugcggccuguauaaacacccuggcgugcccgucaaguggaagcgcugaggacuaguuauaagacugacuagcccgaugggccucccaacgggcccuccuccccuccuugcaccgagauuaaucaaaggcucuuuucagagccaccaaaaaaaaaaaaaaaaaaaaaaaaaaaaaaaaaaaaaaaaaaaaaaaaaaaaaaaaaaaaaaaaaaaaaaaaaaaaaaaaaaaaaaaaaaaaaaaaaaaaa

SEQ ID NO: 38068 - RNA, 1686 nt, Artificial Sequence
  mRNA product Design i-3 (hSL-A100) comprising derived and/or modified sequence from LASV(LASV035-NIG-2009;Clade II)__AIT17588__GPCmut10 (opt5)
aggagaaagcuuaccaugggccagaucauuaccuucuuucaagaggugccccacgucaucgaagagguuaugaacauugugcugaucgcccucagccugcuugcuauucugaaggggaucuacaauguggccacaugcggacucuucggccuggucuccuuucuucugcucugugggagaucuugcagcacgaccuauaaaggaguguacgaacugcagacacuggagcucgacauggcgucccugaacauguguaugccucuuucuugcaccaagaauaacagccaucacuauaucaugguuggcaaugaaacagggcuggagcucacccugacaaacaccuccauuaucaaucauaaauucuguaaccuuucugaugcucacaagaaaaaucuguacgaccaugcccucaugagcauuaucuccacguuucaccugagcauuccgaacuucaaucaguaugaggccaugucuugcgauuuuaacggaggcaagaucuccgugcaguacaaucugagccacgcuuaugccgucgacgcugccaaccauuguggcaccauugcgaauggggugcuccaaacauucaugcggauggccuggggaggcucuuacaucgcucuggauuccgggaagggaagcugggacugcaucaugaccucuuaccaguaucuuauuauccagaacacaaccugggaagaucacugucaguuuucccgccccagcccuauuggcuaccuggggcuccugucccaaagaacgcgggacaucuauauuucucgcagacuucugggaacauucaccuggacacucagcgauuccgagggcaacgaaacccccggcggguacugccugacccgguggaugcugaucgaggccgagcucaaauguuuuggaaauacagcuguugccaagugcaacgaaaaacaugacgaggaguucugcgauaugcugcgccuuuuugacuucuguaagcaggcgaucagacggcugaaagccgaagcucagaugagcauucagcucaucaauaaggccgugaacgcucugauuaaugaucaacuuaucaugaagaaccaucugcgcgacauuaugggcaucccuuauugcaauuacucuaaauauugguaccucaaccacacggucaccgggaagacaucccugcccagauguuggcuggugagcaauggaucuuaccucaacgaaacccacuucagcgacgauaucgagcagcaggccgacaauaugauuacagagcugcuucaaaaagaauauaucgaucggcagggcaagaccccucuggggcucguggaccuguuugucuucuccacgucuuuuuaccugauuagcaucuuccuucaccucguuaaaauuccgacacaucgccacgugaucggaaagcccugcccuaaaccccauagacugaaccacaugggcauuuguuccugcggccuguauaagcacccuggggugcccgucaaguggaaacggugaggacuaguuauaagacugacuagcccgaugggccucccaacgggcccuccuccccuccuugcaccgagauuaaucaaaggcucuuuucagagccaccaaaaaaaaaaaaaaaaaaaaaaaaaaaaaaaaaaaaaaaaaaaaaaaaaaaaaaaaaaaaaaaaaaaaaaaaaaaaaaaaaaaaaaaaaaaaaaaaaaaaa

SEQ ID NO: 38069 - RNA, 1686 nt, Artificial Sequence
  mRNA product Design i-3 (hSL-A100) comprising derived and/or modified sequence from LASV(LASV1000-NIG-2009;Clade II)__AIT17782__GPCmut10 (opt5)
aggagaaagcuuaccaugggccagaucauuaccuucuuucaagaggugccccacgucaucgaagagguuaugaacauugugcugaucgcccucagccugcuugcuauucugaaggggaucuacaauguggccacaugcggacucuucggccuggucuccuuucuucugcucugugggagaucuugcagcacgaccuauaaaggaguguacgaacugcagacacuggagcucgacauggcgucccugaacauguguaugccucuuucuugcaccaagaauaacagccaucacuauaucaugguuggcaaugaaacagggcuggagcucacccugacaaacaccuccauuaucaaucauaaauucuguaaccuuucugaugcucacaagaaaaaucuguacgaccaugcccucaugagcauuaucuccacguuucaccugagcauuccgaacuucaaucaguaugaggccaugucuugcgauuuuaacggaggcaagaucuccgugcaguacaaucugagccacaccuaugcugucgacgccgcuaaccauuguggcacaauugccaauggggugcuccaaaccuucaugcggauggcguggggaggcucuuacaucgcccuggauuccgggaagggaagcugggacugcaucaugacaucuuaccaguaucuuauuauccagaacaccacgugggaagaucacugucaguuuucccgccccagcccuauuggcuaccuggggcuccugucccaaagaacacgggacaucuauauuucucgcagacuucugggaaccuucacauggacccucagcgauuccgagggcaacgaaacccccggcggguacugccugacacgguggaugcugaucgaggcugagcucaaauguuuuggaaauacggccguugcuaagugcaacgaaaaacaugacgaggaguucugcgauaugcugcgccuuuuugacuucuguaagcaggccaucaaaagacugaagaccgaagcgcagaugagcauucagcucaucaauaaggccgugaacgcucugauuaaugaucaacuuaucaugaaaaaccaucugcgggacauuaugggcaucccuuauugcaauuacucuaaguauugguaccucaaccacacagucaccgggaaaacaucccugccccgcuguuggcuggugagcaauggaucuuaccucaacgaaacccacuucagcgacgauaucgagcagcaggccgacaauaugauuacggagcugcuucaaaaggaauauaucgauagacagggcaaaacaccucuggggcucguggaccuguuugucuucuccaccucuuuuuaccugauuagcaucuuccuucaccucguuaagauuccgacccaucggcacguggugggaaaacccugcccuaagccccaucgccugaaccacaugggcaucuguuccugcggccuguauaagcacccugggguccccgugaaauggaagagaugaggacuaguuauaagacugacuagcccgaugggccucccaacgggcccuccuccccuccuugcaccgagauuaaucaaaggcucuuuucagagccaccaaaaaaaaaaaaaaaaaaaaaaaaaaaaaaaaaaaaaaaaaaaaaaaaaaaaaaaaaaaaaaaaaaaaaaaaaaaaaaaaaaaaaaaaaaaaaaaaaaaaa

SEQ ID NO: 38070 - RNA, 1686 nt, Artificial Sequence
  mRNA product Design i-3 (hSL-A100) comprising derived and/or modified sequence from LASV(LASV221-NIG-2010;Clade II)__AIT17624__GPCmut10 (opt5)
aggagaaagcuuaccaugggccagaucauuaccuucuuucaagaggugccccacgucaucgaagagguuaugaacauugugcugaucgcccucagccugcuugcuauucugaaggggaucuacaauguggccacaugcggacucuucggccuggucuccuuucuucugcucugugggagaucuugcagcacgaccuauaaaggaguguacgaacugcagacacuggagcucgacauggcgucccugaacauguguaugccucuuucuugcaccaagaauaacagccaucacuauaucaugguuggcaaugaaacagggcuggagcucacccugacaaacaccuccauuaucaaucauaaauucuguaaccuuucugaugcucacaagaaaaaucuguacgaccaugcccucaugagcauuaucuccacguuucaccugagcauuccgaacuucaaucaguaugaggccaugucuugcgauuuuaacggaggcaagaucuccgugcaguacaaucugagccacaccuaugcuauugacgccgcuaaccauuguggcacaaucgccaaugggguccuccaaaccuucaugcggauggcguggggaggcucuuacaucgcccuggauuccgggaagggaagcugggacugcauuaugacaucuuaccaguaucuuaucauucagaacaccacgugggaagaucacugucaguuuucccgccccagcccuaucggcuaccuggggcuccugucccaaagaacacgggacauuuauaucucucgcagacuucugggaaccuucacauggacccucagcgauuccgagggcaacgaaacccccggcggguacugccugacacgguggaugcugaucgaggcugagcucaaauguuuuggaaauacggccguggcuaagugcaacgaaaaacaugacgaggaguucugcgauaugcugcgccuuuuugacuucuguaagcaggccauuagacggcugaaaaccgaagcgcagaugagcauccagcucauuaauaaggccguuaacgcucugaucaaugaucaacuuauuaugaagaaccaucugcgcgacaucaugggcaucccuuauugcaauuacucuaaauauugguaccucaaccacacagugaccgggaagacaucccugcccagauguuggcuggucagcaauggaucuuaccucaacgaaacccacuucagcgacgauauugagcagcaggccgacaauaugaucacggagaugcugcaaaaagaauauauggaucggcagggcaagacaccucuugggcugguggaccucuuuguguucuccaccucuuuuuaccugauuagcaucuuccugcaccuugucaaaauuccgacccaucgccacguuaucggaaagcccugcccuaaaccccauagacucaaccacaugggcauuuguuccugcggccuguauaagcacccuggggugcccgugaaguggaaacggugaggacuaguuauaagacugacuagcccgaugggccucccaacgggcccuccuccccuccuugcaccgagauuaaucaaaggcucuuuucagagccaccaaaaaaaaaaaaaaaaaaaaaaaaaaaaaaaaaaaaaaaaaaaaaaaaaaaaaaaaaaaaaaaaaaaaaaaaaaaaaaaaaaaaaaaaaaaaaaaaaaaaa

SEQ ID NO: 38071 - RNA, 1686 nt, Artificial Sequence
  mRNA product Design i-3 (hSL-A100) comprising derived and/or modified sequence from LASV(LASV237-NIG-2010;Clade II)__AIT17638__GPCmut10 (opt5)
aggagaaagcuuaccaugggccagaucauuaccuucuuucaagaggugccccacgucaucgaagagguuaugaacauugugcugaucgcccucagccugcuugcuauucugaaggggaucuacaauguggccacaugcggacucuucggccuggucuccuuucuucugcucugugggagaucuugcagcacgaccuauaaaggaguguacgaacugcagacacuggagcucgacauggcgucccugaacauguguaugccucuuucuugcaccaagaauaacagccaucacuauaucaugguuggcaaugaaacagggcuggagcucacccugacaaacaccuccauuaucaaucauaaauucuguaaccuuucugaugcucacaagaaagaccuguacgaucaugcccucaugagcauuaucuccacguuucaccugagcauuccgaauuucaaccaguaugaggccaugucuugcgacuuuaauggaggcaagaucuccgugcaguacaaccugagccacaccuaugcugucgaugccgcuaaucauuguggcacaauugccaacggggugcuccaaaccuucaugcggauggcguggggaggcucuuacaucgcccuggacuccgggaagggaagcugggauugcaucaugacaucuuaccaguaucuuauuauccagaauaccacgugggaagaccacugucaguuuucccgccccagcccuauuggcuaccuggggcuccugucccaaagaacacgggauaucuauauuucucgcagacuucugggaaccuucacauggacccucagcgacuccgagggcaacgaaacccccggcggguacugccugacacgguggaugcugaucgaggcugagcucaaauguuuuggaaacacggccguugcuaagugcaaugaaaaacaugaugaggaguucugcgacaugcugcgccuuuuugauuucuguaagcaggccaucagacggcugaaaaccgaagcgcagaugagcauucagcucaucaacaaggccgugaaugcucugauuaacgaccaacuuaucaugaagaaucaucugcgcgacauuaugggcaucccuuauugcaacuacucuaaauauugguaccucaaucacacagucaccgggaagacaucccugcccagauguuggcuggugagcaacggaucuuaccucaaugaaacccacuucagcgaugacaucgagcagcaggccgauaacaugauuacggagcugcuucaaaaagaauauauggaccggcagggcaagacaccucuggggcucguggaucuguuugucuucuccaccucuuuuuaccugaucagcauuuuccuucaccucaucaaaauuccgacccaucgccacaucacaggaaagcccugcccuaaaccccauagacugaaucacaugggcauuuguuccugcggccuguauaagcacccugggguucccgugaaguggaaacggugaggacuaguuauaagacugacuagcccgaugggccucccaacgggcccuccuccccuccuugcaccgagauuaaucaaaggcucuuuucagagccaccaaaaaaaaaaaaaaaaaaaaaaaaaaaaaaaaaaaaaaaaaaaaaaaaaaaaaaaaaaaaaaaaaaaaaaaaaaaaaaaaaaaaaaaaaaaaaaaaaaaaa

SEQ ID NO: 38072 - RNA, 1686 nt, Artificial Sequence
  mRNA product Design i-3 (hSL-A100) comprising derived and/or modified sequence from LASV(LASV253-NIG-2011;Clade II)__AIT17670__GPCmut10 (opt5)
aggagaaagcuuaccaugggccagaucauuaccuucuuucaagaggugccccacgucaucgaagagguuaugaacauugugcugaucgcccucagccugcuugcuauucugaaggggaucuacaauguggccacaugcggacucuucggccuggucuccuuucuucugcucugugggagaucuugcagcacgaccuauaaaggaguguacgaacugcagacacuggagcucgacauggcgucccugaacauguguaugccucuuucuugcaccaagaauaacagccaucacuauaucaugguuggcaaugaaacagggcuggagcucacccugacaaacaccuccauuaucaaucauaaauucuguaaccuuucugaugcucacaagaaaaaucuguacgaccaugcccucaugagcauuaucuccacguuucaccugagcauuccgaacuucaaucaguaugaggccaugucuugcgauuuuaacggaggcaagaucuccgugcaguacaaucugagccacaccuaugcugucgacgccgcuaaccauuguggcacaauugccaauggggugcuccaaaccuucaugcggauggcguggggaggcucuuacaucgcccuggauuccgggaagggaagcugggacugcaucaugacaucuuaccaguaucuuauuauccagaacaccacgugggaagaucacugucaguuuucccgccccagcccuauuggcuaccuggggcuccugucccaaagaacacgggacaucuauauuucucgcagacuucugggaaccuucacauggacccucagcgauuccgagggcaacgaaacccccggcggguacugccugacacgguggaugcugaucgaggcugagcucaaauguuuuggaaauacggccguugcuaagugcaacgaaaaacaugacgaggaguucugcgauaugcugcgccuuuuugacuucuguaagcaggccaucagacggcugaaagcggaagcccagaugagcauucagcucaucaauaaggcugugaacgcccugauuaaugaucaacuuaucaugaagaaccaucugcgcgacauuaugggcaucccuuauugcaauuacucuaaauauugguaccucaaccacaccgucacagggagaaccucccugccccgguguuggcuggugagcaauggaucuuaccucaacgaaacacacuucagcgacgauaucgagcagcaggcugacaauaugauuaccgagcugcuucaaaaggaauauaucgaucgccagggcaaaacgccucuggggcucguggaccuguuugucuucuccacaucuuuuuaccugauuagcaucuuccuucaccucguuaagauuccgacccauagacacaucauuggaaaacccugcccuaagccccaucggcugaaccacaugggcaucuguuccugcggccuguauaaacacccuggggugcccgugaaguggaagcgcugaggacuaguuauaagacugacuagcccgaugggccucccaacgggcccuccuccccuccuugcaccgagauuaaucaaaggcucuuuucagagccaccaaaaaaaaaaaaaaaaaaaaaaaaaaaaaaaaaaaaaaaaaaaaaaaaaaaaaaaaaaaaaaaaaaaaaaaaaaaaaaaaaaaaaaaaaaaaaaaaaaaaa

SEQ ID NO: 38073 - RNA, 1686 nt, Artificial Sequence
  mRNA product Design i-3 (hSL-A100) comprising derived and/or modified sequence from LASV(LASV254-NIG-2011;Clade II)__AIT17674__GPCmut10 (opt5)
aggagaaagcuuaccaugggccagaucauuaccuucuuucaagaggugccccacgucaucgaagagguuaugaacauugugcugaucgcccucagccugcuugcuauucugaaggggaucuacaauguggccacaugcggacucuucggccuggucuccuuucuucugcucugugggagaucuugcagcacgaccuauaaaggaguguacgaacugcagacacuggagcucgacaugaccaaccugaauauguguaugccucuuuccugcacaaagaacaauucucaucacuauaucaugguuggcaacgaaaccgggcuggagcucacacugaccaauacgagcauuaucaaccauaaauucuguaaucuuuccgaugcgcacaagaaaaaccuguacaaucaugcucucaugucuauuaucagcaccuuucaccuguccauuccgaacuucaaucaguaugaggccaugagcugcgacuuuaacggaggcaagaucucugugcaguacaaucugucccacagcuaugccgucgaugcugccaaccauuguggcacaauugcuaacggggugcuccaaaccuucaugcggauggccuggggaggcucuuacaucgcgcuggacuccgggaagggaaauugggauugcaucaugacaagcuaccaguaucuuauuauccagaacaccacgugggaagaccacugucaguuuucucgccccuccccuauuggcuaccuggggcuccugagccaaagaacacgggauaucuauauuucccgcagacuucugggaaccuucacauggacccucucugacagcgagggcaaugaaacccccggcggguacugccugacacgguggaugcugaucgaggccgagcucaaauguuuuggaaacacggcuguugccaagugcaaugaaaaacaugaugaggaguucugcgacaugcugcgccuuuuugauuucuguaagcaggcuaucagacggcugaaaaccgaagcccaggcgaacauucagcucaucaauaaggccgugaacgcucugauuaaugaccaacuuaucaugaagaaccaucugcgcgauauuaugggcaucccuuauugcaauuacuccaaauauugguaccucaaccacacagucaccgggaagacaagccugcccagauguuggcuggugucuaauggauccuaccucaacgaaacccacuucagcgacgacaucgagcagcaggccgauaauaugauuacggagcugcuucaaaaagaauauauggaccggcagggcaagacaccucuggggcucguggaucuguuugucuucucuaccagcuuuuaccugaucuccauuuuccuucaccucguuaaaaucccgacccaucgccacgugauuggaaagcccugcccuaaaccccauagacugaaccacaugggcaucuguucuugcggccuguauaagcacccuggggugcccgucaaguggaaacggugaggacuaguuauaagacugacuagcccgaugggccucccaacgggcccuccuccccuccuugcaccgagauuaaucaaaggcucuuuucagagccaccaaaaaaaaaaaaaaaaaaaaaaaaaaaaaaaaaaaaaaaaaaaaaaaaaaaaaaaaaaaaaaaaaaaaaaaaaaaaaaaaaaaaaaaaaaaaaaaaaaaaa

SEQ ID NO: 38074 - RNA, 1686 nt, Artificial Sequence
  mRNA product Design i-3 (hSL-A100) comprising derived and/or modified sequence from LASV(Nig08-A19;Clade III)__ADU56618__GPCmut10 (opt5)
aggagaaagcuuaccaugggccagaucgugaccuucuuucaagaggucccccacguuauugaagaggugaugaacaucgugcugauugcccucagcauccuggcuauucuuaaggggcuguacaauaucgccacaugcggacucaucggccuggucacguuccuucugcucuccgggagaucuuguagcaugaccuauaaaggaguguacgaacugcagacacuggagcucaacaugaauacccugaacaugugcaugccucuuuccuguacaaagaauaacucucaucacuauauuaugguuggcaaugaaaccgggcuggagcucacacugaccaacacgagccuucugcaucacaaauuuugcaaucucuccgacgcgcauaagaaaaaccuguacgaucacacccugaugucuaucauuagcacauuccaccucuccaucccgaauuuuaaccaguaugaggcuaugagcugugacuucaauggaggcaagauuaccgugcaguacaaccugucucauuccuaugccaucgaugccgcuaaucacugcggcacagucgccaacggggugcuucaaaccuuuaugcggauggcuuggggaggcagcuacauugcccuggacucugggcgcggaaagugggauuguaucaugacguccuaccaguaucucaucauucagaacacaaccugggaagaccauugccaguucagcagacccucuccuaucggcuaccuggggcuucugucccaacggacacgcgauauuuauaucagcagacggcuccugggaaccuuuaccuggacacuguccgacucugagggcaaugaaacgcccggcggguacugucucacccgcuggaugcugauugaggcggagcuuaaaugcuucggaaacacagccguugcuaaguguaaugaaaaacacgaugaggaauuuugcgacaugcugagacucuucgauuuuugcaagcaggccauccggcgccugaaagcugaggcccagaugagcauccagcuuauuaacaaggcggugaaugcccugaucaacgaccaacucauuaugaagaaucaccugagagauaucaugggcauuccuuauuguaacuacuccaaauauugguaccugaaucauaccagcacagggcggaccucucucccccgcugcuggcuggucuccaacggaagcuaccuuaaugaaacgcacuucucugacgacaucgagcagcaggcugauaacaugaucacagagaugcugcaaaaggaauaucucgacagacagggcaaaaccccucuggggcugguggaucuuuucguguuuagcaccuccuucuaccucauuucuaucuuucugcaucuggucaagauuccgacacaccggcauaucguuggaaaacccuguccuaagccccaccgccucaaucacaugggcauuugcagcuguggccuguauaaacagccuggggugcccgugagauggaagcggugaggacuaguuauaagacugacuagcccgaugggccucccaacgggcccuccuccccuccuugcaccgagauuaaucaaaggcucuuuucagagccaccaaaaaaaaaaaaaaaaaaaaaaaaaaaaaaaaaaaaaaaaaaaaaaaaaaaaaaaaaaaaaaaaaaaaaaaaaaaaaaaaaaaaaaaaaaaaaaaaaaaaa

SEQ ID NO: 38075 - RNA, 1689 nt, Artificial Sequence
  mRNA product Design i-3 (hSL-A100) comprising derived and/or modified sequence from LASV(G1180-SLE-2010;Clade IV)__AIT17168__GPCmut10 (opt5)
aggagaaagcuuaccaugggccagaucgugaccuucuuucaagaggucccccacguuauugaagaggugaugaacaucgugcugauugcccucagcauccuggcuguccuuaaggggcuguacaauuucgccacaugcggacucgugggccugcuuacguuucugcuccugugugggagauccugcaccgcgucucgguauaaaggaguuuacgaacugcagacacucgagcugaacauggaaacccuuaauauguguaugccucugagcugcacaaagaacaauucccaucacuauauuauggugggcaacgagaccgggcucgagcugacacuuaccaauacgucuaucaucaaccauaaauucuguaaucugagcgacgcucacaagaaaaaccucuacgaucaugcccugauguccauuaucucuaccuuucaccugagcauuccgaauuucaaccaguaugaagccauguccugcgacuuuaauggaggcaagaucagcguccaguacaaccucucucacuccuaugcuggcgaugccgcuaaucauugugggacaguggccaacggaguucugcaaaccuucaugcgcauggcguggggcgggagcuacauugcccuugacucuggacacggcuccugggauugcaucaugacaagcuaccaguaucugauuauccagaacaccacgugggaggaccauugucaguuuucuagacccuccccuaucggguaccucggacugcuuagccaacggacacgcgauauuuauaucuccagacggcugcucggcaccuucacauggacccugucugacagcgaaggcaaggauacccccgggggauacugccugacacgcuggaugcucauugaggcugagcugaaauguuuuggcaauacggccguggcuaagugcaacgaaaaacacgacgaggaguucugcgauaugcuuagacuguuugacuucuguaagcaggccauccagcggcucaaagcggaagcccagauguccauucaacugaucaauaaggcugucaacgcccuuaucaaugaucagcugauuaugaagaaccaccuccgcgacaucauggggauuccuuauugcaauuacagcaaauauugguaccugaaccauaccacaaccggaaagacaucucugcccaaauguuggcucguguccaauggcagcuaccugaacgaaacccacuucucugacgauaucgagcagcaagcugacaauaugauuacggagaugcuucagaaggaauauauggagagacaggggaaaacaccucugggacucguggaucuguuugucuucagcaccuccuuuuaccugaucucuaucuuccuucaucucguuaagauuccgacccaccggcauaucgugggcaaaagcugccccaagccucaccgccugaaccacaugggcauuuguuccugcgggcuguauaagcagcccggagugccugucaaauggaagagaugaggacuaguuauaagacugacuagcccgaugggccucccaacgggcccuccuccccuccuugcaccgagauuaaucaaaggcucuuuucagagccaccaaaaaaaaaaaaaaaaaaaaaaaaaaaaaaaaaaaaaaaaaaaaaaaaaaaaaaaaaaaaaaaaaaaaaaaaaaaaaaaaaaaaaaaaaaaaaaaaaaaaa

SEQ ID NO: 38076 - RNA, 1689 nt, Artificial Sequence
  mRNA product Design i-3 (hSL-A100) comprising derived and/or modified sequence from LASV(G1442-SLE-2011;Clade IV)__AIT17180__GPCmut10 (opt5)
aggagaaagcuuaccaugggccagaucgugaccuucuuucaagaggucccccacguuauugaagaggugaugaacaucgugcugauugcccucagcauccuggcuguccuuaaggggcuguacaauguggccacaugcggacucauuggccugguuacguuccuucugcucugugggagauccugcaccacaacccuguauaaaggaguguacgaacugcagacacucgagcugaacauggaaacccuuaauauguguaugccucugucuugcacaaagaacaauagccaucacuauauccgggucggcaacgagaccgggcucgagcugacgcuuaccaauacauccaucauuaaccauaaauuuuguaaucugucugacgcgcacaagaaaaaccucuacgaucaugcucugaugagcaucauuuccaccuuccaccugucuaucccgaauuuuaaccaguaugaagccaugagcugcgacuucaauggaggcaagauuuccgugcaguacaaccucagccacucuuaugccggcgaugcugccaaucauugugggacaguugcuaacggagugcugcaaaccuuuaugcgcauggccuggggcggguccuacaucgcgcuugacagcggaagaggcaacugggauugcauuaugacgucuuaccaguaucugaucauccagaauacaaccugggacgaucacugucaguucucccggcccagcccuauuggguaccucggacugcuuucucaacgcacaagagacgucuauaucucccggcgccugcucggcaccuuuaccuggacacugagcgauuccgagggcaaggacacgcccgggggauacugccugaccagauggaugcucauugaagccgagcugaaauguuucggcaacacagcuguggccaagugcaaugagaaacaugaugaagaguuuugcgacaugcuucggcuguucgauuuuuguaagcaggcuauccagcgccucaaagccgaagcgcagaugucuauucaacugaucaacaaggccgugaaugcucuuaucaacgaccagcugauuaugaagaaucaccucagagacaucauggggauuccuuauugcaacuacagcaaauauugguaccugaauaacaccgccacaggaaagaccucccugcccaaauguuggcucaucagcaauggcucuuaccugaacgagacgcacuucuccgaugacauugaacaggaggcugauaauaugaucacagagaugcuucaaaaggaauauauggagcggcaggggaaaaccccucugggacucgucgaccuguucguuuuuagcaccucuuucuaccugaucagcauuuuucuucaucucgugaagaucccgacacaccgccauauugugggcaaauccugccccaagccucacagacugaaccauaugggcaucuguucuugcgggcuguauaagcagcccggagucccugugcgguggaaacgcugaggacuaguuauaagacugacuagcccgaugggccucccaacgggcccuccuccccuccuugcaccgagauuaaucaaaggcucuuuucagagccaccaaaaaaaaaaaaaaaaaaaaaaaaaaaaaaaaaaaaaaaaaaaaaaaaaaaaaaaaaaaaaaaaaaaaaaaaaaaaaaaaaaaaaaaaaaaaaaaaaaaaa

SEQ ID NO: 38077 - RNA, 1689 nt, Artificial Sequence
  mRNA product Design i-3 (hSL-A100) comprising derived and/or modified sequence from LASV(G3010-SLE-2013;Clade IV)__AIT17344__GPCmut10 (opt5)
aggagaaagcuuaccaugggccagaucgugaccuucuuucaagaggucccccacguuauugaagaggugaugaacaucgugcugauugcccucagcauccuggcuguccuuaaggggcuguacaauuucgccacaugcggacucgugggccugguuacguuucuucugcucugugggagauccugcaccacaucucuguauaaaggaguguacgaacugcagacccucgagcugaacauggaaacacuuaauauguguaugccucugagcugcaccaagaacaauucccaucacuauauuauggucggcaacgagacagggcucgagcugacccuuacgaauaccucuaucaucaaccauaaauucuguaaucugagcgacgcgcacaagaaaaaccucuacaaucaugcucugauguccauuaucucuacauuucaccugagcauuccgaacuucaaucaguaugaagccauguccugcgauuuuaacggaggcaagaucagcgugcaguacaaucucucucacuccuaugccggcgacgcugccagccauugugggaccguugcuaacggagugcugcaaacauucaugcggauggccuggggcgggucuuacauugcgcuugauuccggauacggcaagugggacugcaucaugaccagcuaucaguaccugauuauccagaacacgacaugggaggaucacugucaguuuucucgccccuccccuaucggguaucucggacugcuuagccaaagaacccgggacauuuacaucucccgcagacugcucggcacauucaccuggacccugucugauagcgaaggcaaagacacacccgggggauauugccugacgcgguggaugcucauugaggccgagcugaaguguuuuggcaauaccgcugucgccaaaugcaacgaaaagcaugaugaggaguucugcgacaugcuucgccuguuugauuucuguaaacaggcuauccagagacucaagacagaagcccagauguccauucaacugaucaauaaggcggugaacgcccuuaucaaugaccagcugauuaugaaaaaccaccuccgggauaucauggggauuccuuacugcaauuauagcaaguacugguaccugaaccacaccacaaccggaaaaacgucucugcccaaguguuggcucguguccaauggcagcuaucugaacgaaacacauuucucugacgacaucgagcagcaagcugauaauaugauuaccgagaugcuucagaaagaauacauggagcgccaggggaagaccccucugggacucgucgaccuguuuguuuucagcacauccuuuuaucugaucucuaucuuccuucaccucgugaaaauuccgacccauagacacaucgugggcaagagcugccccaagccucaucggcugaaccacaugggcauuuguuccugcgggcuguacaaacagcccggagucccugugcgcuggaagagaugaggacuaguuauaagacugacuagcccgaugggccucccaacgggcccuccuccccuccuugcaccgagauuaaucaaaggcucuuuucagagccaccaaaaaaaaaaaaaaaaaaaaaaaaaaaaaaaaaaaaaaaaaaaaaaaaaaaaaaaaaaaaaaaaaaaaaaaaaaaaaaaaaaaaaaaaaaaaaaaaaaaaa

SEQ ID NO: 38078 - RNA, 1689 nt, Artificial Sequence
  mRNA product Design i-3 (hSL-A100) comprising derived and/or modified sequence from LASV(G502-SLE-2009;Clade IV)__AIT17126__GPCmut10 (opt5)
aggagaaagcuuaccaugggccagaucgugaccuucuuucaagaggucccccacguuauugaagaggugaugaacaucgugcugauugcccucagcauccuggcuguccuuaaggggcuguacaauuucgccacaugcggacucgugggccugcuuacguuucugcuccugugugggagauccugcaccacaggacuguauaaaggcguuuacgaacuccagacccuggagcuuaacauggaaacacugaauauguguaugccucucucuugcaccaagaacaauagccaucacuauauuaugguggggaacgagacaggacuggagcuuacccugacgaauaccuccaucaucaaccauaaauucuguaaucucucugacgcgcacaagaaaaaccuguacgaucaugcucugaugagcauuaucuccacauuucaccucucuauuccgaauuucaaccaguaugaagccaugagcugcgacuuuaauggcggcaagaucuccguccaguacaaccugagccacucuuaugccggggaugcugccgaccauuguggaaccguggcuaauggcguucuucaaacauucaugcggauggccuggggaggguccuacauugcgcuggauagcggccgcgggagaugggacugcaucaugaccucuuaccaguaucucauuauccagaacacgacaugggaggaucacugucaguuuucccggcccagcccuaucggauaccugggccuucugucucaacgcaccagagacauuuauaucucccggcgccuccugggcacauucaccuggacccugagcgauuccgaagggaaggacacacccggaggcuacugccucacgagauggaugcugauugaggccgagcuuaaauguuuugggaacaccgcuguggccaagugcaaugaaaaacaugaugaggaguucugcgacaugcugcggcucuuugauuucuguaagcaggcuauccagcgccugaaagccgaagcgcagaugucuauucaacuuaucaacaaggccgucaaugcucugaucaacgaccagcucgugaugaagaaucaccugagagacauuaugggaaucccuuauugcaacuacagccgguauugguaccugaaucacacaaccacaggccgcaccucccuccccaaauguuggcuggugagcaacgggucuuaccuuaaugaaacgcauuucuccgaugacauugagcagcaagccgauaacaugaucacagagaugcugcagaaggaauauauggagagacagggaaaaaccccucucggccuggucgaccuguuuguuuucagcaccucuuuuuaccuuauuagcaucuuccuccaccuggugaagaucccgacacaucggcacauugugggcaaauccugccccaagccucaucgccugaaucacauggggaucuguucuugcggacucuauaaacagcccggcgucccugugaaguggaagagaugaggacuaguuauaagacugacuagcccgaugggccucccaacgggcccuccuccccuccuugcaccgagauuaaucaaaggcucuuuucagagccaccaaaaaaaaaaaaaaaaaaaaaaaaaaaaaaaaaaaaaaaaaaaaaaaaaaaaaaaaaaaaaaaaaaaaaaaaaaaaaaaaaaaaaaaaaaaaaaaaaaaaa

SEQ ID NO: 38079 - RNA, 1689 nt, Artificial Sequence
  mRNA product Design i-3 (hSL-A100) comprising derived and/or modified sequence from LASV(G733-SLE-2010;Clade IV)__AIT17154__GPCmut10 (opt5)
aggagaaagcuuaccaugggccagaucgugaccuucuuucaagaggucccccacguuauugaagaggugaugaacaucgugcugauugcccucagcauccuggcuguccuuaaggggcuguacaauuucgccacaugcggaauugugggccucguuuccuuucugcuucugugugggagaucuugcacgaccagccucuauaaaggaguguacgaacugcagacacuggagcucaacauggaaacccugaauauguguaugccucuuuccugcacaaagaacaauucucaucacuauaucauggucggcaacgagaccgggcuggagcucacacugaccaauacgagcaucauuaaccauaaauucuguaaucuuuccgacgcgcacaagaaaaaccuguacgaucaugcucucaugucuaucauuagcaccuuucaccuguccaucccgaauuucaaccaguaugaagccaugagcugcgacuuuaauggaggcaagauuucugugcaguacaaccugucccacagcuaugccggcgaugcugccaaucauugugggacaaucgcuaacggaguucuccaaaccuucaugcggauggccuggggcgggucuuacauugcgcuggacuccggacgcgauagaugggacugcaucaugacaagcuaccaguaucuuaucauucagaacaccacgugggaggaucacugucaguuuucucggcccuccccuaucggcuaccuggggcuccugagccaacgcacaagagacauuuauaucucccggcgccuucugggaaccuucacauggacccucucugauagcgaaggcaaggacacccccggcggguacugccugacaagauggaugcugauugaggccgagcucaaauguuuuggaaauacggcuguggccaagugcaacgaaaaacaugaugaggaguucugcgacaugcugcggcuuuuugauuucuguaagcaggcuauccagcgccugaaagccgaagcgcagauguccauccaacucauuaauaaggccgucaacgcucugaucaaugaccagcuuauuaugaagaaccaccugagagacaucaugggcauuccuuauugcaauuacagcaaauauugguaccucaaccacaccacaaccgggaagacaucucugcccaaauguuggcugguguccaauggaagcuaccucaacgaaacccauuucucugaugacaucgagcagcaagccgauaauaugaucacggagaugcugcagaaggaauauauggagcggcagggcaaaacaccucuugggcugguggaccucuuugucuucagcaccuccuuuuaccugauuucuaucuuccugcaccuuguuaagauuccgacccaucgccacguggugggaaaaagcugccccaagccucauagacucaaccacaugggcaucuguuccugcggccuguaugggcagcccggagucccugugaaguggaaacggugaggacuaguuauaagacugacuagcccgaugggccucccaacgggcccuccuccccuccuugcaccgagauuaaucaaaggcucuuuucagagccaccaaaaaaaaaaaaaaaaaaaaaaaaaaaaaaaaaaaaaaaaaaaaaaaaaaaaaaaaaaaaaaaaaaaaaaaaaaaaaaaaaaaaaaaaaaaaaaaaaaaaa

SEQ ID NO: 38080 - RNA, 1689 nt, Artificial Sequence
  mRNA product Design i-3 (hSL-A100) comprising derived and/or modified sequence from MOPV/LASV reassortant(IGS-1;Clade IV)__AFY05576__GPCmut10 (opt5)
aggagaaagcuuaccaugggccagaucgugaccuucuuucaagaggucccccacguuauugaagaggugaugaacaucgugcugauugcccucagcguccuggcugugcuuaaggggcuguacaauuucgccacaugcggacucguuggccuggugacguuucuucugcucugugggagauccugcaccacaucucuguauaaaggagucuacgaacugcagacccucgagcugaacauggaaacacuuaauauguguaugccucugagcugcaccaagaacaauucccaucacuauaucauggugggcaacgagacagggcucgagcugacccuuacgaauaccucuauuaucaaccauaaauucuguaaucugagcgacgcgcacaagaaaaaccucuacgaucaugcucugauguccaucauuucuacauuucaccugagcaucccgaauuucaaccaguaugaagccauguccugcgacuuuaauggaggcaagauuagcguucaguacaaccucucucacuccuaugccggcgaugcugccaaucauugugggaccguggcuaacggaguccugcaaacauucaugcggauggccuggggcgggagcuacaucgcgcuugacucuggacgcggcaacugggauugcauuaugaccuccuaccaguaucugaucauucagaauacgacaugggaggaccacugucaguuuagcagacccucuccuaucggguaccucggacugcuuucccaacggacccgcgauaucuauauuagcagacggcugcucggcacauucaccuggacccuguccgacucugaaggcgaggauacacccgggggauacugccugacgcgcuggaugcucaucgaggccgaacugaaguguuuuggcaacaccgcuguggccaaaugcaaugagaagcaugacgaagaguucugcgauaugcuuagacuguuugacuucuguaaacaggcuauucagcggcucaaggccgaagcgcagaugagcauccaacugauuaacaaagccgugaaugcucuuaucaacgaucagcugaucaugaagaaucaccuccgcgacauuauggggaucccuuauugcaacuacuccaaguauugguaccugaaucacacaaccacaggaagaaccagccugcccaaauguuggcucgucucuaacggcuccuaccugaaugagacgcauuucagcgacgauauugagcagcaagccgacaacaugaucacagaaaugcuucagaaggaguauauggaacggcaggggaaaaccccucugggacucguugaucuguuuguguucucuaccagcuuuuaccugauuuccaucuuccuucaccucgugaagaucccgacacaucgccacauugucggcaaaucuugccccaagccucauagacugaaucacaugggcaucuguagcugcgggcuguauaaacagcccggagugccuguuaaguggaagcggugaggacuaguuauaagacugacuagcccgaugggccucccaacgggcccuccuccccuccuugcaccgagauuaaucaaaggcucuuuucagagccaccaaaaaaaaaaaaaaaaaaaaaaaaaaaaaaaaaaaaaaaaaaaaaaaaaaaaaaaaaaaaaaaaaaaaaaaaaaaaaaaaaaaaaaaaaaaaaaaaaaaaa

SEQ ID NO: 38081 - RNA, 1689 nt, Artificial Sequence
  mRNA product Design i-3 (hSL-A100) comprising derived and/or modified sequence from LASV(LM765-SLE-2012;Clade IV)__AIT17814__GPCmut10 (opt5)
aggagaaagcuuaccaugggccagaucgugaccuucuuucaagaggucccccacguuauugaagaggugaugaacaucgugcugauugcccucagcauccuggcuguccuuaaggggcuguacaauuucgccacaugcggacucgugggccugguuacguuucuucugcucugugggagauccugcaccacaucucuguauaaaggaguguacgaacugcagacccucgagcugaacauggaaacacuuaauauguguaugccucugagcugcaccaagaacaauucccaucacuauauuauggucggcaacgagacagggcucgagcugacccuuacgaauaccucuaucaucgaccauaaauucuguaaccugagcgaugcgcaccggaagaaucucuacgaccaugcucugauguccauuaucucuacauuucaccugagcauuccgaacuucaaucaguaugaagccauguccugcgauuuuaacggaggcaaaaucagcgugcaguacaaucucucucacuccuaugccaaggacgcugccgaucauuguggcaccguugcuaacggggugcugcaaacauucaugcgcauggccuggggaggcagcuacauugcgcuugacucugggagaggacggugggauugcaucaugaccuccuaccaguaucugauuauccagaauacgacaugggaggaccacugucaguuuagccgccccucuccuaucggcuaccucgggcugcuuucccaaagaacccgggauauuuauaucagccgcagacugcucggaacauucaccuggacccuguccgacucugaaggcaaggauacacccggcggguacugccugacgcgguggaugcucauugaggccgagcugaaauguuuuggaaacaccgcugucgccaagugcaacgaaaaacaugacgaggaguucugcgauaugcuucgccuguuugacuucuguaagcaggcuauccagagacucaaagccgaagcgcagaugagcauucaacugaucaauaaggccgugaacgcucuuaucaaugaccagcugauuaugaagaaccaccuccgggauaucaugggcauuccuuauugcaauuacuccaaauauugguaccugaaccacacaaccacagggaagaccagccugcccaaauguuggcucgugucuaauggauccuaccugaacgaaacgcauuucagcgacgauaucgagcagcaagccgacaauaugauuacagagaugcuucagaaggaauauauggagcgccagggcaaaaccccucuggggcucgucgaucuguuuguuuucucuaccagcuuuuaccugaucuccaucuuccuucaccucgugaagauuccgacacauagacacaucgugggaaaacccugcccuaagccccaucggcugaaccacaugggcauuuguucuugcggccuguauaagcagccugggguccccgugaaauggaagcgcugaggacuaguuauaagacugacuagcccgaugggccucccaacgggcccuccuccccuccuugcaccgagauuaaucaaaggcucuuuucagagccaccaaaaaaaaaaaaaaaaaaaaaaaaaaaaaaaaaaaaaaaaaaaaaaaaaaaaaaaaaaaaaaaaaaaaaaaaaaaaaaaaaaaaaaaaaaaaaaaaaaaaa

SEQ ID NO: 38082 - RNA, 1689 nt, Artificial Sequence
  mRNA product Design i-3 (hSL-A100) comprising derived and/or modified sequence from LASV(LM776-SLE-2012;Clade IV)__AIT17824__GPCmut10 (opt5)
aggagaaagcuuaccaugggccagaucgugaccuucuuucaagaggucccccacguuauugaagaggugaugaacaucgugcugauugcccucagcauccuggcuguccuuaaggggcuguacaauuucgccacaugcggacucgugggccugguuacguuucuucugcucugugggagauccugcaccacaucuguguauaaaggagucuacgaacugcagacccuggagcucaacauggaaacacugaauauguguaugccucuuagcugcaccaagaacaauucccaucacuauauuauggugggcaacgagacagggcuggagcucacccugacgaauaccucuaucaucaaccauaaauucuguaaucuuagcgacgcgcacaagaaaaaccuguacgaucaugcucucauguccauuaucucuacauuucaccugagcauuccgaauuucaaccaguaugaagccauguccugcgacuuuaauggaggcaagaucagcguucaguacaaccugucucacuccuaugccggcgaugcugccaaucauugugggaccguggcuaacggaguccuccaaacauucaugcggauggccuggggcgggagcuacauugcgcuggacucuggacacggcaagugggauugcaucaugaccuccuaccaguaucuuauuauccagaacacgacaugggaggaccauugucaguuuagccgccccucuccuaucggguaccugggacuccugucccaaagaacccgggauauuuauaucagccgcagacuucugggcacauucaccuggacccucuccgacucugaaggcaaagauacacccgggggauacugccugacgcgguggaugcugauugaggccgagcucaaguguuuuggcaauaccgcuguggccaaaugcaacgaaaagcacgacgaggaguucugcgauaugcugcgccuuuuugacuucuguaaacaggcuauccagagacugaaggccgaagcgcagaugagcauucaacucaucaauaaggccgugaacgcucugaucaaugaucagcuuauuaugaaaaaccaucugcgggacaucauggggauuccuuauugcaauuacuccaaguauugguaccucaaccacacaaccacaggaaaaaccagccugcccaaguguuggcuggucucuaauggcuccuaccucaacgaaacgcacuucagcgacgauaucgagcagcaagccgacaauaugauuacagagaugcugcagaaagaauauauggagcgccaggggaagaccccucuuggacugguugaucucuuuguguucucuaccagcuuuuaccugaucuccaucuuccugcaucuugugaaaauuccgacacacagacauaucgucggcaagucuugccccaagccucaccggcucaaccacaugggcauuuguagcugcgggcuguauaaacagcccggagugccuguucgcuggaagagaugaggacuaguuauaagacugacuagcccgaugggccucccaacgggcccuccuccccuccuugcaccgagauuaaucaaaggcucuuuucagagccaccaaaaaaaaaaaaaaaaaaaaaaaaaaaaaaaaaaaaaaaaaaaaaaaaaaaaaaaaaaaaaaaaaaaaaaaaaaaaaaaaaaaaaaaaaaaaaaaaaaaaa

SEQ ID NO: 38083 - RNA, 1689 nt, Artificial Sequence
  mRNA product Design i-3 (hSL-A100) comprising derived and/or modified sequence from LASV(Mad39;Clade IV)__ANH09722__GPCmut10 (opt5)
aggagaaagcuuaccaugggccagaucgugaccuucuuucaagaggucccccacguuauugaagaggugaugaacaucgugcugauugcccucagcauccuggcuguccuuaaggggcuguacaauguggccacaugcggacucauuggccugguuacguuccuucugcucugugggagauccugcaccacaacccuguauaaaggaguguacgaacugcaggcgcucgagcugaacauggaaacacuuaauauguguaugccucugucuugcaccaagaacaauagccaucacuauauccgggucggcaacgagacagggcucgagcugacccuuacgaauaccucccugaucaaccauaaauuuuguaaucucucugacgcucacaagaaaaaccuguacgaucaugcccugaugagcauuaucuccacauuccaccucucuauuccgaauuuuaaccaguaugaagccaugagcugcgacuucaaugauggaaagaucuccgugcaguacaaccugagccacaccuaugcuggcgacacagccaaucauuguggcaccguugcuaacggggugcuucaaacguuuaugcgcauggccuggggaggcucuuacauugcgcuggauuccgggagaggaggcugggacugcaucaugacaagcuaccaguaucucauuauccagaacaccacaugggaggaucacugucaguucucucggcccuccccuaucggguaccugggacuucugagccaacgcaccagagacauuuauaucucucggcgccuccugggcaccuuuacauggacgcuguccgauagcgaaggcaaggacacccccgggggauacugccucacaagauggaugcugauugaggccgagcuuaaauguuucggcaauaccgcugucgccaagugcaacgaaaaacaugaugaggaauuuugcgacaugcugcgccucuucgauuuuuguaagcaggcuauccagcggcugaaagccgaggcgcagauguccauucaacuuaucaauaaggccgugaacgcucugaucaaugaccagcucauuaugaagaaccaccugagagacaucauggggauuccuuauugcaauuacucuaaauauugguaccugaaccacacagugaccggaaagacgagccuccccaaauguuggcuggucuccaauggcagcuaccuuaacgaaacacauuucucugaugacaucgagcagcaagccgauaauaugauuaccgagaugcugcagaaggaauauauggagcggcaggggaaaaccccucucggacugguugaccuguucguguuuuccaccagcuucuaccuuaucucuaucuuucuccaccuggugaagauuccgacacaucgccacgucgugggcaaacccugcccuaagccccauagacugaaccacaugggcaucuguagcugcggguucuauaagcagccuggaguucccgugcgguggaaacgcugaggacuaguuauaagacugacuagcccgaugggccucccaacgggcccuccuccccuccuugcaccgagauuaaucaaaggcucuuuucagagccaccaaaaaaaaaaaaaaaaaaaaaaaaaaaaaaaaaaaaaaaaaaaaaaaaaaaaaaaaaaaaaaaaaaaaaaaaaaaaaaaaaaaaaaaaaaaaaaaaaaaaa

SEQ ID NO: 38084 - RNA, 1689 nt, Artificial Sequence
  mRNA product Design i-3 (hSL-A100) comprising derived and/or modified sequence from LASV(Z0947-SLE-2011;Clade IV)__AIT17840__GPCmut10 (opt5)
aggagaaagcuuaccaugggccagaucgugaccuucuuucaagaggucccccacguuauugaagaggugaugaacaucgugcugauugcccucagcauccuggcuguccuuaaggggcuguacaauuucgccacaugcggacucgugggccugguuacguuucuucugcucugugggagauccugcaccauuucucuguauaaaggaguguacgaacugcagacacucgagcugaacauggaaacccuuaauauguguaugccucugagcugcacaaagaacaauucccaucacuauaucauggucggcaacgagaccgggcucgagcugacacuuaccaauacgucuaucauuaaccauaaauucuguaaucugagcgacgcgcacaagaaaaaccucuacgaucaugcucugauguccaucauuucuaccuuucaccugagcaucccgaauuucaaccaguaugaagccauguccugcgacuuuaauggaggcaagauuagcgugcaguacaaccucucucacuccuaugccggcgaugcugccaaucauugugggacaguugcuaacggagugcugcaaaccuucaugcggauggccuggggcgggagcuacaucgcgcuugacucuggacgcgauagaugggacugcauuaugacauccuaccaguaucugaucauccagaacaccacgugggaggaucacugucaguuuagccggcccucuccuauuggcuaccucgggcugcuuucccaacgcacaagagacaucuauauuagccggcgccugcucggaaccuucacauggacccuguccgauucugaaggcaaggacacccccggcggguacugccugacaagauggaugcucaucgaggccgagcugaaauguuuuggaaauacggcugucgccaagugcaacgaaaaacaugaugaggaguucugcgacaugcuucggcuguuugauuucuguaagcaggcuauucagcgccucaaagccgaagcgcagaugagcauccaacugaucaauaaggccgugaacgcucuuauuaaugaccagcugaucaugaagaaccaccucagagacauuaugggcaucccuuauugcaauuacuccaaauauugguaccugaaccacaccacaaccgggaagacaagccugcccaaauguuggcucgugucuaauggauccuaccugaacgaaacccauuucagcgaugacauugagcagcaagccgauaauaugaucacggagaugcuucagaaggaauauauggagcggcagggcaaaacaccucuggggcucgucgaccuguuuguuuucucuaccagcuuuuaccugaucuccauuuuccuucaccucgugaagaucccgacccaucgccacauugugggaaaacccugcccuaagccccauagacugaaccacaugggcaucuguucuugcggccuguauaagcagccugggguccccgugaaauggaagcggugaggacuaguuauaagacugacuagcccgaugggccucccaacgggcccuccuccccuccuugcaccgagauuaaucaaaggcucuuuucagagccaccaaaaaaaaaaaaaaaaaaaaaaaaaaaaaaaaaaaaaaaaaaaaaaaaaaaaaaaaaaaaaaaaaaaaaaaaaaaaaaaaaaaaaaaaaaaaaaaaaaaaa

SEQ ID NO: 38085 - RNA, 1665 nt, Artificial Sequence
  mRNA product Design i-3 (A100) comprising derived and/or modified sequence from LASV(Josiah;Clade IV)__NP_694870__GPCmut10 (opt1)
aggagaaagcuuaccaugggccagaucgugaccuucuuccaggaggucccccacgugaucgaggaggugaugaacaucguccugaucgcccucagcgugcuggccgugcugaaggggcucuacaacuucgcgaccugcggccuggucgggcuggugacguuccuccugcugugcggccgcuccugcaccaccagccucuacaaggggguguacgagcugcagacccuggagcucaacauggagacgcugaacaugugcaugccgcuguccugcaccaagaacaacagccaccacuacaucauggucggcaacgagaccggccucgagcugacgcugaccaacaccuccaucaucaaccacaaguucugcaaccucagcgacgcccacaagaagaaccuguacgaccacgcccugauguccaucaucagcaccuuccaccucuccauccccaacuucaaccaguacgaggccaugagcugcgacuucaacgggggcaagaucuccgugcaguacaaccugagccacuccuacgccggggacgcggccaaccacugcggcacgguggccaacgggguccugcagaccuucaugcggauggccuggggcggcagcuacaucgcgcucgacuccgggcgcggcaacugggacugcaucaugaccagcuaccaguaccugaucauccagaacaccacgugggaggaccacugccaguucucccggcccagccccaucggguaccugggccuccugucccagcgcacccgggacaucuacaucagccgccggcugcucggcaccuucaccuggacgcugagcgacuccgaggggaaggacaccccgggcggguacugccugacccgcuggaugcucaucgaggccgagcugaagugcuucggcaacaccgccguggccaagugcaacgagaagcacgacgaggaguucugcgacaugcugcggcuguucgacuucugcaagcaggccauccagcgccugaaggcggaggcccagaugagcauccagcugaucaacaaggccgugaacgcccucaucaacgaccagcugaucaugaagaaccaccuccgggacaucauggggauccccuacugcaacuacuccaaguacugguaccucaaccacacgaccaccggccgcaccagccugcccaagugcuggcuggucuccaacggcagcuaccucaacgagacgcacuucuccgacgacaucgagcagcaggccgacaacaugaucaccgagaugcugcagaaggaguacauggagcggcaggggaagacgccccugggccucguggaccuguucguguucagcaccuccuucuaccugaucagcaucuuccugcaccucgucaagaucccgacccaccgccacaucguggggaaguccugccccaagccccaccggcugaaccacaugggcaucugcagcugcgggcuguacaagcagcccggcgugccggucaaguggaagcgcugaggacuaguuauaagacugacuagcccgaugggccucccaacgggcccuccuccccuccuugcaccgagauuaauaaaaaaaaaaaaaaaaaaaaaaaaaaaaaaaaaaaaaaaaaaaaaaaaaaaaaaaaaaaaaaaaaaaaaaaaaaaaaaaaaaaaaaaaaaaaaaaaaaaa

SEQ ID NO: 38086 - RNA, 1662 nt, Artificial Sequence
  mRNA product Design i-3 (A100) comprising derived and/or modified sequence from LASV(LP;Clade I)__AAF86701__GPCmut10 (opt1)
aggagaaagcuuaccaugggccagaucaucaccuucuuccaggaggugccccacgucaucgaggaggugaugaacaucgugcugaucgcccucagccugcuggccauccucaaggggcuguacaacaucgcgaccugcggcaucaucgggcuggucgccuuccucuuccugugcggcaaguccugcagccugacgcucaagggcggguacgagcugcagacccuggagcucaacauggagacccugaacaugugcaugccgcuguccugcacgaagaacagcucccaccacuacauccgcgugggcaacgagaccgggcucgagcugacccugaccaacacgagcaucaucaaccacaaguucugcaaccucuccgacgcccacaagaagaaccuguacgaccacgcccugaugagcaucaucuccaccuuccaccucagcauccccaacuucaaccaguacgaggccauguccugcgacuucaacggcgggaagaucagcgugcaguacaaccugucccacagcuacgcgggcgacgccgccgagcacugcgggaccgucgccaacggcgugcugcagaccuucaugcggauggcguggggcgggcgcuacaucgcccucgacuccggcaaggggaacugggacugcaucaugacgagcuaccaguaccugaucauccagaacaccaccugggaggaccacugccaguucucccggcccagccccaucggcuaccugggccuccugucccagcgcacccgggacaucuacaucagccgccggcugcucgggacguucaccuggacccugagcgacuccgagggcaacgagacccccgggggcuacugccugacgcgcuggaugcucaucgaggccgagcugaagugcuucgggaacaccgccguggccaagugcaacgagaagcacgacgaggaguucugcgacaugcugcggcuguucgacuucugcaagcaggcgauccgccggcugaaggccgaggcccagaugagcauccagcugaucaacaaggccgucaacgcccucaucaacgaccagcugaucaugaagaaccaccuccgcgacaucaugggcauccccuacugcaacuacuccaaguacugguaccucaaccacaccagcuccggccggaccagccugcccaagugcuggcugaucuccaacgggagcuaccucaacgagacgcaguucuccgacgacaucgagcagcaggcggacaacaugaucaccgagaugcugcagaaggaguacaucgagcgccagggcaagaccccgcuggggcucguggacaucuucaucuucagcaccuccuucuaccugaucagcaucuuccugcaccugaucaagaucccgacgcaccggcacaucgugggcaagcccugccccaagccccaccgccucaaccacaugggggucugcuccugcggccuguacaagcacccgggcgugcccaccaaguggaagcggugaggacuaguuauaagacugacuagcccgaugggccucccaacgggcccuccuccccuccuugcaccgagauuaauaaaaaaaaaaaaaaaaaaaaaaaaaaaaaaaaaaaaaaaaaaaaaaaaaaaaaaaaaaaaaaaaaaaaaaaaaaaaaaaaaaaaaaaaaaaaaaaaaaaa

SEQ ID NO: 38087 - RNA, 1662 nt, Artificial Sequence
  mRNA product Design i-3 (A100) comprising derived and/or modified sequence from LASV(803213;Clade II)__AAF86703__GPCmut10 (opt1)
aggagaaagcuuaccaugggccagaucaucaccuucuuccaggaggugccccacgucaucgaggaggugaugaacaucgugcugaucgcccucagccugcuggccauccucaaggggaucuacaacgucgcgaccugcggccuguucgggcugaucuccuuccuccugcugugcggccgcagcugcuccgugacguacaaggggguguacgagcuccagacccuggagcugaacauggccaaccucaacaugugcaugccgcugagcugcaccaagaacaacucccaccacuacaucauggucggcaacgagacgggccuggagcucacccugaccaacaccagcaucaucaaccacaaguucugcaaccuguccgacgcccacaagaagaaccucuacgaccacgcccugaugagcaucaucuccacguuccaccugagcauccccaacuucaaccaguacgaggccauguccugcgacuucaacgggggcaagaucagcgugcaguacaaccucucccacagcuucgcgguggacgccgccaaccacugcgggaccaucgccaacggcguccugcagaccuucaugcggauggcguggggcggguccuacaucgcccuggacagcggcaaggggaacugggacugcaucaugaccuccuaccaguaccucaucauccagaacacgaccugggaggaccacugccaguucagccgccccucccccaucggcuaccuggggcugcucagccagcggacccgcgacaucuacaucagccggcgccugcugggcaccuucacguggacccucuccgacagcgagggcaacgaggcccccgggggcuacugccugacccgguggaugcugaucgaggccgagcucaagugcuucgggaacaccgccguggcgaagugcaacgagaagcacgacgaggaguucugcgacaugcugcgccuguucgacuucugcaagcaggccaucaagcggcucaagacggaggcccagauguccauccagcugaucaacaaggccgugaacgcccugaucaacgaccagcucaucaugaagaaccaccuccgcgacaucaugggcauccccuacugcaacuacagccgguacugguaccugaaccacaccgucaccgggaagaccucccugccccgcugcuggcuggugagcaacggcuccuaccugaacgagacgcacuucagcgacgacaucgagcagcaggcggacaacaugaucaccgagaugcuccagaaggaguacauggaccggcagggcaagaccccgcuggggcugguggaccucuucgucuucuccaccagcuucuaccugaucuccaucuuccugcaccuggugaagaucccgacgcaccgccacaucgugggcaagcccugccccaagccccaccggcucaaccacauggggaucugcagcugcggccuguacaagcacccggggguccccgugaaguggaagcgcugaggacuaguuauaagacugacuagcccgaugggccucccaacgggcccuccuccccuccuugcaccgagauuaauaaaaaaaaaaaaaaaaaaaaaaaaaaaaaaaaaaaaaaaaaaaaaaaaaaaaaaaaaaaaaaaaaaaaaaaaaaaaaaaaaaaaaaaaaaaaaaaaaaaa

SEQ ID NO: 38088 - RNA, 1662 nt, Artificial Sequence
  mRNA product Design i-3 (A100) comprising derived and/or modified sequence from LASV(GA391;Clade III)__CAA36645__GPCmut10 (opt1)
aggagaaagcuuaccaugggccagaucgugaccuucuuccaggaggucccccacgugaucgaggaggugaugaacaucguccugaucgcccucagcauccuggccauccugaaggggcucuacaacguggcgaccugcggccugaucgggcuggugacguuccuccugcuguccggccgcagcugcucccucaucuacaaggggaccuacgagcugcagacccuggagcucaacauggagacccugaacaugugcaugccgcugagcugcaccaagaacaacucccaccacuacauccgggucggcaacgagaccggccucgagcugacccugacgaacaccagcauccucaaccacaaguucugcaaccuguccgacgcccacaagcgcaaccuguacgaccacagccucauguccaucaucagcaccuuccaccuguccauccccaacuucaaccaguacgaggccaugagcugcgacuucaacgggggcaagaucaccgugcaguacaaccugucccacagcuucgccguggacgccgcggggcacugcggcacgcucgccaacgggguccugcagaccuucaugcggauggccuggggcggcuccuacaucgcccuggacagcgggcgcggcaacugggacugcaucaugaccuccuaccaguaccucaucauccagaacaccacgugggacgaccacugccaguucagccggcccucccccaucggguaccugggccugcucagccagcgcacccgggacaucuacaucagccgccggcugcugggcaccuucaccuggacgcucuccgacagcgaggggaacgagaccccgggcggguacugccugacccgcuggaugcugaucgaggcggagcucaagugcuucggcaacaccgccguggccaagugcaacgagaagcacgacgaggaguucugcgacaugcugcggcuguucgacuucugcaagcaggccauccgccggcucaagacggaggcccagauguccauccagcugaucaacaaggcggugaacgcccugaucaacgaccagcucaucaugaagaaccaccuccgcgacaucauggggauccccuacugcaacuacagccgguacugguaccugaaccacaccuccaccggcaagaccagccugccccgcugcuggcugaucuccaacggcagcuaccugaacgagacgaaguucuccgacgacaucgagcagcaggccgacaacaugaucaccgagaugcuccagaaggaguacaucgaccggcaggggaagacgccccugggccuggucgaccuguucguguucagcaccuccuucuaccucaucagcaucuuccugcaccuggugaagaucccgacccaccgccacaucgucgggaagcccugccccaagccccaccggcucaaccacaugggcaucugcuccugcgggcuguacaagcagccgggcgugcccgugcgcuggaagcggugaggacuaguuauaagacugacuagcccgaugggccucccaacgggcccuccuccccuccuugcaccgagauuaauaaaaaaaaaaaaaaaaaaaaaaaaaaaaaaaaaaaaaaaaaaaaaaaaaaaaaaaaaaaaaaaaaaaaaaaaaaaaaaaaaaaaaaaaaaaaaaaaaaaa

SEQ ID NO: 38089 - RNA, 1665 nt, Artificial Sequence
  mRNA product Design i-3 (A100) comprising derived and/or modified sequence from LASV(AV;Clade V)__CCA30314__GPCmut10 (opt1)
aggagaaagcuuaccaugggccagaucgugaccuucuuccaggaggucccccacgugaucgaggaggugaugaacaucguccugaucgcccucagcauccuggccgugcugaaggggcucuacaacaucgcgaccugcggccugaucgggcugaucacguuccuccugcugugcggccgcuccugcagcuccaaccucuacaaggggguguacgagcugcagagccuggaccucaacauggagacccugaacaugugcaugccgcuguccugcaccaagaacaacagccaccacuacauccgggucggcaacgacacgggccucgagcugacccugaccaacaccuccauccucaaccacaaguucugcaaccugagcgacgcccacaagaaggaccuguacgaccacgcccucauguccaucaucagcacguuccaccuguccauccccaacuucaaccaguacgaggccaugagcugcgacuucaacgggggcaagaucuccgugcaguacaaccugagccacuccuacgccaucgacgcggccaaccacugcgggaccguggccaacggcauccuccagaccuucaugcgcauggccuggggcgggagcuacaucgcgcuggacuccggccgggggaacugggacugcaucaugaccagcuaccaguaccugaucauccagaacacgaccugggagaaccacugccaguucucccgccccagccccaucggcuaccucgggcugcugagccagcggacccgcgacaucuacaucucccggcgccuccugggcaccuucacguggacccugagcgacuccgagggcaacgccacccccgggggcuacugccucacccgguggaugcugaucgaggccgagcugaagugcuucgggaacacggccgucgccaagugcaacgagaagcacgacgaggaguucugcgacaugcuccgccuguucgacuucugcaagcaggcgaucagccggcugaaguccgaggcccagaugagcauccagcucaucaacaaggccgugaacgcccugaucaacgaccagcugaucaugaagaaccaccuccgcgacaucaugggcauccccuacugcaacuacuccaaguacugguaccugaaccacaccaucaccgggaagaccagccugcccaagugcuggcucguguccaacggcagcuaccugaacgagacgcacuucuccgacgacaucgagcagcaggccgacaacaugaucaccgagaugcugcagaaggaguacauggagcggcagggcaagaccccgcucgggcuggucgaccuguucguguucagcaccuccuucuaccugaucagcaucuuccuccgccuggugaagaucccgacgcaccggcacaucgucggcaagcccugccccaagccccaccgccugaaccacauggggaucugcuccugcggccucuacaagcagccgggggugcccgugcgguggaagcgcugaggacuaguuauaagacugacuagcccgaugggccucccaacgggcccuccuccccuccuugcaccgagauuaauaaaaaaaaaaaaaaaaaaaaaaaaaaaaaaaaaaaaaaaaaaaaaaaaaaaaaaaaaaaaaaaaaaaaaaaaaaaaaaaaaaaaaaaaaaaaaaaaaaaa

SEQ ID NO: 38090 - RNA, 1662 nt, Artificial Sequence
  mRNA product Design i-3 (A100) comprising derived and/or modified sequence from LASV(Togo/2016/7082;Clade VI)__AMR44577__GPCmut10 (opt1)
aggagaaagcuuaccaugggccagaucaucaccuucuuccaggaggugccccacgucaucgaggaggugaugaacaucgugcugaucgcccucagccugcuggccauccucaagggggucuacaacguggcgaccugcggcaucaucgggcuggugacguuccuguuccucugcggccgcuccugcagccugaucuacaagggguccuacgagcugcagacccucgagcugaacauggagacccugaacaugugcaugccgcucagcugcacgaagaacuccagccaccacuacauccgggucggcaacgagaccggccuggagcugacccucaccaacacguccaucaucaaccacaaguucugcaaccugagcgacgcccacaagcgcaaccuguacgaccacgcccucauguccauccugagcaccuuccaccuguccauccccaacuucaaccaguacgaggccaugagcugcgacuucaacgggggcaagaucuccgugcaguacaaccucagccacgccuacgcgguggacgccgccgagcacugcgggaccgucgccaacggcgugcugcagaccuucaugcggauggcguggggcggguccuacaucgcccuggacagcggccgcgggaacugggacugcaucaugacguccuaccaguaccucaucauccagaacaccaccugggaggaccacugccaguucagccggcccucccccaucggcuaccuggggcugcucagccagcgcacccgggacaucuacaucagccgccggcugcugggcacguucaccuggacccucuccgacagcgagggcaacgagacccccgggggcuacugccugacgcgcuggaugcugaucgaggccgagcucaagugcuucgggaacaccgccguggccaagugcaacgagaagcacgacgaggaguucugcgacaugcugcggcuguucgacuucugcaagcaggcgauccagcgccucaaguccgaggcccagaugagcauccagcugaucaacaaggccgucaacgcccugaucaacgaccagcucaucaugaagaaccaccuccgggacaugaugggcauccccuacugcaacuacuccaaguacugguaccugaaccacaccagcuccgggcgcaccagccugcccaagugcuggcugguguccaacggcagcuaccugaacgagacgcacuucuccgacgacaucgagcagcaggccgacaacaugaucaccgagaugcuccagaaggaguacaucgaccggcagggcaagaccccgcuggggcugguggaccucuucgucuucagcaccuccuucuaccugaucagcaucuuccugcaccugaucaagaucccgacgcaccgccacaucgugggcaagcccugccccaagccccaccggcucaaccacauggggaucugcuccugcggccuguacaagcagccgggggugcccacccgcuggaagcggugaggacuaguuauaagacugacuagcccgaugggccucccaacgggcccuccuccccuccuugcaccgagauuaauaaaaaaaaaaaaaaaaaaaaaaaaaaaaaaaaaaaaaaaaaaaaaaaaaaaaaaaaaaaaaaaaaaaaaaaaaaaaaaaaaaaaaaaaaaaaaaaaaaaa

SEQ ID NO: 38091 - RNA, 1662 nt, Artificial Sequence
  mRNA product Design i-3 (A100) comprising derived and/or modified sequence from LASV(KAK-428;Clade n.d. (VII))__ANH09740__GPCmut10 (opt1)
aggagaaagcuuaccaugggccagaucgugaccuucuuccaggaggucccccacgugaucgaggaggugaugaacaucguccugaucgcccucagccugcuggccauccucaaggggcuguacaacuucgcgaccugcggcgugaucgggcugaucacguuccuccugcugugcggccgcuccugcagcgccaccuacaaggggcaguacgagcuccagacccuggagcugaacauggagucccucaacaugugcaugccgcugagcugcacgaagaacaacucccaccacuacauccgggccggcaacaacaccggccuggagcucacccugaccaacacgagcaucaucucccacaaguucugcaaccugagcgacgcccacaagaagaaccucuacgaccacacccugauguccaucaucaccaccuuccaccugagcauccccaacuucaaccaguacgaggccauguccugcgacuucaacgggggcaagaucagcauccaguacaaccucucccacagcuacgcgggggacgccgcccagcacugcggcacgguggccaacgggguccugcagaccuucaugcgcauggcguggggcggcuccuaccuggcccucgacagcgggcggcgcggcugggacugcaucaucuccagcuaccaguaccugaucauccagaacaccaccugggacgaccacugccaguucucccggcccagccccaucggguaccugggcuucgugagccagaagacgcgcgacaucuacaucucccggcgccuccugggcaccuucaccuggacccugagcgacuccgaggggcacgacaugccgggcggguacugccucacgcgguggaugcugaucgaggccgaccugaagugcuucggcaacaccgccguggccaagugcaacgagaagcacgacgaggaguucugcgacauguggcgccucuucgacuucugcaagcaggcgauccagcggcugaaggccgaggcccagaugaacauccagcugaucaacaaggccgucaacgcccucaucaacgaccagcugaugaugaagaaccaccuccgcgacaucauggggauccccuacugcaacuacagcaaguucugguaccugaacaacaccaccacgggccggaccucccugccccgcugcuggcugaucagcaacggcuccuaccucaacgagacccacuucagcgacgacaucgagcagcaggcggacaacaugaucaccgagaugcugcagaaggaguacauggaccggcaggggaagacgccccugggccucguggaccuguucguguucuccaccagcuucuaccugaucaccaucuuccuccaccuggucaagaucccgacccaccgccacaucguggggaagcccugccccaagccccaccggcugaaccacaugggcaucugcuccugcgggcuguacaagcagccgggcgugcccguccgcuggaagcggugaggacuaguuauaagacugacuagcccgaugggccucccaacgggcccuccuccccuccuugcaccgagauuaauaaaaaaaaaaaaaaaaaaaaaaaaaaaaaaaaaaaaaaaaaaaaaaaaaaaaaaaaaaaaaaaaaaaaaaaaaaaaaaaaaaaaaaaaaaaaaaaaaaaa

SEQ ID NO: 38092 - RNA, 1662 nt, Artificial Sequence; identical to SEQ ID NO: 38086
  mRNA product Design i-3 (A100) comprising derived and/or modified sequence from LASV(Pinneo-NIG-1969;Clade I)__AIT17836__GPCmut10 (opt1)

SEQ ID NO: 38093 - RNA, 1662 nt, Artificial Sequence
  mRNA product Design i-3 (A100) comprising derived and/or modified sequence from LASV(ISTH0009-NIG-2011;Clade II)__AIT17404__GPCmut10 (opt1)
aggagaaagcuuaccaugggccagaucaucaccuucuuccaggaggugccccacgucaucgaggaggugaugaacaucgugcugaucgcccucagccugcuggccauccucaaggggaucuacaacgucgcgaccugcggccuguucgggcugguguccuuccuccugcugugcggccgcagcugcuccacgaccuacaaggggguguacgagcuccagacccuggagcuggacauggccagccucaacaugugcaugccgcuguccugcacgaagaacaacagccaccacuacaucauggucggcaacgagaccggccuggagcucacccugaccaacacguccaucaucaaccacaaguucugcaaccugagcgacgcccacaagaagaaccucuacgaccacgcccugauguccaucaucagcaccuuccaccuguccauccccaacuucaaccaguacgaggccaugagcugcgacuucaacgggggcaagaucuccgugcaguacaaccucagccacgcguacgccguggacgccgccaaccacugcgggaccaucgcgaacggcguccugcagaccuucaugcggauggccuggggcggguccuacaucgcccuggacagcggcaagggguccugggacugcaucaugacgagcuaccaguaccucaucauccagaacaccaccugggaggaccacugccaguucucccgccccagccccaucggcuaccuggggcugcucagccagcggacccgcgacaucuacaucucccggcgccugcugggcacguucaccuggacccucagcgacuccgagggcaacgagacccccgggggcuacugccugacgcgguggaugcugaucgaggccgagcucaagugcuucgggaacaccgccguggcgaagugcaacgagaagcacgacgaggaguucugcgacaugcugcgccuguucgacuucugcaagcaggccauccggcgccucaagaccgaggcccagaugagcauccagcugaucaacaaggccgugaacgcccugaucaacgaccagcucaucaugaagaaccaccuccgggacaucaugggcaucccguacugcaacuacuccaaguacugguaccugaaccacaccgucacggggaagaccagccugccccgcugcuggcugguguccaacggcagcuaccugaacgagacccacuucuccgacgacaucgagcagcaggcggacaacaugaucaccgagcuccugcagaaggaguacauggaccggcagggcaagacgccccuggggcucguggaccuguucgucuucagcaccuccuucuaccugaucagcaucuuccugcaccucaucaagaucccgacccaccgccacaucaccggcaagcccugccccaagccccaccggcugaaccacauggggaucugcuccugcggccuguacaagcacccgggggugcccgugaaguggaagcgcugaggacuaguuauaagacugacuagcccgaugggccucccaacgggcccuccuccccuccuugcaccgagauuaauaaaaaaaaaaaaaaaaaaaaaaaaaaaaaaaaaaaaaaaaaaaaaaaaaaaaaaaaaaaaaaaaaaaaaaaaaaaaaaaaaaaaaaaaaaaaaaaaaaaa

SEQ ID NO: 38094 - RNA, 1662 nt, Artificial Sequence
  mRNA product Design i-3 (A100) comprising derived and/or modified sequence from LASV(ISTH2010-NIG-2012;Clade II)__AIT17482__GPCmut10 (opt1)
aggagaaagcuuaccaugggccagaucaucaccuucuuccaggaggugccccacgucaucgaggaggugaugaacaucgugcugaucgcccucagccugcuggccauccucaaggggaucuacaacgucgcgaccugcggccuguucgggcugguguccuuccuccugcugugcggccgcagcugcuccacgaccuacaaggggguguacgagcuccagacccuggagcuggacauggccagccucaacaugugcaugccgcuguccugcacgaagaacaacagccaccacuacaucauggucggcaacgagaccggccuggagcucacccugaccaacacguccaucaucaaccacaaguucugcaaccugagcgacgcccacaagaagaaccucuacgaccacgcccugauguccaucaucagcaccuuccaccuguccauccccaacuucaaccaguacgaggccaugagcugcgacuucaacgggggcaagaucuccgugcaguacaaccucagccacgcguacgccguggacgccgccaaccacugcgggaccaucgcgaacggcguccugcagaccuucaugcggauggccuggggcggguccuacaucgcccuggacagcggcaagggguccugggacugcaucaugacgagcuaccaguaccucaucauccagaacaucaccugggaggaccacugccaguucucccgccccagccccaucggcuaccuggggcugcucagccagcggacccgcgacaucuacaucucccggcgccugcugggcaccuucacguggacccucagcgacuccgagggcaacgagacccccgggggcuacugccugacccgguggaugcugaucgaggccgagcucaagugcuucgggaacacggccguggcgaagugcaacgagaagcacgacgaggaguucugcgacaugcugcgccuguucgacuucugcaagcaggccauccggcgccucaagaccgaggcccagaugagcauccagcugaucaacaaggccgugaacgcccugaucaacgaccagcucaucaugaagaaccaccuccgggacaucaugggcauccccuacugcaacuacuccaaguacugguaccugaaccacaccgucaccgggaagacgagccugccccgcugcuggcugguguccaacggcagcuaccugaacgagacccacuucuccgacgacaucgagcagcaggcggacaacaugaucaccgagcuccugcagaaggaguacaucgaccggcagggcaagaccccgcuggggcucguggaccuguucgucuucagcacguccuucuaccugaucagcaucuuccugcaccucgugaagaucccgacccaccgccacguggucggcaagcccugccccaagccccaccggcugaaccacauggggaucugcuccugcggccuguacaagcacccgggggugcccgugaaguggaagcgcugaggacuaguuauaagacugacuagcccgaugggccucccaacgggcccuccuccccuccuugcaccgagauuaauaaaaaaaaaaaaaaaaaaaaaaaaaaaaaaaaaaaaaaaaaaaaaaaaaaaaaaaaaaaaaaaaaaaaaaaaaaaaaaaaaaaaaaaaaaaaaaaaaaaa

SEQ ID NO: 38095 - RNA, 1662 nt, Artificial Sequence
  mRNA product Design i-3 (A100) comprising derived and/or modified sequence from LASV(Lassa virus/H.sapiens-wt/NGA/2015/ISTH_0543;Clade II)__AVO03639__GPCmut10 (opt1)
aggagaaagcuuaccaugggccagaucaucaccuucuuccaggaggugccccacgucaucgaggaggugaugaacaucgugcugaucgcccucagccugcuggccauccucaaggggaucuacaacgucgcgaccugcggccuguucgggcugguguccuuccuccugcugugcggccgcagcugcuccacgaccuacaaggggguguacgagcuccagacccuggagcuggacauggccaaccucaacaugugcaugccgcugagcugcacgaagaacaacucccaccacuacaucauggucggcaacgagaccggccuggagcucacccugaccaacacgagcaucaucaaccacaaguucugcaaccuguccgacgcccacaagaagaaccucuacgaccacgcccugaugagcaucaucuccaccuuccaccugagcauccccaacuucaaccaguacgaggccauguccugcgacuucaacgggggcaagaucagcgugcaguacaaccucucccacaccuacgcgguggacgccgccaaccacugcgggaccaucgccaacggcguccugcagacguucaugcggauggcguggggcgggagcuacaucgcccuggacuccggcaaggggagcugggacugcaucaugaccuccuaccaguaccucgugauccagaacaccaccugggaggaccacugccaguucagccgccccucccccaucggcuaccuggggcugcucagccagcggacgcgcgacaucuacaucagccggcgccugcugggcaccuucaccuggacccucuccgacagcgagggcaacgagacgcccgggggcuacugccugacccgguggaugcugaucgaggccgagcucaagugcuucgggaacaccgccguggccaagugcaacgagaagcacgacgaggaguucugcgacaugcugcgccuguucgacuucugcaagcaggcgauccggcgccucaagaccgaggcccagauguccauccagcugaucaacaaggccgucaacgcccugaucaacgaccagcucaucaugaagaaccaccuccgggacaucaugggcauccccuacugcaacuacagcaaguacugguaccugaaccacacggugaccgggaagaccucccugccccgcugcuggcuggugagcaacggcuccuaccugaacgagacccacuucagcgacgacaucgagcagcaggccgacaacaugaucacggagcuccugcagaaggaguacaucgaccggcagggcaagaccccgcuggggcucgucgaccuguucguguucuccaccagcuucuaccugaucuccaucuuccugcaccucgugaagaucccgacccaccgccacaucacgggcaagcccugccccaagccccaccggcugaaccacauggggaucugcagcugcggccuguacaagcacccggggguccccgugaaguggaagcgcugaggacuaguuauaagacugacuagcccgaugggccucccaacgggcccuccuccccuccuugcaccgagauuaauaaaaaaaaaaaaaaaaaaaaaaaaaaaaaaaaaaaaaaaaaaaaaaaaaaaaaaaaaaaaaaaaaaaaaaaaaaaaaaaaaaaaaaaaaaaaaaaaaaaa

SEQ ID NO: 38096 - RNA, 1662 nt, Artificial Sequence
  mRNA product Design i-3 (A100) comprising derived and/or modified sequence from LASV(Lassa virus/H.sapiens-wt/NGA/2016/ISTH_0009;Clade II)__AVO03571__GPCmut10 (opt1)
aggagaaagcuuaccaugggccagaucaucaccuucuuccaggaggugccccacgucaucgaggaggugaugaacaucgugcugaucgcccucagccugcuggccauccucaaggggaucuacaacgucgcgaccugcggccugcuggggcucguguccuuccugcugcucugcggccgcagcugcuccacgaccuacaaggggguguacgagcugcagacccuggagcucgacauggccagccugaacaugugcaugccgcuguccugcacgaagaacaacagccaccacuacaucauggucggcaacgagaccggccucgagcugacccugaccaacacguccaucaucaaccacaaguucugcaaccucagcgacgcccacaagaagaaccuguacgaccacgcccugauguccaucaucagcaccuuccaccucuccauccccaacuucaaccaguacgaggccaugagcugcgacuucaacgggggccggaucuccgugcaguacaaccugagccacuccuacgcgguggacgccgccaaccacugcgggaccaucgccaacggcguccugcagaccuucaugcgcauggcguggggcgggagcuacaucgcccucgacuccggcaaggggagcugggacugcaucaugacguccuaccaguaccugaucauccagaacaccaccugggaggaccacugccaguucagccggcccagccccaucggcuaccuggggcuccugucccagcgcacccgggacaucuacaucagccgccggcugcucggcacguucaccuggacccuguccgacagcgagggcaacgagacccccgggggcuacugccugacgcgcuggaugcucaucgaggccgagcugaagugcuucgggaacaccgccguggccaagugcaacgagaagcacgacgaggaguucugcgacaugcugcggcuguucgacuucugcaagcaggcgauccgccggcugaagaccgaggcccagauguccauccagcugaucaacaaggccgugaacgcccucaucaacgaccagcugaucaugaagaaccaccuccgcgacaucaugggcaucccguacugcaacuacagcaaguacugguaccucaaccacaccgucacggggaagaccucccugccccggugcuggcuggugagcaacggcuccuaccucaacgagacccacuucagcgacgacaucgagcagcaggccgacaacaugaucaccgagcugcugcagaaggaguacaucgaccgccagggcaagacgccccucgggcugguggaccuguucgucuucuccaccagcuucuaccugaucuccaucuuccuccaccuggugaagaucccgacccaccggcacaucaccggcaagcccugccccaagccccaccgccugaaccacauggggaucugcagcugcggccucuacaaccacccgggggugcccgucaaguggaagcggugaggacuaguuauaagacugacuagcccgaugggccucccaacgggcccuccuccccuccuugcaccgagauuaauaaaaaaaaaaaaaaaaaaaaaaaaaaaaaaaaaaaaaaaaaaaaaaaaaaaaaaaaaaaaaaaaaaaaaaaaaaaaaaaaaaaaaaaaaaaaaaaaaaaa

SEQ ID NO: 38097 - RNA, 1662 nt, Artificial Sequence
  mRNA product Design i-3 (A100) comprising derived and/or modified sequence from LASV(Lassa virus/H.sapiens-wt/NGA/2016/ISTH_0017;Clade II)__AVO03567__GPCmut10 (opt1)
aggagaaagcuuaccaugggccagaucaucaccuucuuccaggaggugccccacgucaucgaggaggugaugaacaucgugcugaucgcccucagccugcuggccauccucaaggggaucuacaacgucgcgaccugcggccuguucgggcugguguccuuccuccugcugugcggccgcagcugcuccacgaccuacaaggggguguacgagcuccagacccuggagcuggacauggccagccucaacaugugcaugccgcuguccugcacgaagaacaacagccaccacuacaucauggucggcaacgagaccggccuggagcucacccugaccaacacguccaucaucaaccacaaguucugcaaccugagcgacgcccacaagaagaaccucuacgaccacgcccugauguccaucaucagcaccuuccaccuguccauccccaacuucaaccaguacgaggccaugagcugcgacuucaacgggggcaagaucuccgugcaguacaaccucagccacaccuacgcgaucgacgccgccaaccacugcgggaccaucgccaacggcgugcugcagacguucaugcggauggcguggggcggguccuacaucgcccuggacagcggcaagggguccugggacugcaucaugaccagcuaccaguaccucaucauccagaacaccaccugggaggaccacugccaguucucccgccccagccccaucggcuaccuggggcugcucagccagcggacgcgcgacaucuacaucucccggcgccugcugggcaccuucaccuggacccucagcgacuccgagggcaacgagacgcccgggggcuacugccugacccgguggaugcugaucgaggccgagcucaagugcuucgggaacaccgccgucgccaagugcaacgagaagcacgacgaggaguucugcgacaugcugcgccuguucgacuucugcaagcaggcgauccggcgccucaagaccgaggcccagaugagcauccagcugaucaacaaggccgugaacgcccugaucaacgaccagcucaucaugaagaaccaccuccgggacaucaugggcauccccuacugcaacuacuccaaguacugguaccugaaccacacggugaccgggaagaccagccugccccgcugcuggcuggucuccaacggcagcuaccugaacgagacccacuucuccgacgacaucgagcagcaggccgacaacaugaucacggagcuccugcagaaggaguacauggaccggcagggcaagaccccgcuggggcucguggaccuguucguguucagcaccuccuucuaccugaucagcaucuuccugcaccucguccgcaucccgacccaccggcacgugaucggcaagcccugccccaagccccaccgccugaaccacauggggaucugcuccugcggccuguacaagcacccgggggugcccgucaaguggaagcggugaggacuaguuauaagacugacuagcccgaugggccucccaacgggcccuccuccccuccuugcaccgagauuaauaaaaaaaaaaaaaaaaaaaaaaaaaaaaaaaaaaaaaaaaaaaaaaaaaaaaaaaaaaaaaaaaaaaaaaaaaaaaaaaaaaaaaaaaaaaaaaaaaaaa

SEQ ID NO: 38098 - RNA, 1662 nt, Artificial Sequence
  mRNA product Design i-3 (A100) comprising derived and/or modified sequence from LASV(Lassa virus/H.sapiens-wt/NGA/2018/ISTH_0959;Clade II)__AVV65099__GPCmut10 (opt1)
aggagaaagcuuaccaugggccagaucaucaccuucuuccaggaggugccccacgucaucgaggaggugaugaacaucgugcugaucgcccucagccugcuggccauccucaaggggaucuacaacgucgugaccugcggccuguucgggcugguguccuuccuccugcugugcggccgcagcugcuccacgaccuacaagggggucuacgagcuccagacccuggagcuggacauggcgagccucaacaugugcaugccgcuguccugcacgaagaacaacagccaccacuacaucauggugggcaacgagaccggccuggagcucacccugaccaacacguccaucaucaaccacaaguucugcaaccugagcgacgcccacaagaagaaccucuacgaccacgcccugauguccaucaucagcaccuuccaccuguccauccccaacuucaaccaguacgaggccaugagcugcgacuucaacgggggcaagaucuccgugcaguacaaccucagccacgccuacgcgaucgacgccgccaaccacugcgggaccaucgccaacggcguccugcagaccuucaugcggauggcguggggcggguccuacaucgcccuggacagcggcaagggguccugggacugcaucaugacgagcuaccaguaccucaucauccagaacaccaccugggaggaccacugccaguucucccgccccagccccaucggcuaccuggggcugcucagccagcggacccgcgacaucuacaucucccggcgccugcugggcacguucaccuggacccucagcgacuccgagggcaacgagacccccgggggcuacugccugacgcgguggaugcugaucgaggccgagcucaagugcuucgggaacaccgccguggccaagugcaacgagaagcacgacgaggaguucugcgacaugcugcgccuguucgacuucugcaagcaggcgauccggcgccucaagaccgaggcccagaugagcauccagcugaucaacaaggccgugaacgcccugaucaacgaccagcucaucaugaagaaccaccuccgggacaucaugggcaucccguacugcaacuacuccaaguacugguaccugaaccacaccgucacggggaagaccagccugccccgcugcuggcugguguccaacggcagcuaccugaacgagacccacuucuccgacgacaucgagcagcaggccgacaacaugaucaccgagcuccugcagaaggaguacaucgaccggcagggcaagacgccccuggggcucguggaccuguucgucuucagcaccuccuucuaccugaucagcaucuuccugcaccucgugaagaucccgacccaccgccacgugaucggcaagcccugccccaagccccaccggcugaaccacauggggaucugcuccugcggccuguacaagcacccggggguccccgugaaguggaagcgcugaggacuaguuauaagacugacuagcccgaugggccucccaacgggcccuccuccccuccuugcaccgagauuaauaaaaaaaaaaaaaaaaaaaaaaaaaaaaaaaaaaaaaaaaaaaaaaaaaaaaaaaaaaaaaaaaaaaaaaaaaaaaaaaaaaaaaaaaaaaaaaaaaaaa

SEQ ID NO: 38099 - RNA, 1662 nt, Artificial Sequence
  mRNA product Design i-3 (A100) comprising derived and/or modified sequence from LASV(LASV003-NIG-2008;Clade II)__AIT17580__GPCmut10 (opt1)
aggagaaagcuuaccaugggccagaucaucaccuucuuccaggaggugccccacgucaucgaggaggugaugaacaucgugcugaucgcccucagccugcuggccauccucaaggggaucuacaacgucgcgaccugcggccuguucgggcugguguccuuccuccugcugugcggccgcagcugcuccacgaccuacaaggggguguacgagcuccagacccuggagcuggacauggccagccucaacaugugcaugccgcuguccugcacgaagaacaacagccaccacuacaucauggucggcaacgagaccggccuggagcucacccugaccaacacguccaucaucaaccacaaguucugcaaccugagcgacgcccacaagaagaaccucuacgaccacgcccugauguccaucaucagcaccuuccaccuguccauccccaacuucaaccaguacgaggccaugagcugcgacuucaacgggggcaagaucuccgugcaguacaaccucagccacaccuacgcgguggacgccgccaaccacugcgggaccaucgccaacggcguccugcagacguucaugcggauggcguggggcggguccuacaucgcccuggacagcggcaagggguccugggacugcaucaugaccagcuaccaguaccucaucauccagaacaccaccugggaggaccacugccaguucucccgccccagccccaucggcuaccuggggcugcucagccagcggacgcgcgacaucuacaucucccggcgccugcugggcaccuucaccuggacccucagcgacuccgagagcaacgagacgccgggcggguacugccugacccgguggaugcugaucgaggccgagcucaagugcuucggcaacaccgccguggccaagugcaacgagaagcacgacgaggaguucugcgacaugcugcgccuguucgacuucugcaagcaggcgauccggcgccucaaggccgaggcccagauguccauccagcugaucaacaaggccgugaacgcccugaucaacgaccagcucaucaugaagaaccaccuccgggacaucauggggauccccuacugcaacuacagcaaguacugguaccugaaccacaccgucacgggccgcaccucccugccccggugcuggcuggugagcaacggguccuaccugaacgagacccacuucagcgacgacaucgagcagcaggcggacaacaugaucaccgagcuccugcagaaggaguacauggaccgccagggcaagacgccccugggccucguggaccuguucgucuucuccaccagcuucuaccugaucuccaucuuccugcaccucgugaagaucccgacccaccggcacgugaucgggaagcccugccccaagccccaccgccugaaccacaugggcaucugcagcugcgggcuguacaagcacccgggcguccccgugaaguggaagcggugaggacuaguuauaagacugacuagcccgaugggccucccaacgggcccuccuccccuccuugcaccgagauuaauaaaaaaaaaaaaaaaaaaaaaaaaaaaaaaaaaaaaaaaaaaaaaaaaaaaaaaaaaaaaaaaaaaaaaaaaaaaaaaaaaaaaaaaaaaaaaaaaaaaa

SEQ ID NO: 38100 - RNA, 1662 nt, Artificial Sequence
  mRNA product Design i-3 (A100) comprising derived and/or modified sequence from LASV(LASV035-NIG-2009;Clade II)__AIT17588__GPCmut10 (opt1)
aggagaaagcuuaccaugggccagaucaucaccuucuuccaggaggugccccacgucaucgaggaggugaugaacaucgugcugaucgcccucagccugcuggccauccucaaggggaucuacaacgucgcgaccugcggccuguucgggcugguguccuuccuccugcugugcggccgcagcugcuccacgaccuacaaggggguguacgagcuccagacccuggagcuggacauggccagccucaacaugugcaugccgcuguccugcacgaagaacaacagccaccacuacaucauggucggcaacgagaccggccuggagcucacccugaccaacacguccaucaucaaccacaaguucugcaaccugagcgacgcccacaagaagaaccucuacgaccacgcccugauguccaucaucagcaccuuccaccuguccauccccaacuucaaccaguacgaggccaugagcugcgacuucaacgggggcaagaucuccgugcaguacaaccucagccacgcguacgccguggacgccgccaaccacugcgggaccaucgcgaacggcguccugcagaccuucaugcggauggccuggggcggguccuacaucgcccuggacagcggcaagggguccugggacugcaucaugacgagcuaccaguaccucaucauccagaacaccaccugggaggaccacugccaguucucccgccccagccccaucggcuaccuggggcugcucagccagcggacccgcgacaucuacaucucccggcgccugcugggcacguucaccuggacccucagcgacuccgagggcaacgagacccccgggggcuacugccugacgcgguggaugcugaucgaggccgagcucaagugcuucgggaacaccgccguggcgaagugcaacgagaagcacgacgaggaguucugcgacaugcugcgccuguucgacuucugcaagcaggccauccggcgccucaaggccgaggcccagaugagcauccagcugaucaacaaggccgugaacgcgcugaucaacgaccagcucaucaugaagaaccaccuccgggacaucaugggcauccccuacugcaacuacuccaaguacugguaccugaaccacaccgucaccgggaagacgagccugccccgcugcuggcugguguccaacggcagcuaccugaacgagacccacuucuccgacgacaucgagcagcaggccgacaacaugaucaccgagcuccugcagaaggaguacaucgaccggcagggcaagaccccgcuggggcucguggaccuguucgucuucagcacguccuucuaccugaucagcaucuuccugcaccucgugaagaucccgacccaccgccacgugaucggcaagcccugccccaagccccaccggcugaaccacauggggaucugcuccugcggccuguacaagcacccggggguccccgugaaguggaagcgcugaggacuaguuauaagacugacuagcccgaugggccucccaacgggcccuccuccccuccuugcaccgagauuaauaaaaaaaaaaaaaaaaaaaaaaaaaaaaaaaaaaaaaaaaaaaaaaaaaaaaaaaaaaaaaaaaaaaaaaaaaaaaaaaaaaaaaaaaaaaaaaaaaaaa

SEQ ID NO: 38101 - RNA, 1662 nt, Artificial Sequence
  mRNA product Design i-3 (A100) comprising derived and/or modified sequence from LASV(LASV1000-NIG-2009;Clade II)__AIT17782__GPCmut10 (opt1)
aggagaaagcuuaccaugggccagaucaucaccuucuuccaggaggugccccacgucaucgaggaggugaugaacaucgugcugaucgcccucagccugcuggccauccucaaggggaucuacaacgucgcgaccugcggccuguucgggcugguguccuuccuccugcugugcggccgcagcugcuccacgaccuacaaggggguguacgagcuccagacccuggagcuggacauggccagccucaacaugugcaugccgcuguccugcacgaagaacaacagccaccacuacaucauggucggcaacgagaccggccuggagcucacccugaccaacacguccaucaucaaccacaaguucugcaaccugagcgacgcccacaagaagaaccucuacgaccacgcccugauguccaucaucagcaccuuccaccuguccauccccaacuucaaccaguacgaggccaugagcugcgacuucaacgggggcaagaucuccgugcaguacaaccucagccacaccuacgcgguggacgccgccaaccacugcgggaccaucgccaacggcguccugcagacguucaugcggauggcguggggcggguccuacaucgcccuggacagcggcaagggguccugggacugcaucaugaccagcuaccaguaccucaucauccagaacaccaccugggaggaccacugccaguucucccgccccagccccaucggcuaccuggggcugcucagccagcggacgcgcgacaucuacaucucccggcgccugcugggcaccuucaccuggacccucagcgacuccgagggcaacgagacgcccgggggcuacugccugacccgguggaugcugaucgaggccgagcucaagugcuucgggaacaccgccguggccaagugcaacgagaagcacgacgaggaguucugcgacaugcugcgccuguucgacuucugcaagcaggcgaucaagcggcucaagaccgaggcccagaugagcauccagcugaucaacaaggccgugaacgcccugaucaacgaccagcucaucaugaagaaccaccuccgcgacaucaugggcauccccuacugcaacuacuccaaguacugguaccugaaccacacggucaccgggaagaccagccugccccggugcuggcugguguccaacggcagcuaccugaacgagacccacuucuccgacgacaucgagcagcaggccgacaacaugaucacggagcuccugcagaaggaguacaucgaccgccagggcaagaccccgcuggggcucguggaccuguucgucuucagcaccuccuucuaccugaucagcaucuuccugcaccucgugaagaucccgacccaccggcacguggucggcaagcccugccccaagccccaccgccugaaccacauggggaucugcuccugcggccuguacaagcacccgggggugcccgugaaguggaagcggugaggacuaguuauaagacugacuagcccgaugggccucccaacgggcccuccuccccuccuugcaccgagauuaauaaaaaaaaaaaaaaaaaaaaaaaaaaaaaaaaaaaaaaaaaaaaaaaaaaaaaaaaaaaaaaaaaaaaaaaaaaaaaaaaaaaaaaaaaaaaaaaaaaaa

SEQ ID NO: 38102 - RNA, 1662 nt, Artificial Sequence
  mRNA product Design i-3 (A100) comprising derived and/or modified sequence from LASV(LASV221-NIG-2010;Clade II)__AIT17624__GPCmut10 (opt1)
aggagaaagcuuaccaugggccagaucaucaccuucuuccaggaggugccccacgucaucgaggaggugaugaacaucgugcugaucgcccucagccugcuggccauccucaaggggaucuacaacgucgcgaccugcggccuguucgggcugguguccuuccuccugcugugcggccgcagcugcuccacgaccuacaaggggguguacgagcuccagacccuggagcuggacauggccagccucaacaugugcaugccgcuguccugcacgaagaacaacagccaccacuacaucauggucggcaacgagaccggccuggagcucacccugaccaacacguccaucaucaaccacaaguucugcaaccugagcgacgcccacaagaagaaccucuacgaccacgcccugauguccaucaucagcaccuuccaccuguccauccccaacuucaaccaguacgaggccaugagcugcgacuucaacgggggcaagaucuccgugcaguacaaccucagccacaccuacgcgaucgacgccgccaaccacugcgggaccaucgccaacggcgugcugcagacguucaugcggauggcguggggcggguccuacaucgcccuggacagcggcaagggguccugggacugcaucaugaccagcuaccaguaccucaucauccagaacaccaccugggaggaccacugccaguucucccgccccagccccaucggcuaccuggggcugcucagccagcggacgcgcgacaucuacaucucccggcgccugcugggcaccuucaccuggacccucagcgacuccgagggcaacgagacgcccgggggcuacugccugacccgguggaugcugaucgaggccgagcucaagugcuucgggaacaccgccgucgccaagugcaacgagaagcacgacgaggaguucugcgacaugcugcgccuguucgacuucugcaagcaggcgauccggcgccucaagaccgaggcccagaugagcauccagcugaucaacaaggccgugaacgcccugaucaacgaccagcucaucaugaagaaccaccuccgggacaucaugggcauccccuacugcaacuacuccaaguacugguaccugaaccacacggugaccgggaagaccagccugccccgcugcuggcuggucuccaacggcagcuaccugaacgagacccacuucuccgacgacaucgagcagcaggccgacaacaugaucacggagaugcuccagaaggaguacauggaccggcagggcaagaccccgcuggggcugguggaccucuucguguucagcaccuccuucuaccugaucagcaucuuccugcaccuggucaagaucccgacccaccgccacgugaucggcaagcccugccccaagccccaccggcucaaccacauggggaucugcuccugcggccuguacaagcacccgggggugcccgucaaguggaagcgcugaggacuaguuauaagacugacuagcccgaugggccucccaacgggcccuccuccccuccuugcaccgagauuaauaaaaaaaaaaaaaaaaaaaaaaaaaaaaaaaaaaaaaaaaaaaaaaaaaaaaaaaaaaaaaaaaaaaaaaaaaaaaaaaaaaaaaaaaaaaaaaaaaaaa

SEQ ID NO: 38103 - RNA, 1662 nt, Artificial Sequence
  mRNA product Design i-3 (A100) comprising derived and/or modified sequence from LASV(LASV237-NIG-2010;Clade II)__AIT17638__GPCmut10 (opt1)
aggagaaagcuuaccaugggccagaucaucaccuucuuccaggaggugccccacgucaucgaggaggugaugaacaucgugcugaucgcccucagccugcuggccauccucaaggggaucuacaacgucgcgaccugcggccuguucgggcugguguccuuccuccugcugugcggccgcagcugcuccacgaccuacaaggggguguacgagcuccagacccuggagcuggacauggccagccucaacaugugcaugccgcuguccugcacgaagaacaacagccaccacuacaucauggucggcaacgagaccggccuggagcucacccugaccaacacguccaucaucaaccacaaguucugcaaccugagcgacgcccacaagaaggaccucuacgaccacgcccugauguccaucaucagcaccuuccaccuguccauccccaacuucaaccaguacgaggccaugagcugcgacuucaacgggggcaagaucuccgugcaguacaaccucagccacaccuacgcgguggacgccgccaaccacugcgggaccaucgccaacggcguccugcagacguucaugcggauggcguggggcggguccuacaucgcccuggacagcggcaagggguccugggacugcaucaugaccagcuaccaguaccucaucauccagaacaccaccugggaggaccacugccaguucucccgccccagccccaucggcuaccuggggcugcucagccagcggacgcgcgacaucuacaucucccggcgccugcugggcaccuucaccuggacccucagcgacuccgagggcaacgagacgcccgggggcuacugccugacccgguggaugcugaucgaggccgagcucaagugcuucgggaacaccgccguggccaagugcaacgagaagcacgacgaggaguucugcgacaugcugcgccuguucgacuucugcaagcaggcgauccggcgccucaagaccgaggcccagaugagcauccagcugaucaacaaggccgugaacgcccugaucaacgaccagcucaucaugaagaaccaccuccgggacaucaugggcauccccuacugcaacuacuccaaguacugguaccugaaccacacggucaccgggaagaccagccugccccgcugcuggcugguguccaacggcagcuaccugaacgagacccacuucuccgacgacaucgagcagcaggccgacaacaugaucacggagcuccugcagaaggaguacauggaccggcagggcaagaccccgcuggggcucguggaccuguucgucuucagcaccuccuucuaccugaucagcaucuuccugcaccucaucaagaucccgacccaccgccacaucacgggcaagcccugccccaagccccaccggcugaaccacauggggaucugcuccugcggccuguacaagcacccgggggugcccgugaaguggaagcgcugaggacuaguuauaagacugacuagcccgaugggccucccaacgggcccuccuccccuccuugcaccgagauuaauaaaaaaaaaaaaaaaaaaaaaaaaaaaaaaaaaaaaaaaaaaaaaaaaaaaaaaaaaaaaaaaaaaaaaaaaaaaaaaaaaaaaaaaaaaaaaaaaaaaa

SEQ ID NO: 38104 - RNA, 1662 nt, Artificial Sequence
  mRNA product Design i-3 (A100) comprising derived and/or modified sequence from LASV(LASV253-NIG-2011;Clade II)__AIT17670__GPCmut10 (opt1)
aggagaaagcuuaccaugggccagaucaucaccuucuuccaggaggugccccacgucaucgaggaggugaugaacaucgugcugaucgcccucagccugcuggccauccucaaggggaucuacaacgucgcgaccugcggccuguucgggcugguguccuuccuccugcugugcggccgcagcugcuccacgaccuacaaggggguguacgagcuccagacccuggagcuggacauggccagccucaacaugugcaugccgcuguccugcacgaagaacaacagccaccacuacaucauggucggcaacgagaccggccuggagcucacccugaccaacacguccaucaucaaccacaaguucugcaaccugagcgacgcccacaagaagaaccucuacgaccacgcccugauguccaucaucagcaccuuccaccuguccauccccaacuucaaccaguacgaggccaugagcugcgacuucaacgggggcaagaucuccgugcaguacaaccucagccacaccuacgcgguggacgccgccaaccacugcgggaccaucgccaacggcguccugcagacguucaugcggauggcguggggcggguccuacaucgcccuggacagcggcaagggguccugggacugcaucaugaccagcuaccaguaccucaucauccagaacaccaccugggaggaccacugccaguucucccgccccagccccaucggcuaccuggggcugcucagccagcggacgcgcgacaucuacaucucccggcgccugcugggcaccuucaccuggacccucagcgacuccgagggcaacgagacgcccgggggcuacugccugacccgguggaugcugaucgaggccgagcucaagugcuucgggaacaccgccguggccaagugcaacgagaagcacgacgaggaguucugcgacaugcugcgccuguucgacuucugcaagcaggcgauccggcgccucaaggccgaggcccagaugagcauccagcugaucaacaaggccgugaacgcccugaucaacgaccagcucaucaugaagaaccaccuccgggacaucaugggcaucccguacugcaacuacuccaaguacugguaccugaaccacaccgucacggggcgcaccagccugccccggugcuggcugguguccaacggcagcuaccugaacgagacccacuucuccgacgacaucgagcagcaggcggacaacaugaucaccgagcuccugcagaaggaguacaucgaccgccagggcaagacgccccuggggcucguggaccuguucgucuucagcaccuccuucuaccugaucagcaucuuccugcaccucgugaagaucccgacccaccggcacaucaucggcaagcccugccccaagccccaccgccugaaccacauggggaucugcuccugcggccuguacaagcacccgggggugcccgucaaguggaagcggugaggacuaguuauaagacugacuagcccgaugggccucccaacgggcccuccuccccuccuugcaccgagauuaauaaaaaaaaaaaaaaaaaaaaaaaaaaaaaaaaaaaaaaaaaaaaaaaaaaaaaaaaaaaaaaaaaaaaaaaaaaaaaaaaaaaaaaaaaaaaaaaaaaaa

SEQ ID NO: 38105 - RNA, 1662 nt, Artificial Sequence
  mRNA product Design i-3 (A100) comprising derived and/or modified sequence from LASV(LASV254-NIG-2011;Clade II)__AIT17674__GPCmut10 (opt1)
aggagaaagcuuaccaugggccagaucaucaccuucuuccaggaggugccccacgucaucgaggaggugaugaacaucgugcugaucgcccucagccugcuggccauccucaaggggaucuacaacgucgcgaccugcggccuguucgggcugguguccuuccuccugcugugcggccgcagcugcuccacgaccuacaaggggguguacgagcuccagacccuggagcuggacaugaccaaccucaacaugugcaugccgcugagcugcaccaagaacaacucccaccacuacaucauggucggcaacgagaccggccuggagcucacccugacgaacaccagcaucaucaaccacaaguucugcaaccuguccgacgcccacaagaagaaccucuacaaccacgcccugaugagcaucaucuccaccuuccaccugagcauccccaacuucaaccaguacgaggccauguccugcgacuucaacgggggcaagaucagcgugcaguacaaccucucccacagcuacgccguggacgcggccaaccacugcgggaccaucgccaacggcguccugcagacguucaugcggauggccuggggcggguccuacaucgcgcuggacagcggcaaggggaacugggacugcaucaugaccuccuaccaguaccucaucauccagaacaccaccugggaggaccacugccaguucagccgccccucccccaucggcuaccuggggcugcucagccagcggacgcgcgacaucuacaucagccggcgccugcugggcaccuucaccuggacccucuccgacagcgagggcaacgagacgcccgggggcuacugccugacccgguggaugcugaucgaggccgagcucaagugcuucgggaacaccgccguggccaagugcaacgagaagcacgacgaggaguucugcgacaugcugcgccuguucgacuucugcaagcaggccauccggcgccucaagaccgaggcgcaggccaacauccagcugaucaacaaggccgugaacgcccugaucaacgaccagcucaucaugaagaaccaccuccgggacaucaugggcauccccuacugcaacuacuccaaguacugguaccugaaccacacggucaccgggaagaccagccugccccgcugcuggcugguguccaacggcagcuaccugaacgagacccacuucuccgacgacaucgagcagcaggccgacaacaugaucacggagcuccugcagaaggaguacauggaccggcagggcaagaccccgcuggggcucguggaccuguucgucuucagcaccuccuucuaccugaucagcaucuuccugcaccucgugaagaucccgacccaccgccacgugaucggcaagcccugccccaagccccaccggcugaaccacauggggaucugcuccugcggccuguacaagcacccggggguccccgugaaguggaagcgcugaggacuaguuauaagacugacuagcccgaugggccucccaacgggcccuccuccccuccuugcaccgagauuaauaaaaaaaaaaaaaaaaaaaaaaaaaaaaaaaaaaaaaaaaaaaaaaaaaaaaaaaaaaaaaaaaaaaaaaaaaaaaaaaaaaaaaaaaaaaaaaaaaaaa

SEQ ID NO: 38106 - RNA, 1662 nt, Artificial Sequence
  mRNA product Design i-3 (A100) comprising derived and/or modified sequence from LASV(Nig08-A19;Clade III)__ADU56618__GPCmut10 (opt1)
aggagaaagcuuaccaugggccagaucgugaccuucuuccaggaggucccccacgugaucgaggaggugaugaacaucguccugaucgcccucagcauccuggccauccugaaggggcucuacaacaucgcgaccugcggccugaucgggcuggugacguuccuccugcuguccggccgcagcugcuccaugaccuacaaggggguguacgagcuccagacccuggagcugaacaugaacacccucaacaugugcaugccgcugagcugcaccaagaacaacucccaccacuacaucauggucggcaacgagaccggccuggagcucacccugacgaacaccagccugcuccaccacaaguucugcaaccuguccgacgcccacaagaagaaccuguacgaccacacccucaugagcaucaucuccaccuuccaccugagcauccccaacuucaaccaguacgaggccauguccugcgacuucaacgggggcaagaucacggugcaguacaaccugagccacuccuacgccaucgacgccgcgaaccacugcgggaccguggccaacggcguccuccagaccuucaugcggauggccuggggcgggagcuacaucgcccuggacuccggccgcgggaagugggacugcaucaugaccagcuaccaguaccugaucauccagaacacgaccugggaggaccacugccaguucucccggcccagccccaucggcuaccucgggcugcugucccagcgcacccgggacaucuacaucagccgccggcuccugggcaccuucacguggacccugagcgacuccgagggcaacgagacccccgggggcuacugccucacccgcuggaugcugaucgaggcggagcugaagugcuucgggaacacggccguggccaagugcaacgagaagcacgacgaggaguucugcgacaugcuccggcuguucgacuucugcaagcaggccauccgccggcugaaggccgaggcgcagaugagcauccagcucaucaacaaggccgugaacgcccugaucaacgaccagcugaucaugaagaaccaccuccgcgacaucaugggcauccccuacugcaacuacuccaaguacugguaccugaaccacaccagcaccgggcggaccucccugccccgcugcuggcucgucagcaacggcuccuaccugaacgagacgcacuucagcgacgacaucgagcagcaggccgacaacaugaucaccgagaugcugcagaaggaguaccucgaccggcagggcaagaccccgcuggggcugguggaccuguucguguucuccaccagcuucuaccucaucuccaucuuccugcaccuggucaagaucccgacgcaccgccacaucgugggcaagcccugccccaagccccaccggcucaaccacauggggaucugcagcugcggccuguacaagcagccgggggugcccguccgcuggaagcggugaggacuaguuauaagacugacuagcccgaugggccucccaacgggcccuccuccccuccuugcaccgagauuaauaaaaaaaaaaaaaaaaaaaaaaaaaaaaaaaaaaaaaaaaaaaaaaaaaaaaaaaaaaaaaaaaaaaaaaaaaaaaaaaaaaaaaaaaaaaaaaaaaaaa

SEQ ID NO: 38107 - RNA, 1665 nt, Artificial Sequence
  mRNA product Design i-3 (A100) comprising derived and/or modified sequence from LASV(G1180-SLE-2010;Clade IV)__AIT17168__GPCmut10 (opt1)
aggagaaagcuuaccaugggccagaucgugaccuucuuccaggaggucccccacgugaucgaggaggugaugaacaucguccugaucgcccucagcauccuggccgugcugaaggggcucuacaacuucgcgaccugcggccugguggggcugcucaccuuccugcugcucugcggccgcuccugcaccgccagccgguacaagggggucuacgagcugcagacccuggagcucaacauggagacccugaacaugugcaugccgcuguccugcaccaagaacaacagccaccacuacaucauggugggcaacgagaccggccucgagcugacccugacgaacaccuccaucaucaaccacaaguucugcaaccucagcgacgcccacaagaagaaccuguacgaccacgcccugauguccaucaucagcaccuuccaccucuccauccccaacuucaaccaguacgaggccaugagcugcgacuucaacgggggcaagaucuccgugcaguacaaccugagccacuccuacgcgggggacgccgccaaccacugcggcaccgucgccaacggggugcugcagacguucaugcgcauggcguggggcggcagcuacaucgcccucgacuccgggcacggcagcugggacugcaucaugaccuccuaccaguaccugaucauccagaacaccaccugggaggaccacugccaguucagccggcccucccccaucggguaccugggccuccugagccagcgcacgcgggacaucuacaucagccgccggcugcucggcaccuucaccuggacccuguccgacagcgaggggaaggacacgccgggcggguacugccugacccgcuggaugcucaucgaggccgagcugaagugcuucggcaacaccgccguggccaagugcaacgagaagcacgacgaggaguucugcgacaugcugcggcuguucgacuucugcaagcaggcgauccagcgccugaaggccgaggcccagauguccauccagcugaucaacaaggccgucaacgcccucaucaacgaccagcugaucaugaagaaccaccuccgggacaucauggggauccccuacugcaacuacagcaaguacugguaccucaaccacaccacgaccggcaagaccucccugcccaagugcuggcuggugagcaacggcuccuaccucaacgagacccacuucagcgacgacaucgagcagcaggcggacaacaugaucacggagaugcugcagaaggaguacauggagcgccaggggaagacgccccugggccucguggaccuguucgucuucuccaccagcuucuaccugaucuccaucuuccugcaccucgugaagaucccgacccaccggcacaucgugggcaagagcugccccaagccccaccgccugaaccacauggggaucugcuccugcgggcuguacaagcagcccggcgucccggugaaguggaagcggugaggacuaguuauaagacugacuagcccgaugggccucccaacgggcccuccuccccuccuugcaccgagauuaauaaaaaaaaaaaaaaaaaaaaaaaaaaaaaaaaaaaaaaaaaaaaaaaaaaaaaaaaaaaaaaaaaaaaaaaaaaaaaaaaaaaaaaaaaaaaaaaaaaaa

SEQ ID NO: 38108 - RNA, 1665 nt, Artificial Sequence
  mRNA product Design i-3 (A100) comprising derived and/or modified sequence from LASV(G1442-SLE-2011;Clade IV)__AIT17180__GPCmut10 (opt1)
aggagaaagcuuaccaugggccagaucgugaccuucuuccaggaggucccccacgugaucgaggaggugaugaacaucguccugaucgcccucagcauccuggccgugcugaaggggcucuacaacguggcgaccugcggccugaucgggcuggucacguuccuccugcugugcggccgcuccugcaccaccacccucuacaaggggguguacgagcugcagacgcuggagcucaacauggagacccugaacaugugcaugccgcugagcugcaccaagaacaacucccaccacuacauccgggugggcaacgagacgggccucgagcugacccugaccaacaccagcaucaucaaccacaaguucugcaaccucuccgacgcccacaagaagaaccuguacgaccacgcccugaugagcaucaucuccacguuccaccucagcauccccaacuucaaccaguacgaggccauguccugcgacuucaacgggggcaagaucagcguccaguacaaccugucccacagcuacgccggggacgcggccaaccacugcggcaccguggccaacggggugcugcagaccuucaugcgcauggccuggggcggcuccuacaucgcgcucgacagcgggcggggcaacugggacugcaucaugaccuccuaccaguaccugaucauccagaacacgaccugggacgaccacugccaguucagccgccccucccccaucggguaccugggccuccugagccagcggacccgcgacgucuacaucucccggcgccugcucggcaccuucacguggacccugagcgacagcgaggggaaggacaccccgggcggguacugccugacccgguggaugcucaucgaggccgagcugaagugcuucggcaacacggccguggccaagugcaacgagaagcacgacgaggaguucugcgacaugcugcgccucuucgacuucugcaagcaggccauccagcggcugaaggcggaggcccagauguccauccagcugaucaacaaggccgugaacgcccucaucaacgaccagcugaucaugaagaaccaccuccgcgacaucauggggauccccuacugcaacuacagcaaguacugguaccugaacaacaccgccaccggcaagaccucccugcccaagugcuggcugaucagcaacggcuccuaccucaacgagacgcacuucagcgacgacaucgagcaggaggcggacaacaugaucaccgagaugcugcagaaggaguacauggagcggcaggggaagacgccccugggccucgucgaccuguucguguucuccaccagcuucuaccugaucuccaucuuccugcaccucgugaagaucccgacccaccgccacaucgucggcaagagcugccccaagccccaccggcugaaccacauggggaucugcuccugcgggcuguacaagcagcccggcgugccggugcgcuggaagcggugaggacuaguuauaagacugacuagcccgaugggccucccaacgggcccuccuccccuccuugcaccgagauuaauaaaaaaaaaaaaaaaaaaaaaaaaaaaaaaaaaaaaaaaaaaaaaaaaaaaaaaaaaaaaaaaaaaaaaaaaaaaaaaaaaaaaaaaaaaaaaaaaaaaa

SEQ ID NO: 38109 - RNA, 1665 nt, Artificial Sequence
  mRNA product Design i-3 (A100) comprising derived and/or modified sequence from LASV(G3010-SLE-2013;Clade IV)__AIT17344__GPCmut10 (opt1)
aggagaaagcuuaccaugggccagaucgugaccuucuuccaggaggucccccacgugaucgaggaggugaugaacaucguccugaucgcccucagcauccuggccgugcugaaggggcucuacaacuucgcgaccugcggccugguggggcuggucacguuccuccugcugugcggccgcuccugcaccaccagccucuacaaggggguguacgagcugcagacccuggagcucaacauggagacgcugaacaugugcaugccgcuguccugcaccaagaacaacagccaccacuacaucauggugggcaacgagaccggccucgagcugacgcugaccaacaccuccaucaucaaccacaaguucugcaaccucagcgacgcccacaagaagaaccuguacaaccacgcccugauguccaucaucagcaccuuccaccucuccauccccaacuucaaccaguacgaggccaugagcugcgacuucaacgggggcaagaucuccguccaguacaaccugagccacuccuacgccggggacgcggccagccacugcggcacgguggccaacggggugcugcagaccuucaugcggauggccuggggcggcuccuacaucgcgcucgacagcggguacggcaagugggacugcaucaugaccuccuaccaguaccugaucauccagaacaccacgugggaggaccacugccaguucagccgccccucccccaucggguaccugggccuccugagccagcggacccgcgacaucuacaucagccggcgccugcucggcaccuucaccuggacgcuguccgacagcgaggggaaggacaccccgggcggguacugccugacccgguggaugcucaucgaggccgagcugaagugcuucggcaacaccgccgucgccaagugcaacgagaagcacgacgaggaguucugcgacaugcugcgccucuucgacuucugcaagcaggccauccagcggcugaagacggaggcgcagauguccauccagcugaucaacaaggccgugaacgcccucaucaacgaccagcugaucaugaagaaccaccuccgcgacaucauggggauccccuacugcaacuacagcaaguacugguaccugaaccacaccaccaccggcaagacgucccugcccaagugcuggcuggugagcaacggcuccuaccucaacgagacccacuucagcgacgacaucgagcagcaggccgacaacaugaucaccgagaugcugcagaaggaguacauggagcggcaggggaagacgccccugggccucgucgaccuguucguguucuccaccagcuucuaccugaucuccaucuuccugcaccucgugaagaucccgacccaccgccacaucgucggcaagagcugccccaagccccaccggcugaaccacauggggaucugcuccugcgggcuguacaagcagcccggcgugccggugcgcuggaagcggugaggacuaguuauaagacugacuagcccgaugggccucccaacgggcccuccuccccuccuugcaccgagauuaauaaaaaaaaaaaaaaaaaaaaaaaaaaaaaaaaaaaaaaaaaaaaaaaaaaaaaaaaaaaaaaaaaaaaaaaaaaaaaaaaaaaaaaaaaaaaaaaaaaaa

SEQ ID NO: 38110 - RNA, 1665 nt, Artificial Sequence
  mRNA product Design i-3 (A100) comprising derived and/or modified sequence from LASV(G502-SLE-2009;Clade IV)__AIT17126__GPCmut10 (opt1)
aggagaaagcuuaccaugggccagaucgugaccuucuuccaggaggucccccacgugaucgaggaggugaugaacaucguccugaucgcccucagcauccuggccgugcugaaggggcucuacaacuucgcgaccugcggccugguggggcugcucacguuccugcugcucugcggccgcuccugcaccaccgggcuguacaagggcgucuacgagcugcagacccucgagcugaacauggagacgcugaacaugugcaugccgcucagcugcaccaagaacaacucccaccacuacaucauggugggcaacgagaccgggcuggagcugacgcucaccaacaccagcaucaucaaccacaaguucugcaaccuguccgacgcccacaagaagaaccuguacgaccacgcccucaugagcaucaucuccaccuuccaccugagcauccccaacuucaaccaguacgaggccauguccugcgacuucaacggcgggaagaucagcgugcaguacaaccugucccacagcuacgccggcgacgcggccgaccacugcgggacggucgccaacggcgugcuccagaccuucaugcggauggccuggggcggguccuacaucgcgcuggacagcggccgcgggcggugggacugcaucaugaccuccuaccaguaccugaucauccagaacaccacgugggaggaccacugccaguucagccgccccucccccaucggcuaccucggccugcugagccagcggacccgcgacaucuacaucucccggcgccuccuggggaccuucaccuggacgcugagcgacagcgagggcaaggacacccccgggggcuacugccucacccgguggaugcugaucgaggccgagcugaagugcuucgggaacaccgccguggccaagugcaacgagaagcacgacgaggaguucugcgacaugcuccgccuguucgacuucugcaagcaggccauccagcggcugaaggcggaggcccagauguccauccagcucaucaacaaggccgucaacgcccugaucaacgaccagcuggugaugaagaaccaccuccgcgacaucaugggcauccccuacugcaacuacagccgguacugguaccugaaccacacgaccaccggccgcaccucccugcccaagugcuggcucgugagcaacggguccuaccugaacgagacgcacuucagcgacgacaucgagcagcaggccgacaacaugaucaccgagaugcugcagaaggaguacauggagcggcagggcaagaccccgcucgggcuggucgaccuguucguguucuccaccagcuucuaccugaucuccaucuuccuccaccuggugaagaucccgacgcaccgccacaucgucggcaagagcugccccaagccccaccggcugaaccacauggggaucugcuccugcggccucuacaagcagcccggcgugccggugaaguggaagcgcugaggacuaguuauaagacugacuagcccgaugggccucccaacgggcccuccuccccuccuugcaccgagauuaauaaaaaaaaaaaaaaaaaaaaaaaaaaaaaaaaaaaaaaaaaaaaaaaaaaaaaaaaaaaaaaaaaaaaaaaaaaaaaaaaaaaaaaaaaaaaaaaaaaaa

SEQ ID NO: 38111 - RNA, 1665 nt, Artificial Sequence
  mRNA product Design i-3 (A100) comprising derived and/or modified sequence from LASV(G733-SLE-2010;Clade IV)__AIT17154__GPCmut10 (opt1)
aggagaaagcuuaccaugggccagaucgugaccuucuuccaggaggucccccacgugaucgaggaggugaugaacaucguccugaucgcccucagcauccuggccgugcugaaggggcucuacaacuucgcgaccugcggcaucguggggcuggucuccuuccugcuccugugcggccgcagcugcacgaccucccuguacaaggggguguacgagcuccagacccuggagcugaacauggagacccucaacaugugcaugccgcugagcugcaccaagaacaacucccaccacuacaucauggugggcaacgagaccggccuggagcucacccugacgaacaccagcaucaucaaccacaaguucugcaaccuguccgacgcccacaagaagaaccucuacgaccacgcccugaugagcaucaucuccaccuuccaccugagcauccccaacuucaaccaguacgaggccauguccugcgacuucaacgggggcaagaucagcguccaguacaaccucucccacagcuacgccggggacgcggccaaccacugcggcaccaucgccaacggggugcugcagacguucaugcggauggccuggggcggcuccuacaucgcgcuggacagcgggcgcgaccggugggacugcaucaugaccuccuaccaguaccucaucauccagaacaccaccugggaggaccacugccaguucagccgccccucccccaucggcuaccuggggcugcucagccagcggacgcgcgacaucuacaucagccggcgccugcugggcaccuucaccuggacccucuccgacagcgagggcaaggacacgcccgggggcuacugccugacccgguggaugcugaucgaggccgagcucaagugcuucgggaacaccgccguggccaagugcaacgagaagcacgacgaggaguucugcgacaugcugcgccuguucgacuucugcaagcaggccauccagcggcucaaggcggaggcccagauguccauccagcugaucaacaaggccgucaacgcccugaucaacgaccagcucaucaugaagaaccaccuccgcgacaucaugggcauccccuacugcaacuacagcaaguacugguaccugaaccacaccacgaccgggaagaccucccugcccaagugcuggcuggugagcaacggcuccuaccugaacgagacccacuucagcgacgacaucgagcagcaggccgacaacaugaucacggagaugcuccagaaggaguacauggagcggcagggcaagaccccgcuggggcugguggaccucuucgucuucuccaccagcuucuaccugaucuccaucuuccugcaccuggugaagaucccgacccaccgccacguggucggcaagagcugccccaagccccaccggcucaaccacauggggaucugcuccugcggccuguacgggcagcccggcgugccggugaaguggaagcgcugaggacuaguuauaagacugacuagcccgaugggccucccaacgggcccuccuccccuccuugcaccgagauuaauaaaaaaaaaaaaaaaaaaaaaaaaaaaaaaaaaaaaaaaaaaaaaaaaaaaaaaaaaaaaaaaaaaaaaaaaaaaaaaaaaaaaaaaaaaaaaaaaaaaa

SEQ ID NO: 38112 - RNA, 1665 nt, Artificial Sequence
  mRNA product Design i-3 (A100) comprising derived and/or modified sequence from MOPV/LASV reassortant(IGS-1;Clade IV)__AFY05576__GPCmut10 (opt1)
aggagaaagcuuaccaugggccagaucgugaccuucuuccaggaggucccccacgugaucgaggaggugaugaacaucguccugaucgcccucagcgugcuggccgugcugaaggggcucuacaacuucgcgaccugcggccuggucgggcuggugacguuccuccugcugugcggccgcuccugcaccaccagccucuacaaggggguguacgagcugcagacccuggagcucaacauggagacgcugaacaugugcaugccgcuguccugcaccaagaacaacagccaccacuacaucauggucggcaacgagaccggccucgagcugacgcugaccaacaccuccaucaucaaccacaaguucugcaaccucagcgacgcccacaagaagaaccuguacgaccacgcccugauguccaucaucagcaccuuccaccucuccauccccaacuucaaccaguacgaggccaugagcugcgacuucaacgggggcaagaucuccgugcaguacaaccugagccacuccuacgccggggacgcggccaaccacugcggcacgguggccaacgggguccugcagaccuucaugcggauggccuggggcggcagcuacaucgcgcucgacuccgggcgcggcaacugggacugcaucaugaccagcuaccaguaccugaucauccagaacaccacgugggaggaccacugccaguucucccggcccagccccaucggguaccugggccuccugucccagcgcacccgggacaucuacaucagccgccggcugcucggcaccuucaccuggacgcugagcgacuccgagggggaggacaccccgggcggguacugccugacccgcuggaugcucaucgaggccgagcugaagugcuucggcaacaccgccguggccaagugcaacgagaagcacgacgaggaguucugcgacaugcugcggcuguucgacuucugcaagcaggccauccagcgccugaaggcggaggcccagaugagcauccagcugaucaacaaggccgugaacgcccucaucaacgaccagcugaucaugaagaaccaccuccgggacaucauggggauccccuacugcaacuacuccaaguacugguaccucaaccacacgaccaccggccgcaccagccugcccaagugcuggcuggucuccaacggcagcuaccucaacgagacgcacuucuccgacgacaucgagcagcaggccgacaacaugaucaccgagaugcugcagaaggaguacauggagcggcaggggaagacgccccugggccucguggaccuguucguguucagcaccuccuucuaccugaucagcaucuuccugcaccucgucaagaucccgacccaccgccacaucguggggaaguccugccccaagccccaccggcugaaccacaugggcaucugcagcugcgggcuguacaagcagcccggcgugccggucaaguggaagcgcugaggacuaguuauaagacugacuagcccgaugggccucccaacgggcccuccuccccuccuugcaccgagauuaauaaaaaaaaaaaaaaaaaaaaaaaaaaaaaaaaaaaaaaaaaaaaaaaaaaaaaaaaaaaaaaaaaaaaaaaaaaaaaaaaaaaaaaaaaaaaaaaaaaaa

SEQ ID NO: 38113 - RNA, 1665 nt, Artificial Sequence
  mRNA product Design i-3 (A100) comprising derived and/or modified sequence from LASV(LM765-SLE-2012;Clade IV)__AIT17814__GPCmut10 (opt1)
aggagaaagcuuaccaugggccagaucgugaccuucuuccaggaggucccccacgugaucgaggaggugaugaacaucguccugaucgcccucagcauccuggccgugcugaaggggcucuacaacuucgcgaccugcggccugguggggcuggucacguuccuccugcugugcggccgcuccugcaccaccagccucuacaaggggguguacgagcugcagacccuggagcucaacauggagacgcugaacaugugcaugccgcuguccugcaccaagaacaacagccaccacuacaucauggugggcaacgagaccggccucgagcugacgcugaccaacaccuccaucaucgaccacaaguucugcaaccucagcgacgcccaccggaagaaccuguacgaccacgcccugauguccaucaucagcaccuuccaccucuccauccccaacuucaaccaguacgaggccaugagcugcgacuucaacgggggcaagaucuccguccaguacaaccugagccacuccuacgccaaggacgcggccgaccacugcgggacgguggccaacggcgugcugcagaccuucaugcgcauggccuggggcgggagcuacaucgcgcucgacuccggccgggggcgcugggacugcaucaugaccagcuaccaguaccugaucauccagaacaccacgugggaggaccacugccaguucucccggcccagccccaucggcuaccuggggcuccugucccagcgcacccgggacaucuacaucagccgccggcugcucggcaccuucaccuggacgcugagcgacuccgagggcaaggacacccccgggggcuacugccugacccgcuggaugcucaucgaggccgagcugaagugcuucgggaacaccgccgucgccaagugcaacgagaagcacgacgaggaguucugcgacaugcugcggcuguucgacuucugcaagcaggccauccagcgccugaaggcggaggcccagaugagcauccagcugaucaacaaggccgugaacgcccucaucaacgaccagcugaucaugaagaaccaccuccgggacaucaugggcauccccuacugcaacuacuccaaguacugguaccucaaccacacgaccaccgggaagaccagccugcccaagugcuggcugguguccaacggcagcuaccucaacgagacgcacuucuccgacgacaucgagcagcaggccgacaacaugaucaccgagaugcugcagaaggaguacauggagcgccagggcaagaccccgcuggggcucgucgaccuguucguguucagcaccuccuucuaccugaucagcaucuuccugcaccucgugaagaucccgacgcaccggcacaucgucggcaagcccugccccaagccccaccgccugaaccacauggggaucugcuccugcggccuguacaagcagccgggggugcccgugaaguggaagcggugaggacuaguuauaagacugacuagcccgaugggccucccaacgggcccuccuccccuccuugcaccgagauuaauaaaaaaaaaaaaaaaaaaaaaaaaaaaaaaaaaaaaaaaaaaaaaaaaaaaaaaaaaaaaaaaaaaaaaaaaaaaaaaaaaaaaaaaaaaaaaaaaaaaa

SEQ ID NO: 38114 - RNA, 1665 nt, Artificial Sequence
  mRNA product Design i-3 (A100) comprising derived and/or modified sequence from LASV(LM776-SLE-2012;Clade IV)__AIT17824__GPCmut10 (opt1)
aggagaaagcuuaccaugggccagaucgugaccuucuuccaggaggucccccacgugaucgaggaggugaugaacaucguccugaucgcccucagcauccuggccgugcugaaggggcucuacaacuucgcgaccugcggccugguggggcuggucacguuccuccugcugugcggccgcuccugcaccaccagcguguacaaggggguguacgagcuccagacccuggagcugaacauggagacgcucaacaugugcaugccgcuguccugcaccaagaacaacagccaccacuacaucauggucggcaacgagaccggccuggagcucacgcugaccaacaccuccaucaucaaccacaaguucugcaaccugagcgacgcccacaagaagaaccucuacgaccacgcccugauguccaucaucagcaccuuccaccuguccauccccaacuucaaccaguacgaggccaugagcugcgacuucaacgggggcaagaucuccgugcaguacaaccucagccacuccuacgccggggacgcggccaaccacugcggcacgguggccaacgggguccugcagaccuucaugcggauggccuggggcggcagcuacaucgcgcuggacuccgggcacggcaagugggacugcaucaugaccagcuaccaguaccucaucauccagaacaccacgugggaggaccacugccaguucucccgccccagccccaucggguaccugggccugcucucccagcggacccgcgacaucuacaucagccggcgccugcugggcaccuucaccuggacgcucagcgacuccgaggggaaggacaccccgggcggguacugccugacccgguggaugcugaucgaggccgagcucaagugcuucggcaacaccgccguggccaagugcaacgagaagcacgacgaggaguucugcgacaugcugcgccuguucgacuucugcaagcaggccauccagcggcucaaggcggaggcccagaugagcauccagcugaucaacaaggccgugaacgcccugaucaacgaccagcucaucaugaagaaccaccuccgcgacaucauggggauccccuacugcaacuacuccaaguacugguaccugaaccacacgaccaccggcaagaccagccugcccaagugcuggcuggucuccaacggcagcuaccugaacgagacgcacuucuccgacgacaucgagcagcaggccgacaacaugaucaccgagaugcuccagaaggaguacauggagcggcaggggaagacgccccugggccugguggaccucuucguguucagcaccuccuucuaccugaucagcaucuuccugcaccuggucaagaucccgacccaccgccacaucguggggaaguccugccccaagccccaccggcucaaccacaugggcaucugcagcugcgggcuguacaagcagcccggcgugccgguccgcuggaagcggugaggacuaguuauaagacugacuagcccgaugggccucccaacgggcccuccuccccuccuugcaccgagauuaauaaaaaaaaaaaaaaaaaaaaaaaaaaaaaaaaaaaaaaaaaaaaaaaaaaaaaaaaaaaaaaaaaaaaaaaaaaaaaaaaaaaaaaaaaaaaaaaaaaaa

SEQ ID NO: 38115 - RNA, 1665 nt, Artificial Sequence
  mRNA product Design i-3 (A100) comprising derived and/or modified sequence from LASV(Mad39;Clade IV)__ANH09722__GPCmut10 (opt1)
aggagaaagcuuaccaugggccagaucgugaccuucuuccaggaggucccccacgugaucgaggaggugaugaacaucguccugaucgcccucagcauccuggccgugcugaaggggcucuacaacguggcgaccugcggccugaucgggcuggucacguuccuccugcugugcggccgcuccugcaccaccacccucuacaaggggguguacgagcugcaggcccuggagcucaacauggagacgcugaacaugugcaugccgcugagcugcaccaagaacaacucccaccacuacauccgggugggcaacgagaccggccucgagcugacgcugaccaacaccagccucaucaaccacaaguucugcaaccuguccgacgcccacaagaagaaccuguacgaccacgcccucaugagcaucaucuccaccuuccaccugagcauccccaacuucaaccaguacgaggccauguccugcgacuucaacgacgggaagaucagcguccaguacaaccugucccacacguacgcgggcgacaccgccaaccacugcgggaccguggccaacggcgugcuccagaccuucaugcgcauggccuggggcgggagcuacaucgcgcuggacuccggccgcgggggcugggacugcaucaugacgagcuaccaguaccugaucauccagaacaccaccugggaggaccacugccaguucucccggcccagccccaucggguaccucggccugcugucccagcggacccgcgacaucuacaucagccggcgccuccugggcacguucaccuggacccuguccgacagcgaggggaaggacaccccgggcggguacugccucacgcgguggaugcugaucgaggccgagcugaagugcuucggcaacaccgccgucgccaagugcaacgagaagcacgacgaggaguucugcgacaugcuccgccuguucgacuucugcaagcaggccauccagcggcugaaggcggaggcccagaugagcauccagcucaucaacaaggccgugaacgcccugaucaacgaccagcugaucaugaagaaccaccuccgcgacaucauggggauccccuacugcaacuacuccaaguacugguaccugaaccacaccgugaccggcaagacgagccugcccaagugcuggcucgucuccaacggcagcuaccugaacgagacccacuucuccgacgacaucgagcagcaggccgacaacaugaucaccgagaugcugcagaaggaguacauggagcggcaggggaagacgccccucggccugguggaccuguucguguucagcaccuccuucuaccugaucagcaucuuccuccaccuggucaagaucccgacccaccgccacgugguggggaagcccugccccaagccccaccggcugaaccacaugggcaucugcuccugcggguucuacaagcagccgggcguccccgugcgcuggaagcggugaggacuaguuauaagacugacuagcccgaugggccucccaacgggcccuccuccccuccuugcaccgagauuaauaaaaaaaaaaaaaaaaaaaaaaaaaaaaaaaaaaaaaaaaaaaaaaaaaaaaaaaaaaaaaaaaaaaaaaaaaaaaaaaaaaaaaaaaaaaaaaaaaaaa

SEQ ID NO: 38116 - RNA, 1665 nt, Artificial Sequence
  mRNA product Design i-3 (A100) comprising derived and/or modified sequence from LASV(Z0947-SLE-2011;Clade IV)__AIT17840__GPCmut10 (opt1)
aggagaaagcuuaccaugggccagaucgugaccuucuuccaggaggucccccacgugaucgaggaggugaugaacaucguccugaucgcccucagcauccuggccgugcugaaggggcucuacaacuucgcgaccugcggccugguggggcuggucacguuccuccugcugugcggccgcuccugcaccaucagccucuacaaggggguguacgagcugcagacccuggagcucaacauggagacccugaacaugugcaugccgcuguccugcaccaagaacaacagccaccacuacaucauggugggcaacgagaccggccucgagcugacccugacgaacaccuccaucaucaaccacaaguucugcaaccucagcgacgcccacaagaagaaccuguacgaccacgcccugauguccaucaucagcaccuuccaccucuccauccccaacuucaaccaguacgaggccaugagcugcgacuucaacgggggcaagaucuccguccaguacaaccugagccacuccuacgccggggacgcggccaaccacugcggcaccguggccaacggggugcugcagacguucaugcggauggccuggggcggcagcuacaucgcgcucgacuccgggcgcgaccggugggacugcaucaugaccagcuaccaguaccugaucauccagaacaccaccugggaggaccacugccaguucucccgccccagccccaucggcuaccuggggcuccugucccagcggacgcgcgacaucuacaucagccggcgccugcucggcaccuucaccuggacccugagcgacuccgagggcaaggacacgcccgggggcuacugccugacccgguggaugcucaucgaggccgagcugaagugcuucgggaacaccgccgucgccaagugcaacgagaagcacgacgaggaguucugcgacaugcugcgccucuucgacuucugcaagcaggccauccagcggcugaaggcggaggcccagaugagcauccagcugaucaacaaggccgugaacgcccucaucaacgaccagcugaucaugaagaaccaccuccgcgacaucaugggcauccccuacugcaacuacuccaaguacugguaccugaaccacaccacgaccgggaagaccagccugcccaagugcuggcugguguccaacggcagcuaccucaacgagacccacuucuccgacgacaucgagcagcaggccgacaacaugaucacggagaugcugcagaaggaguacauggagcggcagggcaagaccccgcuggggcucgucgaccuguucguguucagcaccuccuucuaccugaucagcaucuuccugcaccucgugaagaucccgacccaccgccacaucgucggcaagcccugccccaagccccaccggcugaaccacauggggaucugcuccugcggccuguacaagcagccgggggugcccgugaaguggaagcgcugaggacuaguuauaagacugacuagcccgaugggccucccaacgggcccuccuccccuccuugcaccgagauuaauaaaaaaaaaaaaaaaaaaaaaaaaaaaaaaaaaaaaaaaaaaaaaaaaaaaaaaaaaaaaaaaaaaaaaaaaaaaaaaaaaaaaaaaaaaaaaaaaaaaa

SEQ ID NO: 38117 - RNA, 1665 nt, Artificial Sequence
  mRNA product Design i-3 (A100) comprising derived and/or modified sequence from LASV(Josiah;Clade IV)__NP_694870__GPCmut10 (opt1)
aggagaaagcuuaccaugggccagaucgugaccuucuuccaggaggucccccacgugaucgaggaggugaugaacaucguccugaucgcccucagcgugcuggccgugcugaaggggcucuacaacuucgcgaccugcggccuggucgggcuggugaccuuccuccugcugugcggccgcuccugcaccaccagccucuacaaggggguguacgagcugcagacccuggagcucaacauggagacgcugaacaugugcaugccgcuguccugcaccaagaacaacagccaccacuacaucauggucggcaacgagaccggccucgagcugacccugacgaacaccuccaucaucaaccacaaguucugcaaccucagcgacgcccacaagaagaaccuguacgaccacgcccugauguccaucaucagcaccuuccaccucuccauccccaacuucaaccaguacgaggccaugagcugcgacuucaacgggggcaagaucuccgugcaguacaaccugagccacuccuacgccggggacgcggccaaccacugcggcaccguggccaacgggguccugcagacguucaugcggauggccuggggcggcagcuacaucgcgcucgacuccgggcgcggcaacugggacugcaucaugaccagcuaccaguaccugaucauccagaacaccaccugggaggaccacugccaguucucccggcccagccccaucggguaccugggccuccugucccagcgcacgcgggacaucuacaucagccgccggcugcucggcaccuucaccuggacccugagcgacuccgaggggaaggacacgccgggcggguacugccugacccgcuggaugcucaucgaggccgagcugaagugcuucggcaacaccgccguggccaagugcaacgagaagcacgacgaggaguucugcgacaugcugcggcuguucgacuucugcaagcaggccauccagcgccugaaggcggaggcccagaugagcauccagcugaucaacaaggccgugaacgcccucaucaacgaccagcugaucaugaagaaccaccuccgggacaucauggggauccccuacugcaacuacuccaaguacugguaccucaaccacaccacgaccggccgcaccagccugcccaagugcuggcuggucuccaacggcagcuaccucaacgagacccacuucuccgacgacaucgagcagcaggccgacaacaugaucacggagaugcugcagaaggaguacauggagcggcaggggaagacgccccugggccugguggaccucuucguguucagcaccuccuucuaccugaucagcaucuuccugcaccucgucaagaucccgacccaccgccacaucguggggaaguccugccccaagccccaccggcugaaccacaugggcaucugcagcugcgggcuguacaagcagcccggcgugccggucaaguggaagcgcugaggacuaguuauaagacugacuagcccgaugggccucccaacgggcccuccuccccuccuugcaccgagauuaauaaaaaaaaaaaaaaaaaaaaaaaaaaaaaaaaaaaaaaaaaaaaaaaaaaaaaaaaaaaaaaaaaaaaaaaaaaaaaaaaaaaaaaaaaaaaaaaaaaaa

SEQ ID NO: 38118 - RNA, 1662 nt, Artificial Sequence
  mRNA product Design i-3 (A100) comprising derived and/or modified sequence from LASV(LP;Clade I)__AAF86701__GPCmut10 (opt1)
aggagaaagcuuaccaugggccagaucaucaccuucuuccaggaggugccccacgucaucgaggaggugaugaacaucgugcugaucgcccucagccugcuggccauccucaaggggcuguacaacaucgcgaccugcggcaucaucgggcuggucgccuuccucuuccugugcggcaaguccugcagccugacgcucaagggcggguacgagcugcagacccuggagcucaacauggagacccugaacaugugcaugccgcuguccugcaccaagaacagcucccaccacuacauccgcgugggcaacgagacggggcucgagcugacccugaccaacaccagcaucaucaaccacaaguucugcaaccucuccgacgcccacaagaagaaccuguacgaccacgcccugaugagcaucaucuccacguuccaccucagcauccccaacuucaaccaguacgaggccauguccugcgacuucaacggcgggaagaucagcgugcaguacaaccugucccacagcuacgcgggcgacgccgccgagcacugcgggaccgucgccaacggcgugcugcagaccuucaugcggauggcguggggcgggcgcuacaucgcccucgacuccggcaaggggaacugggacugcaucaugaccagcuaccaguaccugaucauccagaacacgaccugggaggaccacugccaguucucccggcccagccccaucggcuaccugggccuccugucccagcgcacccgggacaucuacaucagccgccggcugcucgggaccuucacguggacccugagcgacuccgagggcaacgagacccccgggggcuacugccugacccgcuggaugcucaucgaggccgagcugaagugcuucgggaacacggccguggccaagugcaacgagaagcacgacgaggaguucugcgacaugcugcggcuguucgacuucugcaagcaggcgauccgccggcugaaggccgaggcccagaugagcauccagcugaucaacaaggccgucaacgcccucaucaacgaccagcugaucaugaagaaccaccuccgcgacaucaugggcauccccuacugcaacuacuccaaguacugguaccucaaccacaccagcuccggccggaccagccugcccaagugcuggcugaucuccaacgggagcuaccucaacgagacccaguucuccgacgacaucgagcagcaggcggacaacaugaucacggagaugcugcagaaggaguacaucgagcgccagggcaagaccccgcuggggcugguggacaucuucaucuucagcaccuccuucuaccucaucagcaucuuccugcaccugaucaagaucccgacccaccggcacaucgugggcaagcccugccccaagccccaccgccucaaccacaugggggucugcuccugcggccuguacaagcacccgggcgugcccacgaaguggaagcggugaggacuaguuauaagacugacuagcccgaugggccucccaacgggcccuccuccccuccuugcaccgagauuaauaaaaaaaaaaaaaaaaaaaaaaaaaaaaaaaaaaaaaaaaaaaaaaaaaaaaaaaaaaaaaaaaaaaaaaaaaaaaaaaaaaaaaaaaaaaaaaaaaaaa

SEQ ID NO: 38119 - RNA, 1662 nt, Artificial Sequence
  mRNA product Design i-3 (A100) comprising derived and/or modified sequence from LASV(803213;Clade II)__AAF86703__GPCmut10 (opt1)
aggagaaagcuuaccaugggccagaucaucaccuucuuccaggaggugccccacgucaucgaggaggugaugaacaucgugcugaucgcccucagccugcuggccauccucaaggggaucuacaacgucgcgaccugcggccuguucgggcugaucuccuuccuccugcugugcggccgcagcugcuccgugacguacaaggggguguacgagcuccagacccuggagcugaacauggccaaccucaacaugugcaugccgcugagcugcaccaagaacaacucccaccacuacaucauggucggcaacgagaccggccuggagcucacgcugaccaacaccagcaucaucaaccacaaguucugcaaccuguccgacgcccacaagaagaaccucuacgaccacgcccugaugagcaucaucuccaccuuccaccugagcauccccaacuucaaccaguacgaggccauguccugcgacuucaacgggggcaagaucagcgugcaguacaaccucucccacagcuucgcgguggacgccgccaaccacugcgggacgaucgccaacggcguccugcagaccuucaugcggauggcguggggcggguccuacaucgcccuggacagcggcaaggggaacugggacugcaucaugaccuccuaccaguaccucaucauccagaacaccacgugggaggaccacugccaguucagccgccccucccccaucggcuaccuggggcugcucagccagcggacccgcgacaucuacaucagccggcgccugcugggcaccuucaccuggacgcucuccgacagcgagggcaacgaggcccccgggggcuacugccugacccgguggaugcugaucgaggccgagcucaagugcuucgggaacaccgccguggcgaagugcaacgagaagcacgacgaggaguucugcgacaugcugcgccuguucgacuucugcaagcaggccaucaagcggcucaagaccgaggcccagauguccauccagcugaucaacaaggccgugaacgcccugaucaacgaccagcucaucaugaagaaccaccuccgcgacaucaugggcauccccuacugcaacuacagccgguacugguaccugaaccacacggucaccgggaagaccucccugccccgcugcuggcuggugagcaacggcuccuaccugaacgagacccacuucagcgacgacaucgagcagcaggcggacaacaugaucacggagaugcuccagaaggaguacauggaccggcagggcaagaccccgcuggggcugguggaccuguucgucuucuccaccagcuucuaccucaucuccaucuuccugcaccuggugaagaucccgacccaccgccacaucgugggcaagcccugccccaagccccaccggcucaaccacauggggaucugcagcugcggccuguacaagcacccggggguccccgugaaguggaagcgcugaggacuaguuauaagacugacuagcccgaugggccucccaacgggcccuccuccccuccuugcaccgagauuaauaaaaaaaaaaaaaaaaaaaaaaaaaaaaaaaaaaaaaaaaaaaaaaaaaaaaaaaaaaaaaaaaaaaaaaaaaaaaaaaaaaaaaaaaaaaaaaaaaaaa

SEQ ID NO: 38120 - RNA, 1662 nt, Artificial Sequence
  mRNA product Design i-3 (A100) comprising derived and/or modified sequence from LASV(GA391;Clade III)__CAA36645__GPCmut10 (opt1)
aggagaaagcuuaccaugggccagaucgugaccuucuuccaggaggucccccacgugaucgaggaggugaugaacaucguccugaucgcccucagcauccuggccauccugaaggggcucuacaacguggcgaccugcggccugaucgggcuggugaccuuccuccugcuguccggccgcagcugcucccucaucuacaaggggaccuacgagcugcagacccuggagcucaacauggagacccugaacaugugcaugccgcugagcugcacgaagaacaacucccaccacuacauccgggucggcaacgagaccggccucgagcugacccugaccaacacgagcauccucaaccacaaguucugcaaccuguccgacgcccacaagcgcaaccuguacgaccacagccucauguccaucaucagcaccuuccaccuguccauccccaacuucaaccaguacgaggccaugagcugcgacuucaacgggggcaagaucaccgugcaguacaaccugucccacagcuucgccguggacgccgcggggcacugcggcacccucgccaacgggguccugcagacguucaugcggauggccuggggcggcuccuacaucgcccuggacagcgggcgcggcaacugggacugcaucaugaccuccuaccaguaccucaucauccagaacaccaccugggacgaccacugccaguucagccggcccucccccaucggguaccugggccugcucagccagcgcacgcgggacaucuacaucagccgccggcugcugggcaccuucaccuggacccucuccgacagcgaggggaacgagacgccgggcggguacugccugacccgcuggaugcugaucgaggcggagcucaagugcuucggcaacaccgccguggccaagugcaacgagaagcacgacgaggaguucugcgacaugcugcggcuguucgacuucugcaagcaggccauccgccggcucaagaccgaggcccagauguccauccagcugaucaacaaggcggugaacgcccugaucaacgaccagcucaucaugaagaaccaccuccgcgacaucauggggauccccuacugcaacuacagccgguacugguaccugaaccacacguccaccggcaagaccagccugccccgcugcuggcugaucuccaacggcagcuaccugaacgagaccaaguucuccgacgacaucgagcagcaggccgacaacaugaucacggagaugcugcagaaggaguacaucgaccggcaggggaagacgccccucggccuggucgaccuguucguguucagcaccuccuucuaccucaucagcaucuuccugcaccuggugaagaucccgacccaccgccacaucgucgggaagcccugccccaagccccaccggcucaaccacaugggcaucugcuccugcgggcuguacaagcagccgggcgugcccgugcgcuggaagcggugaggacuaguuauaagacugacuagcccgaugggccucccaacgggcccuccuccccuccuugcaccgagauuaauaaaaaaaaaaaaaaaaaaaaaaaaaaaaaaaaaaaaaaaaaaaaaaaaaaaaaaaaaaaaaaaaaaaaaaaaaaaaaaaaaaaaaaaaaaaaaaaaaaaa

SEQ ID NO: 38121 - RNA, 1665 nt, Artificial Sequence
  mRNA product Design i-3 (A100) comprising derived and/or modified sequence from LASV(AV;Clade V)__CCA30314__GPCmut10 (opt1)
aggagaaagcuuaccaugggccagaucgugaccuucuuccaggaggucccccacgugaucgaggaggugaugaacaucguccugaucgcccucagcauccuggccgugcugaaggggcucuacaacaucgcgaccugcggccugaucgggcugaucacguuccuccugcugugcggccgcuccugcagcuccaaccucuacaaggggguguacgagcugcagagccuggaccucaacauggagacccugaacaugugcaugccgcuguccugcaccaagaacaacagccaccacuacauccgggucggcaacgacaccggccucgagcugacgcugaccaacaccuccauccucaaccacaaguucugcaaccugagcgacgcccacaagaaggaccuguacgaccacgcccucauguccaucaucagcaccuuccaccuguccauccccaacuucaaccaguacgaggccaugagcugcgacuucaacgggggcaagaucuccgugcaguacaaccugagccacuccuacgccaucgacgcggccaaccacugcgggacgguggccaacggcauccuccagaccuucaugcgcauggccuggggcgggagcuacaucgcgcuggacuccggccgggggaacugggacugcaucaugaccagcuaccaguaccugaucauccagaacaccacgugggagaaccacugccaguucucccgccccagccccaucggcuaccucgggcugcugagccagcggacccgcgacaucuacaucucccggcgccuccugggcaccuucaccuggacgcugagcgacuccgagggcaacgccacccccgggggcuacugccucacccgguggaugcugaucgaggccgagcugaagugcuucgggaacaccgccgucgccaagugcaacgagaagcacgacgaggaguucugcgacaugcuccgccuguucgacuucugcaagcaggcgaucagccggcugaaguccgaggcccagaugagcauccagcucaucaacaaggccgugaacgcccugaucaacgaccagcugaucaugaagaaccaccuccgcgacaucaugggcauccccuacugcaacuacuccaaguacugguaccugaaccacacgaucaccgggaagaccagccugcccaagugcuggcucguguccaacggcagcuaccugaacgagacccacuucuccgacgacaucgagcagcaggccgacaacaugaucacggagaugcugcagaaggaguacauggagcggcagggcaagaccccgcuggggcucgucgaccuguucguguucagcaccuccuucuaccugaucagcaucuuccuccgccuggugaagaucccgacccaccggcacaucgucggcaagcccugccccaagccccaccgccugaaccacauggggaucugcuccugcggccucuacaagcagccgggggugcccgugcgguggaagcgcugaggacuaguuauaagacugacuagcccgaugggccucccaacgggcccuccuccccuccuugcaccgagauuaauaaaaaaaaaaaaaaaaaaaaaaaaaaaaaaaaaaaaaaaaaaaaaaaaaaaaaaaaaaaaaaaaaaaaaaaaaaaaaaaaaaaaaaaaaaaaaaaaaaaa

SEQ ID NO: 38122 - RNA, 1662 nt, Artificial Sequence
  mRNA product Design i-3 (A100) comprising derived and/or modified sequence from LASV(Togo/2016/7082;Clade VI)__AMR44577__GPCmut10 (opt1)
aggagaaagcuuaccaugggccagaucaucaccuucuuccaggaggugccccacgucaucgaggaggugaugaacaucgugcugaucgcccucagccugcuggccauccucaagggggucuacaacguggcgaccugcggcaucaucgggcuggugacguuccuguuccucugcggccgcuccugcagccugaucuacaagggguccuacgagcugcagacccucgagcugaacauggagacccugaacaugugcaugccgcucagcugcaccaagaacuccagccaccacuacauccgggucggcaacgagacgggccuggagcugacccucaccaacaccuccaucaucaaccacaaguucugcaaccugagcgacgcccacaagcgcaaccuguacgaccacgcccucauguccauccugagcacguuccaccuguccauccccaacuucaaccaguacgaggccaugagcugcgacuucaacgggggcaagaucuccgugcaguacaaccucagccacgccuacgcgguggacgccgccgagcacugcgggaccgucgccaacggcgugcugcagaccuucaugcggauggcguggggcggguccuacaucgcccuggacagcggccgcgggaacugggacugcaucaugaccuccuaccaguaccucaucauccagaacacgaccugggaggaccacugccaguucagccggcccucccccaucggcuaccuggggcugcucagccagcgcacccgggacaucuacaucagccgccggcugcugggcaccuucacguggacccucuccgacagcgagggcaacgagacccccgggggcuacugccugacccgcuggaugcugaucgaggccgagcucaagugcuucgggaacacggccguggccaagugcaacgagaagcacgacgaggaguucugcgacaugcugcggcuguucgacuucugcaagcaggcgauccagcgccucaaguccgaggcccagaugagcauccagcugaucaacaaggccgucaacgcccugaucaacgaccagcucaucaugaagaaccaccuccgggacaugaugggcauccccuacugcaacuacuccaaguacugguaccugaaccacaccagcuccgggcgcaccagccugcccaagugcuggcugguguccaacggcagcuaccugaacgagacccacuucuccgacgacaucgagcagcaggccgacaacaugaucacggagaugcuccagaaggaguacaucgaccggcagggcaagaccccgcuggggcugguggaccuguucgucuucagcaccuccuucuaccucaucagcaucuuccugcaccugaucaagaucccgacccaccgccacaucgugggcaagcccugccccaagccccaccggcucaaccacauggggaucugcuccugcggccuguacaagcagccgggggugcccacgcgcuggaagcggugaggacuaguuauaagacugacuagcccgaugggccucccaacgggcccuccuccccuccuugcaccgagauuaauaaaaaaaaaaaaaaaaaaaaaaaaaaaaaaaaaaaaaaaaaaaaaaaaaaaaaaaaaaaaaaaaaaaaaaaaaaaaaaaaaaaaaaaaaaaaaaaaaaaa

SEQ ID NO: 38123 - RNA, 1662 nt, Artificial Sequence
  mRNA product Design i-3 (A100) comprising derived and/or modified sequence from LASV(KAK-428;Clade n.d. (VII))__ANH09740__GPCmut10 (opt1)
aggagaaagcuuaccaugggccagaucgugaccuucuuccaggaggucccccacgugaucgaggaggugaugaacaucguccugaucgcccucagccugcuggccauccucaaggggcuguacaacuucgcgaccugcggcgugaucgggcugaucacguuccuccugcugugcggccgcuccugcagcgccaccuacaaggggcaguacgagcuccagacccuggagcugaacauggagucccucaacaugugcaugccgcugagcugcaccaagaacaacucccaccacuacauccgggccggcaacaacacgggccuggagcucacccugaccaacaccagcaucaucucccacaaguucugcaaccugagcgacgcccacaagaagaaccucuacgaccacacgcugauguccaucaucaccaccuuccaccugagcauccccaacuucaaccaguacgaggccauguccugcgacuucaacgggggcaagaucagcauccaguacaaccucucccacagcuacgcgggggacgccgcccagcacugcggcaccguggccaacgggguccugcagacguucaugcgcauggcguggggcggcuccuaccuggcccucgacagcgggcggcgcggcugggacugcaucaucuccagcuaccaguaccugaucauccagaacaccaccugggacgaccacugccaguucucccggcccagccccaucggguaccugggcuucgugagccagaagacccgcgacaucuacaucucccggcgccuccugggcacguucaccuggacccugagcgacuccgaggggcacgacaugccgggcggguacugccucacccgguggaugcugaucgaggccgaccugaagugcuucggcaacacggccguggccaagugcaacgagaagcacgacgaggaguucugcgacauguggcgccucuucgacuucugcaagcaggcgauccagcggcugaaggccgaggcccagaugaacauccagcugaucaacaaggccgucaacgcccucaucaacgaccagcugaugaugaagaaccaccuccgcgacaucauggggauccccuacugcaacuacagcaaguucugguaccugaacaacaccaccaccggccggacgucccugccccgcugcuggcugaucagcaacggcuccuaccucaacgagacccacuucagcgacgacaucgagcagcaggcggacaacaugaucaccgagaugcugcagaaggaguacauggaccggcaggggaagacgccccugggccucguggaccuguucguguucuccaccagcuucuaccugaucaccaucuuccugcaccucgucaagaucccgacccaccgccacaucguggggaagcccugccccaagccccaccggcugaaccacaugggcaucugcuccugcgggcuguacaagcagccgggcgugcccguccgcuggaagcggugaggacuaguuauaagacugacuagcccgaugggccucccaacgggcccuccuccccuccuugcaccgagauuaauaaaaaaaaaaaaaaaaaaaaaaaaaaaaaaaaaaaaaaaaaaaaaaaaaaaaaaaaaaaaaaaaaaaaaaaaaaaaaaaaaaaaaaaaaaaaaaaaaaaa

SEQ ID NO: 38124 - RNA, 1662 nt, Artificial Sequence; identical to SEQ ID NO: 38118
  mRNA product Design i-3 (A100) comprising derived and/or modified sequence from LASV(Pinneo-NIG-1969;Clade I)__AIT17836__GPCmut10 (opt1)

SEQ ID NO: 38125 - RNA, 1662 nt, Artificial Sequence
  mRNA product Design i-3 (A100) comprising derived and/or modified sequence from LASV(ISTH0009-NIG-2011;Clade II)__AIT17404__GPCmut10 (opt1)
aggagaaagcuuaccaugggccagaucaucaccuucuuccaggaggugccccacgucaucgaggaggugaugaacaucgugcugaucgcccucagccugcuggccauccucaaggggaucuacaacgucgcgaccugcggccuguucgggcugguguccuuccuccugcugugcggccgcagcugcuccacgaccuacaaggggguguacgagcuccagacccuggagcuggacauggccagccucaacaugugcaugccgcuguccugcaccaagaacaacagccaccacuacaucauggucggcaacgagacgggccuggagcucacccugaccaacaccuccaucaucaaccacaaguucugcaaccugagcgacgcccacaagaagaaccucuacgaccacgcccugauguccaucaucagcacguuccaccuguccauccccaacuucaaccaguacgaggccaugagcugcgacuucaacgggggcaagaucuccgugcaguacaaccucagccacgcguacgccguggacgccgccaaccacugcgggaccaucgcgaacggcguccugcagaccuucaugcggauggccuggggcggguccuacaucgcccuggacagcggcaagggguccugggacugcaucaugaccagcuaccaguaccucaucauccagaacacgaccugggaggaccacugccaguucucccgccccagccccaucggcuaccuggggcugcucagccagcggacccgcgacaucuacaucucccggcgccugcugggcaccuucacguggacccucagcgacuccgagggcaacgagacccccgggggcuacugccugacccgguggaugcugaucgaggccgagcucaagugcuucgggaacacggccguggcgaagugcaacgagaagcacgacgaggaguucugcgacaugcugcgccuguucgacuucugcaagcaggccauccggcgccucaagaccgaggcccagaugagcauccagcugaucaacaaggccgugaacgcccugaucaacgaccagcucaucaugaagaaccaccuccgggacaucaugggcauccccuacugcaacuacuccaaguacugguaccugaaccacaccgucaccgggaagacgagccugccccgcugcuggcugguguccaacggcagcuaccugaacgagacccacuucuccgacgacaucgagcagcaggcggacaacaugaucaccgagcuccugcagaaggaguacauggaccggcagggcaagaccccgcuggggcugguggaccucuucgucuucagcacguccuucuaccugaucagcaucuuccugcaccucaucaagaucccgacccaccgccacaucaccggcaagcccugccccaagccccaccggcugaaccacauggggaucugcuccugcggccuguacaagcacccgggggugcccgugaaguggaagcgcugaggacuaguuauaagacugacuagcccgaugggccucccaacgggcccuccuccccuccuugcaccgagauuaauaaaaaaaaaaaaaaaaaaaaaaaaaaaaaaaaaaaaaaaaaaaaaaaaaaaaaaaaaaaaaaaaaaaaaaaaaaaaaaaaaaaaaaaaaaaaaaaaaaaa

SEQ ID NO: 38126 - RNA, 1662 nt, Artificial Sequence
  mRNA product Design i-3 (A100) comprising derived and/or modified sequence from LASV(ISTH2010-NIG-2012;Clade II)__AIT17482__GPCmut10 (opt1)
aggagaaagcuuaccaugggccagaucaucaccuucuuccaggaggugccccacgucaucgaggaggugaugaacaucgugcugaucgcccucagccugcuggccauccucaaggggaucuacaacgucgcgaccugcggccuguucgggcugguguccuuccuccugcugugcggccgcagcugcuccacgaccuacaaggggguguacgagcuccagacccuggagcuggacauggccagccucaacaugugcaugccgcuguccugcaccaagaacaacagccaccacuacaucauggucggcaacgagacgggccuggagcucacccugaccaacaccuccaucaucaaccacaaguucugcaaccugagcgacgcccacaagaagaaccucuacgaccacgcccugauguccaucaucagcacguuccaccuguccauccccaacuucaaccaguacgaggccaugagcugcgacuucaacgggggcaagaucuccgugcaguacaaccucagccacgcguacgccguggacgccgccaaccacugcgggaccaucgcgaacggcguccugcagaccuucaugcggauggccuggggcggguccuacaucgcccuggacagcggcaagggguccugggacugcaucaugaccagcuaccaguaccucaucauccagaacaucacgugggaggaccacugccaguucucccgccccagccccaucggcuaccuggggcugcucagccagcggacccgcgacaucuacaucucccggcgccugcugggcaccuucaccuggacgcucagcgacuccgagggcaacgagacccccgggggcuacugccugacccgguggaugcugaucgaggccgagcucaagugcuucgggaacaccgccguggcgaagugcaacgagaagcacgacgaggaguucugcgacaugcugcgccuguucgacuucugcaagcaggccauccggcgccucaagacggaggcccagaugagcauccagcugaucaacaaggccgugaacgcccugaucaacgaccagcucaucaugaagaaccaccuccgggacaucaugggcauccccuacugcaacuacuccaaguacugguaccugaaccacaccgucaccgggaagaccagccugccccgcugcuggcugguguccaacggcagcuaccugaacgagacgcacuucuccgacgacaucgagcagcaggcggacaacaugaucaccgagcuccugcagaaggaguacaucgaccggcagggcaagaccccgcuggggcugguggaccucuucgucuucagcaccuccuucuaccugaucagcaucuuccugcaccucgugaagaucccgacgcaccgccacguggucggcaagcccugccccaagccccaccggcugaaccacauggggaucugcuccugcggccuguacaagcacccgggggugcccgugaaguggaagcgcugaggacuaguuauaagacugacuagcccgaugggccucccaacgggcccuccuccccuccuugcaccgagauuaauaaaaaaaaaaaaaaaaaaaaaaaaaaaaaaaaaaaaaaaaaaaaaaaaaaaaaaaaaaaaaaaaaaaaaaaaaaaaaaaaaaaaaaaaaaaaaaaaaaaa

SEQ ID NO: 38127 - RNA, 1662 nt, Artificial Sequence
  mRNA product Design i-3 (A100) comprising derived and/or modified sequence from LASV(Lassa virus/H.sapiens-wt/NGA/2015/ISTH_0543;Clade II)__AVO03639__GPCmut10 (opt1)
aggagaaagcuuaccaugggccagaucaucaccuucuuccaggaggugccccacgucaucgaggaggugaugaacaucgugcugaucgcccucagccugcuggccauccucaaggggaucuacaacgucgcgaccugcggccuguucgggcugguguccuuccuccugcugugcggccgcagcugcuccacgaccuacaaggggguguacgagcuccagacccuggagcuggacauggccaaccucaacaugugcaugccgcugagcugcaccaagaacaacucccaccacuacaucauggucggcaacgagacgggccuggagcucacccugaccaacaccagcaucaucaaccacaaguucugcaaccuguccgacgcccacaagaagaaccucuacgaccacgcccugaugagcaucaucuccacguuccaccugagcauccccaacuucaaccaguacgaggccauguccugcgacuucaacgggggcaagaucagcgugcaguacaaccucucccacaccuacgcgguggacgccgccaaccacugcgggaccaucgccaacggcguccugcagaccuucaugcggauggcguggggcgggagcuacaucgcccuggacuccggcaaggggagcugggacugcaucaugacguccuaccaguaccucgugauccagaacaccaccugggaggaccacugccaguucagccgccccucccccaucggcuaccuggggcugcucagccagcggacccgcgacaucuacaucagccggcgccugcugggcacguucaccuggacccucuccgacagcgagggcaacgagacccccgggggcuacugccugacgcgguggaugcugaucgaggccgagcucaagugcuucgggaacaccgccguggccaagugcaacgagaagcacgacgaggaguucugcgacaugcugcgccuguucgacuucugcaagcaggcgauccggcgccucaagaccgaggcccagauguccauccagcugaucaacaaggccgucaacgcccugaucaacgaccagcucaucaugaagaaccaccuccgggacaucaugggcaucccguacugcaacuacagcaaguacugguaccugaaccacaccgugacggggaagaccucccugccccgcugcuggcuggugagcaacggcuccuaccugaacgagacccacuucagcgacgacaucgagcagcaggccgacaacaugaucaccgagcuccugcagaaggaguacaucgaccggcagggcaagacgccccuggggcuggucgaccucuucguguucuccaccagcuucuaccugaucuccaucuuccugcaccucgugaagaucccgacccaccgccacaucaccggcaagcccugccccaagccccaccggcugaaccacauggggaucugcagcugcggccuguacaagcacccggggguccccgugaaguggaagcgcugaggacuaguuauaagacugacuagcccgaugggccucccaacgggcccuccuccccuccuugcaccgagauuaauaaaaaaaaaaaaaaaaaaaaaaaaaaaaaaaaaaaaaaaaaaaaaaaaaaaaaaaaaaaaaaaaaaaaaaaaaaaaaaaaaaaaaaaaaaaaaaaaaaaa

SEQ ID NO: 38128 - RNA, 1662 nt, Artificial Sequence
  mRNA product Design i-3 (A100) comprising derived and/or modified sequence from LASV(Lassa virus/H.sapiens-wt/NGA/2016/ISTH_0009;Clade II)__AVO03571__GPCmut10 (opt1)
aggagaaagcuuaccaugggccagaucaucaccuucuuccaggaggugccccacgucaucgaggaggugaugaacaucgugcugaucgcccucagccugcuggccauccucaaggggaucuacaacgucgcgaccugcggccugcuggggcucguguccuuccugcugcucugcggccgcagcugcuccacgaccuacaaggggguguacgagcugcagacccuggagcucgacauggccagccugaacaugugcaugccgcuguccugcaccaagaacaacagccaccacuacaucauggucggcaacgagacgggccucgagcugacccugaccaacaccuccaucaucaaccacaaguucugcaaccucagcgacgcccacaagaagaaccuguacgaccacgcccugauguccaucaucagcacguuccaccucuccauccccaacuucaaccaguacgaggccaugagcugcgacuucaacgggggccggaucuccgugcaguacaaccugagccacuccuacgcgguggacgccgccaaccacugcgggaccaucgccaacggcguccugcagaccuucaugcgcauggcguggggcgggagcuacaucgcccucgacuccggcaaggggagcugggacugcaucaugaccuccuaccaguaccugaucauccagaacacgaccugggaggaccacugccaguucagccggcccagccccaucggcuaccuggggcuccugucccagcgcacccgggacaucuacaucagccgccggcugcucggcaccuucacguggacccuguccgacagcgagggcaacgagacccccgggggcuacugccugacccgcuggaugcucaucgaggccgagcugaagugcuucgggaacacggccguggccaagugcaacgagaagcacgacgaggaguucugcgacaugcugcggcuguucgacuucugcaagcaggcgauccgccggcugaagaccgaggcccagauguccauccagcugaucaacaaggccgugaacgcccucaucaacgaccagcugaucaugaagaaccaccuccgcgacaucaugggcauccccuacugcaacuacagcaaguacugguaccucaaccacaccgucaccgggaagacgucccugccccggugcuggcuggugagcaacggcuccuaccucaacgagacccacuucagcgacgacaucgagcagcaggccgacaacaugaucaccgagcugcugcagaaggaguacaucgaccgccagggcaagaccccgcuggggcucguggaccuguucgucuucuccacgagcuucuaccugaucuccaucuuccuccaccuggugaagaucccgacccaccggcacaucaccggcaagcccugccccaagccccaccgccugaaccacauggggaucugcagcugcggccucuacaaccacccgggggugcccgucaaguggaagcggugaggacuaguuauaagacugacuagcccgaugggccucccaacgggcccuccuccccuccuugcaccgagauuaauaaaaaaaaaaaaaaaaaaaaaaaaaaaaaaaaaaaaaaaaaaaaaaaaaaaaaaaaaaaaaaaaaaaaaaaaaaaaaaaaaaaaaaaaaaaaaaaaaaaa

SEQ ID NO: 38129 - RNA, 1662 nt, Artificial Sequence
  mRNA product Design i-3 (A100) comprising derived and/or modified sequence from LASV(Lassa virus/H.sapiens-wt/NGA/2016/ISTH_0017;Clade II)__AVO03567__GPCmut10 (opt1)
aggagaaagcuuaccaugggccagaucaucaccuucuuccaggaggugccccacgucaucgaggaggugaugaacaucgugcugaucgcccucagccugcuggccauccucaaggggaucuacaacgucgcgaccugcggccuguucgggcugguguccuuccuccugcugugcggccgcagcugcuccacgaccuacaaggggguguacgagcuccagacccuggagcuggacauggccagccucaacaugugcaugccgcuguccugcaccaagaacaacagccaccacuacaucauggucggcaacgagacgggccuggagcucacccugaccaacaccuccaucaucaaccacaaguucugcaaccugagcgacgcccacaagaagaaccucuacgaccacgcccugauguccaucaucagcacguuccaccuguccauccccaacuucaaccaguacgaggccaugagcugcgacuucaacgggggcaagaucuccgugcaguacaaccucagccacaccuacgcgaucgacgccgccaaccacugcgggaccaucgccaacggcgugcugcagaccuucaugcggauggcguggggcggguccuacaucgcccuggacagcggcaagggguccugggacugcaucaugacgagcuaccaguaccucaucauccagaacaccaccugggaggaccacugccaguucucccgccccagccccaucggcuaccuggggcugcucagccagcggacccgcgacaucuacaucucccggcgccugcugggcacguucaccuggacccucagcgacuccgagggcaacgagacccccgggggcuacugccugacgcgguggaugcugaucgaggccgagcucaagugcuucgggaacaccgccgucgccaagugcaacgagaagcacgacgaggaguucugcgacaugcugcgccuguucgacuucugcaagcaggcgauccggcgccucaagaccgaggcccagaugagcauccagcugaucaacaaggccgugaacgcccugaucaacgaccagcucaucaugaagaaccaccuccgggacaucaugggcaucccguacugcaacuacuccaaguacugguaccugaaccacaccgugacggggaagaccagccugccccgcugcuggcuggucuccaacggcagcuaccugaacgagacccacuucuccgacgacaucgagcagcaggccgacaacaugaucaccgagcuccugcagaaggaguacauggaccggcagggcaagacgccccuggggcugguggaccucuucguguucagcaccuccuucuaccugaucagcaucuuccugcaccucguccgcaucccgacccaccggcacgugaucggcaagcccugccccaagccccaccgccugaaccacauggggaucugcuccugcggccuguacaagcacccgggggugcccgucaaguggaagcggugaggacuaguuauaagacugacuagcccgaugggccucccaacgggcccuccuccccuccuugcaccgagauuaauaaaaaaaaaaaaaaaaaaaaaaaaaaaaaaaaaaaaaaaaaaaaaaaaaaaaaaaaaaaaaaaaaaaaaaaaaaaaaaaaaaaaaaaaaaaaaaaaaaaa

SEQ ID NO: 38130 - RNA, 1662 nt, Artificial Sequence
  mRNA product Design i-3 (A100) comprising derived and/or modified sequence from LASV(Lassa virus/H.sapiens-wt/NGA/2018/ISTH_0959;Clade II)__AVV65099__GPCmut10 (opt1)
aggagaaagcuuaccaugggccagaucaucaccuucuuccaggaggugccccacgucaucgaggaggugaugaacaucgugcugaucgcccucagccugcuggccauccucaaggggaucuacaacgucgugaccugcggccuguucgggcugguguccuuccuccugcugugcggccgcagcugcuccacgaccuacaagggggucuacgagcuccagacccuggagcuggacauggcgagccucaacaugugcaugccgcuguccugcaccaagaacaacagccaccacuacaucauggugggcaacgagacgggccuggagcucacccugaccaacaccuccaucaucaaccacaaguucugcaaccugagcgacgcccacaagaagaaccucuacgaccacgcccugauguccaucaucagcacguuccaccuguccauccccaacuucaaccaguacgaggccaugagcugcgacuucaacgggggcaagaucuccgugcaguacaaccucagccacgccuacgcgaucgacgccgccaaccacugcgggaccaucgccaacggcguccugcagaccuucaugcggauggcguggggcggguccuacaucgcccuggacagcggcaagggguccugggacugcaucaugaccagcuaccaguaccucaucauccagaacacgaccugggaggaccacugccaguucucccgccccagccccaucggcuaccuggggcugcucagccagcggacccgcgacaucuacaucucccggcgccugcugggcaccuucacguggacccucagcgacuccgagggcaacgagacccccgggggcuacugccugacccgguggaugcugaucgaggccgagcucaagugcuucgggaacacggccguggccaagugcaacgagaagcacgacgaggaguucugcgacaugcugcgccuguucgacuucugcaagcaggcgauccggcgccucaagaccgaggcccagaugagcauccagcugaucaacaaggccgugaacgcccugaucaacgaccagcucaucaugaagaaccaccuccgggacaucaugggcauccccuacugcaacuacuccaaguacugguaccugaaccacaccgucaccgggaagacgagccugccccgcugcuggcugguguccaacggcagcuaccugaacgagacccacuucuccgacgacaucgagcagcaggccgacaacaugaucaccgagcuccugcagaaggaguacaucgaccggcagggcaagaccccgcuggggcugguggaccucuucgucuucagcacguccuucuaccugaucagcaucuuccugcaccucgugaagaucccgacccaccgccacgugaucggcaagcccugccccaagccccaccggcugaaccacauggggaucugcuccugcggccuguacaagcacccggggguccccgugaaguggaagcgcugaggacuaguuauaagacugacuagcccgaugggccucccaacgggcccuccuccccuccuugcaccgagauuaauaaaaaaaaaaaaaaaaaaaaaaaaaaaaaaaaaaaaaaaaaaaaaaaaaaaaaaaaaaaaaaaaaaaaaaaaaaaaaaaaaaaaaaaaaaaaaaaaaaaa

SEQ ID NO: 38131 - RNA, 1662 nt, Artificial Sequence
  mRNA product Design i-3 (A100) comprising derived and/or modified sequence from LASV(LASV003-NIG-2008;Clade II)__AIT17580__GPCmut10 (opt1)
aggagaaagcuuaccaugggccagaucaucaccuucuuccaggaggugccccacgucaucgaggaggugaugaacaucgugcugaucgcccucagccugcuggccauccucaaggggaucuacaacgucgcgaccugcggccuguucgggcugguguccuuccuccugcugugcggccgcagcugcuccacgaccuacaaggggguguacgagcuccagacccuggagcuggacauggccagccucaacaugugcaugccgcuguccugcaccaagaacaacagccaccacuacaucauggucggcaacgagacgggccuggagcucacccugaccaacaccuccaucaucaaccacaaguucugcaaccugagcgacgcccacaagaagaaccucuacgaccacgcccugauguccaucaucagcacguuccaccuguccauccccaacuucaaccaguacgaggccaugagcugcgacuucaacgggggcaagaucuccgugcaguacaaccucagccacaccuacgcgguggacgccgccaaccacugcgggaccaucgccaacggcguccugcagaccuucaugcggauggcguggggcggguccuacaucgcccuggacagcggcaagggguccugggacugcaucaugacgagcuaccaguaccucaucauccagaacaccaccugggaggaccacugccaguucucccgccccagccccaucggcuaccuggggcugcucagccagcggacccgcgacaucuacaucucccggcgccugcugggcacguucaccuggacccucagcgacuccgagagcaacgagaccccgggcggguacugccugacgcgguggaugcugaucgaggccgagcucaagugcuucggcaacaccgccguggccaagugcaacgagaagcacgacgaggaguucugcgacaugcugcgccuguucgacuucugcaagcaggcgauccggcgccucaaggccgaggcccagauguccauccagcugaucaacaaggccgugaacgcccugaucaacgaccagcucaucaugaagaaccaccuccgggacaucauggggauccccuacugcaacuacagcaaguacugguaccugaaccacaccgucaccggccgcacgucccugccccggugcuggcuggugagcaacggguccuaccugaacgagacccacuucagcgacgacaucgagcagcaggcggacaacaugaucaccgagcuccugcagaaggaguacauggaccgccagggcaagacgccccugggccugguggaccucuucgucuucuccaccagcuucuaccugaucuccaucuuccugcaccucgugaagaucccgacccaccggcacgugaucgggaagcccugccccaagccccaccgccugaaccacaugggcaucugcagcugcgggcuguacaagcacccgggcguccccgugaaguggaagcggugaggacuaguuauaagacugacuagcccgaugggccucccaacgggcccuccuccccuccuugcaccgagauuaauaaaaaaaaaaaaaaaaaaaaaaaaaaaaaaaaaaaaaaaaaaaaaaaaaaaaaaaaaaaaaaaaaaaaaaaaaaaaaaaaaaaaaaaaaaaaaaaaaaaa

SEQ ID NO: 38132 - RNA, 1662 nt, Artificial Sequence
  mRNA product Design i-3 (A100) comprising derived and/or modified sequence from LASV(LASV035-NIG-2009;Clade II)__AIT17588__GPCmut10 (opt1)
aggagaaagcuuaccaugggccagaucaucaccuucuuccaggaggugccccacgucaucgaggaggugaugaacaucgugcugaucgcccucagccugcuggccauccucaaggggaucuacaacgucgcgaccugcggccuguucgggcugguguccuuccuccugcugugcggccgcagcugcuccacgaccuacaaggggguguacgagcuccagacccuggagcuggacauggccagccucaacaugugcaugccgcuguccugcaccaagaacaacagccaccacuacaucauggucggcaacgagacgggccuggagcucacccugaccaacaccuccaucaucaaccacaaguucugcaaccugagcgacgcccacaagaagaaccucuacgaccacgcccugauguccaucaucagcacguuccaccuguccauccccaacuucaaccaguacgaggccaugagcugcgacuucaacgggggcaagaucuccgugcaguacaaccucagccacgcguacgccguggacgccgccaaccacugcgggaccaucgcgaacggcguccugcagaccuucaugcggauggccuggggcggguccuacaucgcccuggacagcggcaagggguccugggacugcaucaugaccagcuaccaguaccucaucauccagaacacgaccugggaggaccacugccaguucucccgccccagccccaucggcuaccuggggcugcucagccagcggacccgcgacaucuacaucucccggcgccugcugggcaccuucacguggacccucagcgacuccgagggcaacgagacccccgggggcuacugccugacccgguggaugcugaucgaggccgagcucaagugcuucgggaacacggccguggcgaagugcaacgagaagcacgacgaggaguucugcgacaugcugcgccuguucgacuucugcaagcaggccauccggcgccucaaggccgaggcccagaugagcauccagcugaucaacaaggccgugaacgcgcugaucaacgaccagcucaucaugaagaaccaccuccgggacaucaugggcauccccuacugcaacuacuccaaguacugguaccugaaccacaccgucaccgggaagaccagccugccccgcugcuggcugguguccaacggcagcuaccugaacgagacgcacuucuccgacgacaucgagcagcaggccgacaacaugaucaccgagcuccugcagaaggaguacaucgaccggcagggcaagaccccgcuggggcugguggaccucuucgucuucagcaccuccuucuaccugaucagcaucuuccugcaccucgugaagaucccgacgcaccgccacgugaucggcaagcccugccccaagccccaccggcugaaccacauggggaucugcuccugcggccuguacaagcacccggggguccccgugaaguggaagcgcugaggacuaguuauaagacugacuagcccgaugggccucccaacgggcccuccuccccuccuugcaccgagauuaauaaaaaaaaaaaaaaaaaaaaaaaaaaaaaaaaaaaaaaaaaaaaaaaaaaaaaaaaaaaaaaaaaaaaaaaaaaaaaaaaaaaaaaaaaaaaaaaaaaaa

SEQ ID NO: 38133 - RNA, 1662 nt, Artificial Sequence
  mRNA product Design i-3 (A100) comprising derived and/or modified sequence from LASV(LASV1000-NIG-2009;Clade II)__AIT17782__GPCmut10 (opt1)
aggagaaagcuuaccaugggccagaucaucaccuucuuccaggaggugccccacgucaucgaggaggugaugaacaucgugcugaucgcccucagccugcuggccauccucaaggggaucuacaacgucgcgaccugcggccuguucgggcugguguccuuccuccugcugugcggccgcagcugcuccacgaccuacaaggggguguacgagcuccagacccuggagcuggacauggccagccucaacaugugcaugccgcuguccugcaccaagaacaacagccaccacuacaucauggucggcaacgagacgggccuggagcucacccugaccaacaccuccaucaucaaccacaaguucugcaaccugagcgacgcccacaagaagaaccucuacgaccacgcccugauguccaucaucagcacguuccaccuguccauccccaacuucaaccaguacgaggccaugagcugcgacuucaacgggggcaagaucuccgugcaguacaaccucagccacaccuacgcgguggacgccgccaaccacugcgggaccaucgccaacggcguccugcagaccuucaugcggauggcguggggcggguccuacaucgcccuggacagcggcaagggguccugggacugcaucaugacgagcuaccaguaccucaucauccagaacaccaccugggaggaccacugccaguucucccgccccagccccaucggcuaccuggggcugcucagccagcggacccgcgacaucuacaucucccggcgccugcugggcacguucaccuggacccucagcgacuccgagggcaacgagacccccgggggcuacugccugacgcgguggaugcugaucgaggccgagcucaagugcuucgggaacaccgccguggccaagugcaacgagaagcacgacgaggaguucugcgacaugcugcgccuguucgacuucugcaagcaggcgaucaagcggcucaagaccgaggcccagaugagcauccagcugaucaacaaggccgugaacgcccugaucaacgaccagcucaucaugaagaaccaccuccgcgacaucaugggcaucccguacugcaacuacuccaaguacugguaccugaaccacaccgucacggggaagaccagccugccccggugcuggcugguguccaacggcagcuaccugaacgagacccacuucuccgacgacaucgagcagcaggccgacaacaugaucaccgagcuccugcagaaggaguacaucgaccgccagggcaagacgccccuggggcugguggaccucuucgucuucagcaccuccuucuaccugaucagcaucuuccugcaccucgugaagaucccgacccaccggcacguggucggcaagcccugccccaagccccaccgccugaaccacauggggaucugcuccugcggccuguacaagcacccgggggugcccgugaaguggaagcggugaggacuaguuauaagacugacuagcccgaugggccucccaacgggcccuccuccccuccuugcaccgagauuaauaaaaaaaaaaaaaaaaaaaaaaaaaaaaaaaaaaaaaaaaaaaaaaaaaaaaaaaaaaaaaaaaaaaaaaaaaaaaaaaaaaaaaaaaaaaaaaaaaaaa

SEQ ID NO: 38134 - RNA, 1662 nt, Artificial Sequence
  mRNA product Design i-3 (A100) comprising derived and/or modified sequence from LASV(LASV221-NIG-2010;Clade II)__AIT17624__GPCmut10 (opt1)
aggagaaagcuuaccaugggccagaucaucaccuucuuccaggaggugccccacgucaucgaggaggugaugaacaucgugcugaucgcccucagccugcuggccauccucaaggggaucuacaacgucgcgaccugcggccuguucgggcugguguccuuccuccugcugugcggccgcagcugcuccacgaccuacaaggggguguacgagcuccagacccuggagcuggacauggccagccucaacaugugcaugccgcuguccugcaccaagaacaacagccaccacuacaucauggucggcaacgagacgggccuggagcucacccugaccaacaccuccaucaucaaccacaaguucugcaaccugagcgacgcccacaagaagaaccucuacgaccacgcccugauguccaucaucagcacguuccaccuguccauccccaacuucaaccaguacgaggccaugagcugcgacuucaacgggggcaagaucuccgugcaguacaaccucagccacaccuacgcgaucgacgccgccaaccacugcgggaccaucgccaacggcgugcugcagaccuucaugcggauggcguggggcggguccuacaucgcccuggacagcggcaagggguccugggacugcaucaugacgagcuaccaguaccucaucauccagaacaccaccugggaggaccacugccaguucucccgccccagccccaucggcuaccuggggcugcucagccagcggacccgcgacaucuacaucucccggcgccugcugggcacguucaccuggacccucagcgacuccgagggcaacgagacccccgggggcuacugccugacgcgguggaugcugaucgaggccgagcucaagugcuucgggaacaccgccgucgccaagugcaacgagaagcacgacgaggaguucugcgacaugcugcgccuguucgacuucugcaagcaggcgauccggcgccucaagaccgaggcccagaugagcauccagcugaucaacaaggccgugaacgcccugaucaacgaccagcucaucaugaagaaccaccuccgggacaucaugggcaucccguacugcaacuacuccaaguacugguaccugaaccacaccgugacggggaagaccagccugccccgcugcuggcuggucuccaacggcagcuaccugaacgagacccacuucuccgacgacaucgagcagcaggccgacaacaugaucaccgagaugcuccagaaggaguacauggaccggcagggcaagacgccccuggggcugguggaccuguucguguucagcaccuccuucuaccucaucagcaucuuccugcaccuggucaagaucccgacccaccgccacgugaucggcaagcccugccccaagccccaccggcucaaccacauggggaucugcuccugcggccuguacaagcacccgggggugcccgucaaguggaagcgcugaggacuaguuauaagacugacuagcccgaugggccucccaacgggcccuccuccccuccuugcaccgagauuaauaaaaaaaaaaaaaaaaaaaaaaaaaaaaaaaaaaaaaaaaaaaaaaaaaaaaaaaaaaaaaaaaaaaaaaaaaaaaaaaaaaaaaaaaaaaaaaaaaaaa

SEQ ID NO: 38135 - RNA, 1662 nt, Artificial Sequence
  mRNA product Design i-3 (A100) comprising derived and/or modified sequence from LASV(LASV237-NIG-2010;Clade II)__AIT17638__GPCmut10 (opt1)
aggagaaagcuuaccaugggccagaucaucaccuucuuccaggaggugccccacgucaucgaggaggugaugaacaucgugcugaucgcccucagccugcuggccauccucaaggggaucuacaacgucgcgaccugcggccuguucgggcugguguccuuccuccugcugugcggccgcagcugcuccacgaccuacaaggggguguacgagcuccagacccuggagcuggacauggccagccucaacaugugcaugccgcuguccugcaccaagaacaacagccaccacuacaucauggucggcaacgagacgggccuggagcucacccugaccaacaccuccaucaucaaccacaaguucugcaaccugagcgacgcccacaagaaggaccucuacgaccacgcccugauguccaucaucagcacguuccaccuguccauccccaacuucaaccaguacgaggccaugagcugcgacuucaacgggggcaagaucuccgugcaguacaaccucagccacaccuacgcgguggacgccgccaaccacugcgggaccaucgccaacggcguccugcagaccuucaugcggauggcguggggcggguccuacaucgcccuggacagcggcaagggguccugggacugcaucaugacgagcuaccaguaccucaucauccagaacaccaccugggaggaccacugccaguucucccgccccagccccaucggcuaccuggggcugcucagccagcggacccgcgacaucuacaucucccggcgccugcugggcacguucaccuggacccucagcgacuccgagggcaacgagacccccgggggcuacugccugacgcgguggaugcugaucgaggccgagcucaagugcuucgggaacaccgccguggccaagugcaacgagaagcacgacgaggaguucugcgacaugcugcgccuguucgacuucugcaagcaggcgauccggcgccucaagaccgaggcccagaugagcauccagcugaucaacaaggccgugaacgcccugaucaacgaccagcucaucaugaagaaccaccuccgggacaucaugggcaucccguacugcaacuacuccaaguacugguaccugaaccacaccgucacggggaagaccagccugccccgcugcuggcugguguccaacggcagcuaccugaacgagacccacuucuccgacgacaucgagcagcaggccgacaacaugaucaccgagcuccugcagaaggaguacauggaccggcagggcaagacgccccuggggcugguggaccucuucgucuucagcaccuccuucuaccugaucagcaucuuccugcaccucaucaagaucccgacccaccgccacaucaccggcaagcccugccccaagccccaccggcugaaccacauggggaucugcuccugcggccuguacaagcacccgggggugcccgugaaguggaagcgcugaggacuaguuauaagacugacuagcccgaugggccucccaacgggcccuccuccccuccuugcaccgagauuaauaaaaaaaaaaaaaaaaaaaaaaaaaaaaaaaaaaaaaaaaaaaaaaaaaaaaaaaaaaaaaaaaaaaaaaaaaaaaaaaaaaaaaaaaaaaaaaaaaaaa

SEQ ID NO: 38136 - RNA, 1662 nt, Artificial Sequence
  mRNA product Design i-3 (A100) comprising derived and/or modified sequence from LASV(LASV253-NIG-2011;Clade II)__AIT17670__GPCmut10 (opt1)
aggagaaagcuuaccaugggccagaucaucaccuucuuccaggaggugccccacgucaucgaggaggugaugaacaucgugcugaucgcccucagccugcuggccauccucaaggggaucuacaacgucgcgaccugcggccuguucgggcugguguccuuccuccugcugugcggccgcagcugcuccacgaccuacaaggggguguacgagcuccagacccuggagcuggacauggccagccucaacaugugcaugccgcuguccugcaccaagaacaacagccaccacuacaucauggucggcaacgagacgggccuggagcucacccugaccaacaccuccaucaucaaccacaaguucugcaaccugagcgacgcccacaagaagaaccucuacgaccacgcccugauguccaucaucagcacguuccaccuguccauccccaacuucaaccaguacgaggccaugagcugcgacuucaacgggggcaagaucuccgugcaguacaaccucagccacaccuacgcgguggacgccgccaaccacugcgggaccaucgccaacggcguccugcagaccuucaugcggauggcguggggcggguccuacaucgcccuggacagcggcaagggguccugggacugcaucaugacgagcuaccaguaccucaucauccagaacaccaccugggaggaccacugccaguucucccgccccagccccaucggcuaccuggggcugcucagccagcggacccgcgacaucuacaucucccggcgccugcugggcacguucaccuggacccucagcgacuccgagggcaacgagacccccgggggcuacugccugacgcgguggaugcugaucgaggccgagcucaagugcuucgggaacaccgccguggccaagugcaacgagaagcacgacgaggaguucugcgacaugcugcgccuguucgacuucugcaagcaggcgauccggcgccucaaggccgaggcccagaugagcauccagcugaucaacaaggccgugaacgcccugaucaacgaccagcucaucaugaagaaccaccuccgggacaucaugggcauccccuacugcaacuacuccaaguacugguaccugaaccacaccgucaccgggcgcacgagccugccccggugcuggcugguguccaacggcagcuaccugaacgagacccacuucuccgacgacaucgagcagcaggcggacaacaugaucaccgagcuccugcagaaggaguacaucgaccgccagggcaagaccccgcuggggcugguggaccucuucgucuucagcacguccuucuaccugaucagcaucuuccugcaccucgugaagaucccgacccaccggcacaucaucggcaagcccugccccaagccccaccgccugaaccacauggggaucugcuccugcggccuguacaagcacccgggggugcccgucaaguggaagcggugaggacuaguuauaagacugacuagcccgaugggccucccaacgggcccuccuccccuccuugcaccgagauuaauaaaaaaaaaaaaaaaaaaaaaaaaaaaaaaaaaaaaaaaaaaaaaaaaaaaaaaaaaaaaaaaaaaaaaaaaaaaaaaaaaaaaaaaaaaaaaaaaaaaa

SEQ ID NO: 38137 - RNA, 1662 nt, Artificial Sequence
  mRNA product Design i-3 (A100) comprising derived and/or modified sequence from LASV(LASV254-NIG-2011;Clade II)__AIT17674__GPCmut10 (opt1)
aggagaaagcuuaccaugggccagaucaucaccuucuuccaggaggugccccacgucaucgaggaggugaugaacaucgugcugaucgcccucagccugcuggccauccucaaggggaucuacaacgucgcgaccugcggccuguucgggcugguguccuuccuccugcugugcggccgcagcugcuccacgaccuacaaggggguguacgagcuccagacccuggagcuggacaugaccaaccucaacaugugcaugccgcugagcugcacgaagaacaacucccaccacuacaucauggucggcaacgagaccggccuggagcucacccugaccaacacgagcaucaucaaccacaaguucugcaaccuguccgacgcccacaagaagaaccucuacaaccacgcccugaugagcaucaucuccaccuuccaccugagcauccccaacuucaaccaguacgaggccauguccugcgacuucaacgggggcaagaucagcgugcaguacaaccucucccacagcuacgccguggacgcggccaaccacugcgggaccaucgccaacggcguccugcagaccuucaugcggauggccuggggcggguccuacaucgcgcuggacagcggcaaggggaacugggacugcaucaugacguccuaccaguaccucaucauccagaacaccaccugggaggaccacugccaguucagccgccccucccccaucggcuaccuggggcugcucagccagcggacccgcgacaucuacaucagccggcgccugcugggcacguucaccuggacccucuccgacagcgagggcaacgagacccccgggggcuacugccugacgcgguggaugcugaucgaggccgagcucaagugcuucgggaacaccgccguggccaagugcaacgagaagcacgacgaggaguucugcgacaugcugcgccuguucgacuucugcaagcaggccauccggcgccucaagaccgaggcgcaggccaacauccagcugaucaacaaggccgugaacgcccugaucaacgaccagcucaucaugaagaaccaccuccgggacaucaugggcaucccguacugcaacuacuccaaguacugguaccugaaccacaccgucacggggaagaccagccugccccgcugcuggcugguguccaacggcagcuaccugaacgagacccacuucuccgacgacaucgagcagcaggccgacaacaugaucaccgagcuccugcagaaggaguacauggaccggcagggcaagacgccccuggggcugguggaccucuucgucuucagcaccuccuucuaccugaucagcaucuuccugcaccucgugaagaucccgacccaccgccacgugaucggcaagcccugccccaagccccaccggcugaaccacauggggaucugcuccugcggccuguacaagcacccggggguccccgugaaguggaagcgcugaggacuaguuauaagacugacuagcccgaugggccucccaacgggcccuccuccccuccuugcaccgagauuaauaaaaaaaaaaaaaaaaaaaaaaaaaaaaaaaaaaaaaaaaaaaaaaaaaaaaaaaaaaaaaaaaaaaaaaaaaaaaaaaaaaaaaaaaaaaaaaaaaaaa

SEQ ID NO: 38138 - RNA, 1662 nt, Artificial Sequence
  mRNA product Design i-3 (A100) comprising derived and/or modified sequence from LASV(Nig08-A19;Clade III)__ADU56618__GPCmut10 (opt1)
aggagaaagcuuaccaugggccagaucgugaccuucuuccaggaggucccccacgugaucgaggaggugaugaacaucguccugaucgcccucagcauccuggccauccugaaggggcucuacaacaucgcgaccugcggccugaucgggcuggugacguuccuccugcuguccggccgcagcugcuccaugaccuacaaggggguguacgagcuccagacccuggagcugaacaugaacacccucaacaugugcaugccgcugagcugcacgaagaacaacucccaccacuacaucauggucggcaacgagaccggccuggagcucacccugaccaacacgagccugcuccaccacaaguucugcaaccuguccgacgcccacaagaagaaccuguacgaccacacccucaugagcaucaucuccaccuuccaccugagcauccccaacuucaaccaguacgaggccauguccugcgacuucaacgggggcaagaucaccgugcaguacaaccugagccacuccuacgccaucgacgccgcgaaccacugcgggacgguggccaacggcguccuccagaccuucaugcggauggccuggggcgggagcuacaucgcccuggacuccggccgcgggaagugggacugcaucaugaccagcuaccaguaccugaucauccagaacaccacgugggaggaccacugccaguucucccggcccagccccaucggcuaccucgggcugcugucccagcgcacccgggacaucuacaucagccgccggcuccugggcaccuucaccuggacgcugagcgacuccgagggcaacgagacccccgggggcuacugccucacccgcuggaugcugaucgaggcggagcugaagugcuucgggaacaccgccguggccaagugcaacgagaagcacgacgaggaguucugcgacaugcuccggcuguucgacuucugcaagcaggccauccgccggcugaaggccgaggcgcagaugagcauccagcucaucaacaaggccgugaacgcccugaucaacgaccagcugaucaugaagaaccaccuccgcgacaucaugggcauccccuacugcaacuacuccaaguacugguaccugaaccacacgagcaccgggcggaccucccugccccgcugcuggcucgucagcaacggcuccuaccugaacgagacccacuucagcgacgacaucgagcagcaggccgacaacaugaucacggagaugcugcagaaggaguaccuggaccggcagggcaagaccccgcucgggcugguggaccuguucguguucuccaccagcuucuaccucaucuccaucuuccugcaccuggucaagaucccgacccaccgccacaucgugggcaagcccugccccaagccccaccggcucaaccacauggggaucugcagcugcggccuguacaagcagccgggggugcccguccgcuggaagcggugaggacuaguuauaagacugacuagcccgaugggccucccaacgggcccuccuccccuccuugcaccgagauuaauaaaaaaaaaaaaaaaaaaaaaaaaaaaaaaaaaaaaaaaaaaaaaaaaaaaaaaaaaaaaaaaaaaaaaaaaaaaaaaaaaaaaaaaaaaaaaaaaaaaa

SEQ ID NO: 38139 - RNA, 1665 nt, Artificial Sequence
  mRNA product Design i-3 (A100) comprising derived and/or modified sequence from LASV(G1180-SLE-2010;Clade IV)__AIT17168__GPCmut10 (opt1)
aggagaaagcuuaccaugggccagaucgugaccuucuuccaggaggucccccacgugaucgaggaggugaugaacaucguccugaucgcccucagcauccuggccgugcugaaggggcucuacaacuucgcgaccugcggccugguggggcugcucacguuccugcugcucugcggccgcuccugcaccgccagccgguacaagggggucuacgagcugcagacccuggagcucaacauggagacccugaacaugugcaugccgcuguccugcacgaagaacaacagccaccacuacaucauggugggcaacgagaccggccucgagcugacccugaccaacacguccaucaucaaccacaaguucugcaaccucagcgacgcccacaagaagaaccuguacgaccacgcccugauguccaucaucagcaccuuccaccucuccauccccaacuucaaccaguacgaggccaugagcugcgacuucaacgggggcaagaucuccgugcaguacaaccugagccacuccuacgcgggggacgccgccaaccacugcggcaccgucgccaacggggugcugcagaccuucaugcgcauggcguggggcggcagcuacaucgcccucgacuccgggcacggcagcugggacugcaucaugacguccuaccaguaccugaucauccagaacaccaccugggaggaccacugccaguucagccggcccucccccaucggguaccugggccuccugagccagcgcacccgggacaucuacaucagccgccggcugcucggcacguucaccuggacccuguccgacagcgaggggaaggacaccccgggcggguacugccugacgcgcuggaugcucaucgaggccgagcugaagugcuucggcaacaccgccguggccaagugcaacgagaagcacgacgaggaguucugcgacaugcugcggcuguucgacuucugcaagcaggcgauccagcgccugaaggccgaggcccagauguccauccagcugaucaacaaggccgucaacgcccucaucaacgaccagcugaucaugaagaaccaccuccgggacaucauggggauccccuacugcaacuacagcaaguacugguaccucaaccacaccaccacgggcaagaccucccugcccaagugcuggcuggugagcaacggcuccuaccucaacgagacccacuucagcgacgacaucgagcagcaggcggacaacaugaucaccgagaugcugcagaaggaguacauggagcgccaggggaagacgccccugggccugguggaccucuucgucuucuccaccagcuucuaccugaucuccaucuuccugcaccucgugaagaucccgacccaccggcacaucgugggcaagagcugccccaagccccaccgccugaaccacauggggaucugcuccugcgggcuguacaagcagcccggcgucccggugaaguggaagcggugaggacuaguuauaagacugacuagcccgaugggccucccaacgggcccuccuccccuccuugcaccgagauuaauaaaaaaaaaaaaaaaaaaaaaaaaaaaaaaaaaaaaaaaaaaaaaaaaaaaaaaaaaaaaaaaaaaaaaaaaaaaaaaaaaaaaaaaaaaaaaaaaaaaa

SEQ ID NO: 38140 - RNA, 1665 nt, Artificial Sequence
  mRNA product Design i-3 (A100) comprising derived and/or modified sequence from LASV(G1442-SLE-2011;Clade IV)__AIT17180__GPCmut10 (opt1)
aggagaaagcuuaccaugggccagaucgugaccuucuuccaggaggucccccacgugaucgaggaggugaugaacaucguccugaucgcccucagcauccuggccgugcugaaggggcucuacaacguggcgaccugcggccugaucgggcuggucaccuuccuccugcugugcggccgcuccugcaccaccacccucuacaaggggguguacgagcugcagacgcuggagcucaacauggagacccugaacaugugcaugccgcugagcugcaccaagaacaacucccaccacuacauccgggugggcaacgagaccggccucgagcugacgcugaccaacaccagcaucaucaaccacaaguucugcaaccucuccgacgcccacaagaagaaccuguacgaccacgcccugaugagcaucaucuccaccuuccaccucagcauccccaacuucaaccaguacgaggccauguccugcgacuucaacgggggcaagaucagcguccaguacaaccugucccacagcuacgccggggacgcggccaaccacugcggcacgguggccaacggggugcugcagaccuucaugcgcauggccuggggcggcuccuacaucgcgcucgacagcgggcggggcaacugggacugcaucaugaccuccuaccaguaccugaucauccagaacaccacgugggacgaccacugccaguucagccgccccucccccaucggguaccugggccuccugagccagcggacccgcgacgucuacaucucccggcgccugcucggcaccuucaccuggacgcugagcgacagcgaggggaaggacaccccgggcggguacugccugacccgguggaugcucaucgaggccgagcugaagugcuucggcaacaccgccguggccaagugcaacgagaagcacgacgaggaguucugcgacaugcugcgccucuucgacuucugcaagcaggccauccagcggcugaaggcggaggcccagauguccauccagcugaucaacaaggccgugaacgcccucaucaacgaccagcugaucaugaagaaccaccuccgcgacaucauggggauccccuacugcaacuacagcaaguacugguaccugaacaacacggccaccggcaagaccucccugcccaagugcuggcugaucagcaacggcuccuaccucaacgagacccacuucagcgacgacaucgagcaggaggcggacaacaugaucacggagaugcugcagaaggaguacauggagcggcaggggaagacgccccugggccuggucgaccucuucguguucuccaccagcuucuaccugaucuccaucuuccugcaccucgugaagaucccgacccaccgccacaucgucggcaagagcugccccaagccccaccggcugaaccacauggggaucugcuccugcgggcuguacaagcagcccggcgugccggugcgcuggaagcggugaggacuaguuauaagacugacuagcccgaugggccucccaacgggcccuccuccccuccuugcaccgagauuaauaaaaaaaaaaaaaaaaaaaaaaaaaaaaaaaaaaaaaaaaaaaaaaaaaaaaaaaaaaaaaaaaaaaaaaaaaaaaaaaaaaaaaaaaaaaaaaaaaaaa

SEQ ID NO: 38141 - RNA, 1665 nt, Artificial Sequence
  mRNA product Design i-3 (A100) comprising derived and/or modified sequence from LASV(G3010-SLE-2013;Clade IV)__AIT17344__GPCmut10 (opt1)
aggagaaagcuuaccaugggccagaucgugaccuucuuccaggaggucccccacgugaucgaggaggugaugaacaucguccugaucgcccucagcauccuggccgugcugaaggggcucuacaacuucgcgaccugcggccugguggggcuggucacguuccuccugcugugcggccgcuccugcaccaccagccucuacaaggggguguacgagcugcagacccuggagcucaacauggagacgcugaacaugugcaugccgcuguccugcaccaagaacaacagccaccacuacaucauggugggcaacgagaccggccucgagcugacccugacgaacaccuccaucaucaaccacaaguucugcaaccucagcgacgcccacaagaagaaccuguacaaccacgcccugauguccaucaucagcaccuuccaccucuccauccccaacuucaaccaguacgaggccaugagcugcgacuucaacgggggcaagaucuccguccaguacaaccugagccacuccuacgccggggacgcggccagccacugcggcaccguggccaacggggugcugcagacguucaugcggauggccuggggcggcuccuacaucgcgcucgacagcggguacggcaagugggacugcaucaugaccuccuaccaguaccugaucauccagaacaccaccugggaggaccacugccaguucagccgccccucccccaucggguaccugggccuccugagccagcggacgcgcgacaucuacaucagccggcgccugcucggcaccuucaccuggacccuguccgacagcgaggggaaggacacgccgggcggguacugccugacccgguggaugcucaucgaggccgagcugaagugcuucggcaacaccgccgucgccaagugcaacgagaagcacgacgaggaguucugcgacaugcugcgccucuucgacuucugcaagcaggccauccagcggcugaagaccgaggcgcagauguccauccagcugaucaacaaggccgugaacgcccucaucaacgaccagcugaucaugaagaaccaccuccgcgacaucauggggauccccuacugcaacuacagcaaguacugguaccugaaccacacgaccaccggcaagaccucccugcccaagugcuggcuggugagcaacggcuccuaccucaacgagacgcacuucagcgacgacaucgagcagcaggccgacaacaugaucaccgagaugcugcagaaggaguacauggagcggcaggggaagacgccccugggccuggucgaccucuucguguucuccaccagcuucuaccugaucuccaucuuccugcaccucgugaagaucccgacccaccgccacaucgucggcaagagcugccccaagccccaccggcugaaccacauggggaucugcuccugcgggcuguacaagcagcccggcgugccggugcgcuggaagcggugaggacuaguuauaagacugacuagcccgaugggccucccaacgggcccuccuccccuccuugcaccgagauuaauaaaaaaaaaaaaaaaaaaaaaaaaaaaaaaaaaaaaaaaaaaaaaaaaaaaaaaaaaaaaaaaaaaaaaaaaaaaaaaaaaaaaaaaaaaaaaaaaaaaa

SEQ ID NO: 38142 - RNA, 1665 nt, Artificial Sequence
  mRNA product Design i-3 (A100) comprising derived and/or modified sequence from LASV(G502-SLE-2009;Clade IV)__AIT17126__GPCmut10 (opt1)
aggagaaagcuuaccaugggccagaucgugaccuucuuccaggaggucccccacgugaucgaggaggugaugaacaucguccugaucgcccucagcauccuggccgugcugaaggggcucuacaacuucgcgaccugcggccugguggggcugcucacguuccugcugcucugcggccgcuccugcaccaccgggcuguacaagggcgucuacgagcugcagacccucgagcugaacauggagacgcugaacaugugcaugccgcucagcugcaccaagaacaacucccaccacuacaucauggugggcaacgagaccgggcuggagcugacccucacgaacaccagcaucaucaaccacaaguucugcaaccuguccgacgcccacaagaagaaccuguacgaccacgcccucaugagcaucaucuccaccuuccaccugagcauccccaacuucaaccaguacgaggccauguccugcgacuucaacggcgggaagaucagcgugcaguacaaccugucccacagcuacgccggcgacgcggccgaccacugcgggaccgucgccaacggcgugcuccagacguucaugcggauggccuggggcggguccuacaucgcgcuggacagcggccgcgggcggugggacugcaucaugaccuccuaccaguaccugaucauccagaacaccaccugggaggaccacugccaguucagccgccccucccccaucggcuaccucggccugcugagccagcggacgcgcgacaucuacaucucccggcgccuccuggggaccuucaccuggacccugagcgacagcgagggcaaggacacgcccgggggcuacugccucacccgguggaugcugaucgaggccgagcugaagugcuucgggaacaccgccguggccaagugcaacgagaagcacgacgaggaguucugcgacaugcuccgccuguucgacuucugcaagcaggccauccagcggcugaaggcggaggcccagauguccauccagcucaucaacaaggccgucaacgcccugaucaacgaccagcuggugaugaagaaccaccuccgcgacaucaugggcauccccuacugcaacuacagccgguacugguaccugaaccacaccacgaccggccgcaccucccugcccaagugcuggcucgugagcaacggguccuaccugaacgagacccacuucagcgacgacaucgagcagcaggccgacaacaugaucacggagaugcugcagaaggaguacauggagcggcagggcaagaccccgcuggggcucgucgaccuguucguguucuccaccagcuucuaccugaucuccaucuuccuccaccuggugaagaucccgacccaccgccacaucgucggcaagagcugccccaagccccaccggcugaaccacauggggaucugcuccugcggccucuacaagcagcccggcgugccggugaaguggaagcgcugaggacuaguuauaagacugacuagcccgaugggccucccaacgggcccuccuccccuccuugcaccgagauuaauaaaaaaaaaaaaaaaaaaaaaaaaaaaaaaaaaaaaaaaaaaaaaaaaaaaaaaaaaaaaaaaaaaaaaaaaaaaaaaaaaaaaaaaaaaaaaaaaaaaa

SEQ ID NO: 38143 - RNA, 1665 nt, Artificial Sequence
  mRNA product Design i-3 (A100) comprising derived and/or modified sequence from LASV(G733-SLE-2010;Clade IV)__AIT17154__GPCmut10 (opt1)
aggagaaagcuuaccaugggccagaucgugaccuucuuccaggaggucccccacgugaucgaggaggugaugaacaucguccugaucgcccucagcauccuggccgugcugaaggggcucuacaacuucgcgaccugcggcaucguggggcuggucuccuuccugcuccugugcggccgcagcugcacgaccucccuguacaaggggguguacgagcuccagacccuggagcugaacauggagacccucaacaugugcaugccgcugagcugcacgaagaacaacucccaccacuacaucauggugggcaacgagaccggccuggagcucacccugaccaacacgagcaucaucaaccacaaguucugcaaccuguccgacgcccacaagaagaaccucuacgaccacgcccugaugagcaucaucuccaccuuccaccugagcauccccaacuucaaccaguacgaggccauguccugcgacuucaacgggggcaagaucagcguccaguacaaccucucccacagcuacgccggggacgcggccaaccacugcggcaccaucgccaacggggugcugcagaccuucaugcggauggccuggggcggcuccuacaucgcgcuggacagcgggcgcgaccggugggacugcaucaugacguccuaccaguaccucaucauccagaacaccaccugggaggaccacugccaguucagccgccccucccccaucggcuaccuggggcugcucagccagcggacccgcgacaucuacaucagccggcgccugcugggcacguucaccuggacccucuccgacagcgagggcaaggacacccccgggggcuacugccugacgcgguggaugcugaucgaggccgagcucaagugcuucgggaacaccgccguggccaagugcaacgagaagcacgacgaggaguucugcgacaugcugcgccuguucgacuucugcaagcaggccauccagcggcucaaggcggaggcccagauguccauccagcugaucaacaaggccgucaacgcccugaucaacgaccagcucaucaugaagaaccaccuccgcgacaucaugggcaucccguacugcaacuacagcaaguacugguaccugaaccacaccaccacggggaagaccucccugcccaagugcuggcuggugagcaacggcuccuaccugaacgagacccacuucagcgacgacaucgagcagcaggccgacaacaugaucaccgagaugcuccagaaggaguacauggagcggcagggcaagacgccccuggggcugguggaccuguucgucuucuccaccagcuucuaccucaucuccaucuuccugcaccuggugaagaucccgacccaccgccacguggucggcaagagcugccccaagccccaccggcucaaccacauggggaucugcuccugcggccuguacgggcagcccggcgugccggugaaguggaagcgcugaggacuaguuauaagacugacuagcccgaugggccucccaacgggcccuccuccccuccuugcaccgagauuaauaaaaaaaaaaaaaaaaaaaaaaaaaaaaaaaaaaaaaaaaaaaaaaaaaaaaaaaaaaaaaaaaaaaaaaaaaaaaaaaaaaaaaaaaaaaaaaaaaaaa

SEQ ID NO: 38144 - RNA, 1665 nt, Artificial Sequence
  mRNA product Design i-3 (A100) comprising derived and/or modified sequence from MOPV/LASV reassortant(IGS-1;Clade IV)__AFY05576__GPCmut10 (opt1)
aggagaaagcuuaccaugggccagaucgugaccuucuuccaggaggucccccacgugaucgaggaggugaugaacaucguccugaucgcccucagcgugcuggccgugcugaaggggcucuacaacuucgcgaccugcggccuggucgggcuggugaccuuccuccugcugugcggccgcuccugcaccaccagccucuacaaggggguguacgagcugcagacccuggagcucaacauggagacgcugaacaugugcaugccgcuguccugcaccaagaacaacagccaccacuacaucauggucggcaacgagaccggccucgagcugacccugacgaacaccuccaucaucaaccacaaguucugcaaccucagcgacgcccacaagaagaaccuguacgaccacgcccugauguccaucaucagcaccuuccaccucuccauccccaacuucaaccaguacgaggccaugagcugcgacuucaacgggggcaagaucuccgugcaguacaaccugagccacuccuacgccggggacgcggccaaccacugcggcaccguggccaacgggguccugcagacguucaugcggauggccuggggcggcagcuacaucgcgcucgacuccgggcgcggcaacugggacugcaucaugaccagcuaccaguaccugaucauccagaacaccaccugggaggaccacugccaguucucccggcccagccccaucggguaccugggccuccugucccagcgcacgcgggacaucuacaucagccgccggcugcucggcaccuucaccuggacccugagcgacuccgagggggaggacacgccgggcggguacugccugacccgcuggaugcucaucgaggccgagcugaagugcuucggcaacaccgccguggccaagugcaacgagaagcacgacgaggaguucugcgacaugcugcggcuguucgacuucugcaagcaggccauccagcgccugaaggcggaggcccagaugagcauccagcugaucaacaaggccgugaacgcccucaucaacgaccagcugaucaugaagaaccaccuccgggacaucauggggauccccuacugcaacuacuccaaguacugguaccucaaccacaccacgaccggccgcaccagccugcccaagugcuggcuggucuccaacggcagcuaccucaacgagacccacuucuccgacgacaucgagcagcaggccgacaacaugaucacggagaugcugcagaaggaguacauggagcggcaggggaagacgccccugggccugguggaccucuucguguucagcaccuccuucuaccugaucagcaucuuccugcaccucgucaagaucccgacccaccgccacaucguggggaaguccugccccaagccccaccggcugaaccacaugggcaucugcagcugcgggcuguacaagcagcccggcgugccggucaaguggaagcgcugaggacuaguuauaagacugacuagcccgaugggccucccaacgggcccuccuccccuccuugcaccgagauuaauaaaaaaaaaaaaaaaaaaaaaaaaaaaaaaaaaaaaaaaaaaaaaaaaaaaaaaaaaaaaaaaaaaaaaaaaaaaaaaaaaaaaaaaaaaaaaaaaaaaa

SEQ ID NO: 38145 - RNA, 1665 nt, Artificial Sequence
  mRNA product Design i-3 (A100) comprising derived and/or modified sequence from LASV(LM765-SLE-2012;Clade IV)__AIT17814__GPCmut10 (opt1)
aggagaaagcuuaccaugggccagaucgugaccuucuuccaggaggucccccacgugaucgaggaggugaugaacaucguccugaucgcccucagcauccuggccgugcugaaggggcucuacaacuucgcgaccugcggccugguggggcuggucacguuccuccugcugugcggccgcuccugcaccaccagccucuacaaggggguguacgagcugcagacccuggagcucaacauggagacgcugaacaugugcaugccgcuguccugcaccaagaacaacagccaccacuacaucauggugggcaacgagaccggccucgagcugacccugacgaacaccuccaucaucgaccacaaguucugcaaccucagcgacgcccaccggaagaaccuguacgaccacgcccugauguccaucaucagcaccuuccaccucuccauccccaacuucaaccaguacgaggccaugagcugcgacuucaacgggggcaagaucuccguccaguacaaccugagccacuccuacgccaaggacgcggccgaccacugcgggaccguggccaacggcgugcugcagacguucaugcgcauggccuggggcgggagcuacaucgcgcucgacuccggccgggggcgcugggacugcaucaugaccagcuaccaguaccugaucauccagaacaccaccugggaggaccacugccaguucucccggcccagccccaucggcuaccuggggcuccugucccagcgcacgcgggacaucuacaucagccgccggcugcucggcaccuucaccuggacccugagcgacuccgagggcaaggacacgcccgggggcuacugccugacccgcuggaugcucaucgaggccgagcugaagugcuucgggaacaccgccgucgccaagugcaacgagaagcacgacgaggaguucugcgacaugcugcggcuguucgacuucugcaagcaggccauccagcgccugaaggcggaggcccagaugagcauccagcugaucaacaaggccgugaacgcccucaucaacgaccagcugaucaugaagaaccaccuccgggacaucaugggcauccccuacugcaacuacuccaaguacugguaccucaaccacaccacgaccgggaagaccagccugcccaagugcuggcugguguccaacggcagcuaccucaacgagacccacuucuccgacgacaucgagcagcaggccgacaacaugaucacggagaugcugcagaaggaguacauggagcgccagggcaagaccccgcuggggcuggucgaccucuucguguucagcaccuccuucuaccugaucagcaucuuccugcaccucgugaagaucccgacccaccggcacaucgucggcaagcccugccccaagccccaccgccugaaccacauggggaucugcuccugcggccuguacaagcagccgggggugcccgugaaguggaagcggugaggacuaguuauaagacugacuagcccgaugggccucccaacgggcccuccuccccuccuugcaccgagauuaauaaaaaaaaaaaaaaaaaaaaaaaaaaaaaaaaaaaaaaaaaaaaaaaaaaaaaaaaaaaaaaaaaaaaaaaaaaaaaaaaaaaaaaaaaaaaaaaaaaaa

SEQ ID NO: 38146 - RNA, 1665 nt, Artificial Sequence
  mRNA product Design i-3 (A100) comprising derived and/or modified sequence from LASV(LM776-SLE-2012;Clade IV)__AIT17824__GPCmut10 (opt1)
aggagaaagcuuaccaugggccagaucgugaccuucuuccaggaggucccccacgugaucgaggaggugaugaacaucguccugaucgcccucagcauccuggccgugcugaaggggcucuacaacuucgcgaccugcggccugguggggcuggucaccuuccuccugcugugcggccgcuccugcaccaccagcguguacaaggggguguacgagcuccagacccuggagcugaacauggagacgcucaacaugugcaugccgcuguccugcaccaagaacaacagccaccacuacaucauggucggcaacgagaccggccuggagcucacccugacgaacaccuccaucaucaaccacaaguucugcaaccugagcgacgcccacaagaagaaccucuacgaccacgcccugauguccaucaucagcaccuuccaccuguccauccccaacuucaaccaguacgaggccaugagcugcgacuucaacgggggcaagaucuccgugcaguacaaccucagccacuccuacgccggggacgcggccaaccacugcggcaccguggccaacgggguccugcagacguucaugcggauggccuggggcggcagcuacaucgcgcuggacuccgggcacggcaagugggacugcaucaugaccagcuaccaguaccucaucauccagaacaccaccugggaggaccacugccaguucucccgccccagccccaucggguaccugggccugcucucccagcggacgcgcgacaucuacaucagccggcgccugcugggcaccuucaccuggacccucagcgacuccgaggggaaggacacgccgggcggguacugccugacccgguggaugcugaucgaggccgagcucaagugcuucggcaacaccgccguggccaagugcaacgagaagcacgacgaggaguucugcgacaugcugcgccuguucgacuucugcaagcaggccauccagcggcucaaggcggaggcccagaugagcauccagcugaucaacaaggccgugaacgcccugaucaacgaccagcucaucaugaagaaccaccuccgcgacaucauggggauccccuacugcaacuacuccaaguacugguaccugaaccacaccacgaccggcaagaccagccugcccaagugcuggcuggucuccaacggcagcuaccugaacgagacccacuucuccgacgacaucgagcagcaggccgacaacaugaucacggagaugcuccagaaggaguacauggagcggcaggggaagacgccccugggccugguggaccuguucguguucagcaccuccuucuaccucaucagcaucuuccugcaccuggucaagaucccgacccaccgccacaucguggggaaguccugccccaagccccaccggcucaaccacaugggcaucugcagcugcgggcuguacaagcagcccggcgugccgguccgcuggaagcggugaggacuaguuauaagacugacuagcccgaugggccucccaacgggcccuccuccccuccuugcaccgagauuaauaaaaaaaaaaaaaaaaaaaaaaaaaaaaaaaaaaaaaaaaaaaaaaaaaaaaaaaaaaaaaaaaaaaaaaaaaaaaaaaaaaaaaaaaaaaaaaaaaaaa

SEQ ID NO: 38147 - RNA, 1665 nt, Artificial Sequence
  mRNA product Design i-3 (A100) comprising derived and/or modified sequence from LASV(Mad39;Clade IV)__ANH09722__GPCmut10 (opt1)
aggagaaagcuuaccaugggccagaucgugaccuucuuccaggaggucccccacgugaucgaggaggugaugaacaucguccugaucgcccucagcauccuggccgugcugaaggggcucuacaacguggcgaccugcggccugaucgggcuggucacguuccuccugcugugcggccgcuccugcaccaccacccucuacaaggggguguacgagcugcaggcccuggagcucaacauggagacgcugaacaugugcaugccgcugagcugcaccaagaacaacucccaccacuacauccgggugggcaacgagaccggccucgagcugacccugacgaacaccagccucaucaaccacaaguucugcaaccuguccgacgcccacaagaagaaccuguacgaccacgcccucaugagcaucaucuccaccuuccaccugagcauccccaacuucaaccaguacgaggccauguccugcgacuucaacgacgggaagaucagcguccaguacaaccugucccacaccuacgcgggcgacacggccaaccacugcgggaccguggccaacggcgugcuccagaccuucaugcgcauggccuggggcgggagcuacaucgcgcuggacuccggccgcgggggcugggacugcaucaugaccagcuaccaguaccugaucauccagaacacgaccugggaggaccacugccaguucucccggcccagccccaucggguaccucggccugcugucccagcggacccgcgacaucuacaucagccggcgccuccugggcaccuucacguggacccuguccgacagcgaggggaaggacaccccgggcggguacugccucacccgguggaugcugaucgaggccgagcugaagugcuucggcaacacggccgucgccaagugcaacgagaagcacgacgaggaguucugcgacaugcuccgccuguucgacuucugcaagcaggccauccagcggcugaaggcggaggcccagaugagcauccagcucaucaacaaggccgugaacgcccugaucaacgaccagcugaucaugaagaaccaccuccgcgacaucauggggauccccuacugcaacuacuccaaguacugguaccugaaccacaccgugaccggcaagaccagccugcccaagugcuggcucgucuccaacggcagcuaccugaacgagacgcacuucuccgacgacaucgagcagcaggccgacaacaugaucaccgagaugcugcagaaggaguacauggagcggcaggggaagacgccccugggccucguggaccuguucguguucagcaccuccuucuaccugaucagcaucuuccuccaccuggucaagaucccgacccaccgccacgugguggggaagcccugccccaagccccaccggcugaaccacaugggcaucugcuccugcggguucuacaagcagccgggcguccccgugcgcuggaagcggugaggacuaguuauaagacugacuagcccgaugggccucccaacgggcccuccuccccuccuugcaccgagauuaauaaaaaaaaaaaaaaaaaaaaaaaaaaaaaaaaaaaaaaaaaaaaaaaaaaaaaaaaaaaaaaaaaaaaaaaaaaaaaaaaaaaaaaaaaaaaaaaaaaaa

SEQ ID NO: 38148 - RNA, 1665 nt, Artificial Sequence
  mRNA product Design i-3 (A100) comprising derived and/or modified sequence from LASV(Z0947-SLE-2011;Clade IV)__AIT17840__GPCmut10 (opt1)
aggagaaagcuuaccaugggccagaucgugaccuucuuccaggaggucccccacgugaucgaggaggugaugaacaucguccugaucgcccucagcauccuggccgugcugaaggggcucuacaacuucgcgaccugcggccugguggggcuggucacguuccuccugcugugcggccgcuccugcaccaucagccucuacaaggggguguacgagcugcagacccuggagcucaacauggagacccugaacaugugcaugccgcuguccugcacgaagaacaacagccaccacuacaucauggugggcaacgagaccggccucgagcugacccugaccaacacguccaucaucaaccacaaguucugcaaccucagcgacgcccacaagaagaaccuguacgaccacgcccugauguccaucaucagcaccuuccaccucuccauccccaacuucaaccaguacgaggccaugagcugcgacuucaacgggggcaagaucuccguccaguacaaccugagccacuccuacgccggggacgcggccaaccacugcggcaccguggccaacggggugcugcagaccuucaugcggauggccuggggcggcagcuacaucgcgcucgacuccgggcgcgaccggugggacugcaucaugacgagcuaccaguaccugaucauccagaacaccaccugggaggaccacugccaguucucccgccccagccccaucggcuaccuggggcuccugucccagcggacccgcgacaucuacaucagccggcgccugcucggcacguucaccuggacccugagcgacuccgagggcaaggacacccccgggggcuacugccugacgcgguggaugcucaucgaggccgagcugaagugcuucgggaacaccgccgucgccaagugcaacgagaagcacgacgaggaguucugcgacaugcugcgccucuucgacuucugcaagcaggccauccagcggcugaaggcggaggcccagaugagcauccagcugaucaacaaggccgugaacgcccucaucaacgaccagcugaucaugaagaaccaccuccgcgacaucaugggcaucccguacugcaacuacuccaaguacugguaccugaaccacaccaccacggggaagaccagccugcccaagugcuggcugguguccaacggcagcuaccucaacgagacccacuucuccgacgacaucgagcagcaggccgacaacaugaucaccgagaugcugcagaaggaguacauggagcggcagggcaagacgccccuggggcuggucgaccucuucguguucagcaccuccuucuaccugaucagcaucuuccugcaccucgugaagaucccgacccaccgccacaucgucggcaagcccugccccaagccccaccggcugaaccacauggggaucugcuccugcggccuguacaagcagccgggggugcccgugaaguggaagcgcugaggacuaguuauaagacugacuagcccgaugggccucccaacgggcccuccuccccuccuugcaccgagauuaauaaaaaaaaaaaaaaaaaaaaaaaaaaaaaaaaaaaaaaaaaaaaaaaaaaaaaaaaaaaaaaaaaaaaaaaaaaaaaaaaaaaaaaaaaaaaaaaaaaaa

SEQ ID NO: 38149 - RNA, 1665 nt, Artificial Sequence
  mRNA product Design i-3 (A100) comprising derived and/or modified sequence from LASV(Josiah;Clade IV)__NP_694870__GPCmut10 (opt4)
aggagaaagcuuaccaugggccagaucgugaccuucuuccaggaggugccccacgugaucgaggaggugaugaacaucgugcugaucgcccugagcgugcuggccgugcugaagggccuguacaacuucgccaccugcggccuggugggccuggugaccuuccugcugcugugcggcagaagcugcaccaccagccuguacaagggcguguacgagcugcagacccuggagcugaacauggagacccugaacaugugcaugccccugagcugcaccaagaacaacagccaccacuacaucauggugggcaacgagaccggccuggagcugacccugaccaacaccagcaucaucaaccacaaguucugcaaccugagcgacgcccacaagaagaaccuguacgaccacgcccugaugagcaucaucagcaccuuccaccugagcauccccaacuucaaccaguacgaggccaugagcugcgacuucaacggcggcaagaucagcgugcaguacaaccugagccacagcuacgccggcgacgccgccaaccacugcggcaccguggccaacggcgugcugcagaccuucaugagaauggccuggggcggcagcuacaucgcccuggacagcggcagaggcaacugggacugcaucaugaccagcuaccaguaccugaucauccagaacaccaccugggaggaccacugccaguucagcagacccagccccaucggcuaccugggccugcugagccagagaaccagagacaucuacaucagcagaagacugcugggcaccuucaccuggacccugagcgacagcgagggcaaggacacccccggcggcuacugccugaccagauggaugcugaucgaggccgagcugaagugcuucggcaacaccgccguggccaagugcaacgagaagcacgacgaggaguucugcgacaugcugagacuguucgacuucugcaagcaggccauccagagacugaaggccgaggcccagaugagcauccagcugaucaacaaggccgugaacgcccugaucaacgaccagcugaucaugaagaaccaccugagagacaucaugggcauccccuacugcaacuacagcaaguacugguaccugaaccacaccaccaccggcagaaccagccugcccaagugcuggcuggugagcaacggcagcuaccugaacgagacccacuucagcgacgacaucgagcagcaggccgacaacaugaucaccgagaugcugcagaaggaguacauggagagacagggcaagaccccccugggccugguggaccuguucguguucagcaccagcuucuaccugaucagcaucuuccugcaccuggugaagauccccacccacagacacaucgugggcaagagcugccccaagccccacagacugaaccacaugggcaucugcagcugcggccuguacaagcagcccggcgugcccgugaaguggaagagaugaggacuaguuauaagacugacuagcccgaugggccucccaacgggcccuccuccccuccuugcaccgagauuaauaaaaaaaaaaaaaaaaaaaaaaaaaaaaaaaaaaaaaaaaaaaaaaaaaaaaaaaaaaaaaaaaaaaaaaaaaaaaaaaaaaaaaaaaaaaaaaaaaaaa

SEQ ID NO: 38150 - RNA, 1662 nt, Artificial Sequence
  mRNA product Design i-3 (A100) comprising derived and/or modified sequence from LASV(LP;Clade I)__AAF86701__GPCmut10 (opt4)
aggagaaagcuuaccaugggccagaucaucaccuucuuccaggaggugccccacgugaucgaggaggugaugaacaucgugcugaucgcccugagccugcuggccauccugaagggccuguacaacaucgccaccugcggcaucaucggccugguggccuuccuguuccugugcggcaagagcugcagccugacccugaagggcggcuacgagcugcagacccuggagcugaacauggagacccugaacaugugcaugccccugagcugcaccaagaacagcagccaccacuacaucagagugggcaacgagaccggccuggagcugacccugaccaacaccagcaucaucaaccacaaguucugcaaccugagcgacgcccacaagaagaaccuguacgaccacgcccugaugagcaucaucagcaccuuccaccugagcauccccaacuucaaccaguacgaggccaugagcugcgacuucaacggcggcaagaucagcgugcaguacaaccugagccacagcuacgccggcgacgccgccgagcacugcggcaccguggccaacggcgugcugcagaccuucaugagaauggccuggggcggcagauacaucgcccuggacagcggcaagggcaacugggacugcaucaugaccagcuaccaguaccugaucauccagaacaccaccugggaggaccacugccaguucagcagacccagccccaucggcuaccugggccugcugagccagagaaccagagacaucuacaucagcagaagacugcugggcaccuucaccuggacccugagcgacagcgagggcaacgagacccccggcggcuacugccugaccagauggaugcugaucgaggccgagcugaagugcuucggcaacaccgccguggccaagugcaacgagaagcacgacgaggaguucugcgacaugcugagacuguucgacuucugcaagcaggccaucagaagacugaaggccgaggcccagaugagcauccagcugaucaacaaggccgugaacgcccugaucaacgaccagcugaucaugaagaaccaccugagagacaucaugggcauccccuacugcaacuacagcaaguacugguaccugaaccacaccagcagcggcagaaccagccugcccaagugcuggcugaucagcaacggcagcuaccugaacgagacccaguucagcgacgacaucgagcagcaggccgacaacaugaucaccgagaugcugcagaaggaguacaucgagagacagggcaagaccccccugggccugguggacaucuucaucuucagcaccagcuucuaccugaucagcaucuuccugcaccugaucaagauccccacccacagacacaucgugggcaagcccugccccaagccccacagacugaaccacaugggcgugugcagcugcggccuguacaagcaccccggcgugcccaccaaguggaagagaugaggacuaguuauaagacugacuagcccgaugggccucccaacgggcccuccuccccuccuugcaccgagauuaauaaaaaaaaaaaaaaaaaaaaaaaaaaaaaaaaaaaaaaaaaaaaaaaaaaaaaaaaaaaaaaaaaaaaaaaaaaaaaaaaaaaaaaaaaaaaaaaaaaaa

SEQ ID NO: 38151 - RNA, 1662 nt, Artificial Sequence
  mRNA product Design i-3 (A100) comprising derived and/or modified sequence from LASV(803213;Clade II)__AAF86703__GPCmut10 (opt4)
aggagaaagcuuaccaugggccagaucaucaccuucuuccaggaggugccccacgugaucgaggaggugaugaacaucgugcugaucgcccugagccugcuggccauccugaagggcaucuacaacguggccaccugcggccuguucggccugaucagcuuccugcugcugugcggcagaagcugcagcgugaccuacaagggcguguacgagcugcagacccuggagcugaacauggccaaccugaacaugugcaugccccugagcugcaccaagaacaacagccaccacuacaucauggugggcaacgagaccggccuggagcugacccugaccaacaccagcaucaucaaccacaaguucugcaaccugagcgacgcccacaagaagaaccuguacgaccacgcccugaugagcaucaucagcaccuuccaccugagcauccccaacuucaaccaguacgaggccaugagcugcgacuucaacggcggcaagaucagcgugcaguacaaccugagccacagcuucgccguggacgccgccaaccacugcggcaccaucgccaacggcgugcugcagaccuucaugagaauggccuggggcggcagcuacaucgcccuggacagcggcaagggcaacugggacugcaucaugaccagcuaccaguaccugaucauccagaacaccaccugggaggaccacugccaguucagcagacccagccccaucggcuaccugggccugcugagccagagaaccagagacaucuacaucagcagaagacugcugggcaccuucaccuggacccugagcgacagcgagggcaacgaggcccccggcggcuacugccugaccagauggaugcugaucgaggccgagcugaagugcuucggcaacaccgccguggccaagugcaacgagaagcacgacgaggaguucugcgacaugcugagacuguucgacuucugcaagcaggccaucaagagacugaagaccgaggcccagaugagcauccagcugaucaacaaggccgugaacgcccugaucaacgaccagcugaucaugaagaaccaccugagagacaucaugggcauccccuacugcaacuacagcagauacugguaccugaaccacaccgugaccggcaagaccagccugcccagaugcuggcuggugagcaacggcagcuaccugaacgagacccacuucagcgacgacaucgagcagcaggccgacaacaugaucaccgagaugcugcagaaggaguacauggacagacagggcaagaccccccugggccugguggaccuguucguguucagcaccagcuucuaccugaucagcaucuuccugcaccuggugaagauccccacccacagacacaucgugggcaagcccugccccaagccccacagacugaaccacaugggcaucugcagcugcggccuguacaagcaccccggcgugcccgugaaguggaagagaugaggacuaguuauaagacugacuagcccgaugggccucccaacgggcccuccuccccuccuugcaccgagauuaauaaaaaaaaaaaaaaaaaaaaaaaaaaaaaaaaaaaaaaaaaaaaaaaaaaaaaaaaaaaaaaaaaaaaaaaaaaaaaaaaaaaaaaaaaaaaaaaaaaaa

SEQ ID NO: 38152 - RNA, 1662 nt, Artificial Sequence
  mRNA product Design i-3 (A100) comprising derived and/or modified sequence from LASV(GA391;Clade III)__CAA36645__GPCmut10 (opt4)
aggagaaagcuuaccaugggccagaucgugaccuucuuccaggaggugccccacgugaucgaggaggugaugaacaucgugcugaucgcccugagcauccuggccauccugaagggccuguacaacguggccaccugcggccugaucggccuggugaccuuccugcugcugagcggcagaagcugcagccugaucuacaagggcaccuacgagcugcagacccuggagcugaacauggagacccugaacaugugcaugccccugagcugcaccaagaacaacagccaccacuacaucagagugggcaacgagaccggccuggagcugacccugaccaacaccagcauccugaaccacaaguucugcaaccugagcgacgcccacaagagaaaccuguacgaccacagccugaugagcaucaucagcaccuuccaccugagcauccccaacuucaaccaguacgaggccaugagcugcgacuucaacggcggcaagaucaccgugcaguacaaccugagccacagcuucgccguggacgccgccggccacugcggcacccuggccaacggcgugcugcagaccuucaugagaauggccuggggcggcagcuacaucgcccuggacagcggcagaggcaacugggacugcaucaugaccagcuaccaguaccugaucauccagaacaccaccugggacgaccacugccaguucagcagacccagccccaucggcuaccugggccugcugagccagagaaccagagacaucuacaucagcagaagacugcugggcaccuucaccuggacccugagcgacagcgagggcaacgagacccccggcggcuacugccugaccagauggaugcugaucgaggccgagcugaagugcuucggcaacaccgccguggccaagugcaacgagaagcacgacgaggaguucugcgacaugcugagacuguucgacuucugcaagcaggccaucagaagacugaagaccgaggcccagaugagcauccagcugaucaacaaggccgugaacgcccugaucaacgaccagcugaucaugaagaaccaccugagagacaucaugggcauccccuacugcaacuacagcagauacugguaccugaaccacaccagcaccggcaagaccagccugcccagaugcuggcugaucagcaacggcagcuaccugaacgagaccaaguucagcgacgacaucgagcagcaggccgacaacaugaucaccgagaugcugcagaaggaguacaucgacagacagggcaagaccccccugggccugguggaccuguucguguucagcaccagcuucuaccugaucagcaucuuccugcaccuggugaagauccccacccacagacacaucgugggcaagcccugccccaagccccacagacugaaccacaugggcaucugcagcugcggccuguacaagcagcccggcgugcccgugagauggaagagaugaggacuaguuauaagacugacuagcccgaugggccucccaacgggcccuccuccccuccuugcaccgagauuaauaaaaaaaaaaaaaaaaaaaaaaaaaaaaaaaaaaaaaaaaaaaaaaaaaaaaaaaaaaaaaaaaaaaaaaaaaaaaaaaaaaaaaaaaaaaaaaaaaaaa

SEQ ID NO: 38153 - RNA, 1665 nt, Artificial Sequence
  mRNA product Design i-3 (A100) comprising derived and/or modified sequence from LASV(AV;Clade V)__CCA30314__GPCmut10 (opt4)
aggagaaagcuuaccaugggccagaucgugaccuucuuccaggaggugccccacgugaucgaggaggugaugaacaucgugcugaucgcccugagcauccuggccgugcugaagggccuguacaacaucgccaccugcggccugaucggccugaucaccuuccugcugcugugcggcagaagcugcagcagcaaccuguacaagggcguguacgagcugcagagccuggaccugaacauggagacccugaacaugugcaugccccugagcugcaccaagaacaacagccaccacuacaucagagugggcaacgacaccggccuggagcugacccugaccaacaccagcauccugaaccacaaguucugcaaccugagcgacgcccacaagaaggaccuguacgaccacgcccugaugagcaucaucagcaccuuccaccugagcauccccaacuucaaccaguacgaggccaugagcugcgacuucaacggcggcaagaucagcgugcaguacaaccugagccacagcuacgccaucgacgccgccaaccacugcggcaccguggccaacggcauccugcagaccuucaugagaauggccuggggcggcagcuacaucgcccuggacagcggcagaggcaacugggacugcaucaugaccagcuaccaguaccugaucauccagaacaccaccugggagaaccacugccaguucagcagacccagccccaucggcuaccugggccugcugagccagagaaccagagacaucuacaucagcagaagacugcugggcaccuucaccuggacccugagcgacagcgagggcaacgccacccccggcggcuacugccugaccagauggaugcugaucgaggccgagcugaagugcuucggcaacaccgccguggccaagugcaacgagaagcacgacgaggaguucugcgacaugcugagacuguucgacuucugcaagcaggccaucagcagacugaagagcgaggcccagaugagcauccagcugaucaacaaggccgugaacgcccugaucaacgaccagcugaucaugaagaaccaccugagagacaucaugggcauccccuacugcaacuacagcaaguacugguaccugaaccacaccaucaccggcaagaccagccugcccaagugcuggcuggugagcaacggcagcuaccugaacgagacccacuucagcgacgacaucgagcagcaggccgacaacaugaucaccgagaugcugcagaaggaguacauggagagacagggcaagaccccccugggccugguggaccuguucguguucagcaccagcuucuaccugaucagcaucuuccugagacuggugaagauccccacccacagacacaucgugggcaagcccugccccaagccccacagacugaaccacaugggcaucugcagcugcggccuguacaagcagcccggcgugcccgugagauggaagagaugaggacuaguuauaagacugacuagcccgaugggccucccaacgggcccuccuccccuccuugcaccgagauuaauaaaaaaaaaaaaaaaaaaaaaaaaaaaaaaaaaaaaaaaaaaaaaaaaaaaaaaaaaaaaaaaaaaaaaaaaaaaaaaaaaaaaaaaaaaaaaaaaaaaa

SEQ ID NO: 38154 - RNA, 1662 nt, Artificial Sequence
  mRNA product Design i-3 (A100) comprising derived and/or modified sequence from LASV(Togo/2016/7082;Clade VI)__AMR44577__GPCmut10 (opt4)
aggagaaagcuuaccaugggccagaucaucaccuucuuccaggaggugccccacgugaucgaggaggugaugaacaucgugcugaucgcccugagccugcuggccauccugaagggcguguacaacguggccaccugcggcaucaucggccuggugaccuuccuguuccugugcggcagaagcugcagccugaucuacaagggcagcuacgagcugcagacccuggagcugaacauggagacccugaacaugugcaugccccugagcugcaccaagaacagcagccaccacuacaucagagugggcaacgagaccggccuggagcugacccugaccaacaccagcaucaucaaccacaaguucugcaaccugagcgacgcccacaagagaaaccuguacgaccacgcccugaugagcauccugagcaccuuccaccugagcauccccaacuucaaccaguacgaggccaugagcugcgacuucaacggcggcaagaucagcgugcaguacaaccugagccacgccuacgccguggacgccgccgagcacugcggcaccguggccaacggcgugcugcagaccuucaugagaauggccuggggcggcagcuacaucgcccuggacagcggcagaggcaacugggacugcaucaugaccagcuaccaguaccugaucauccagaacaccaccugggaggaccacugccaguucagcagacccagccccaucggcuaccugggccugcugagccagagaaccagagacaucuacaucagcagaagacugcugggcaccuucaccuggacccugagcgacagcgagggcaacgagacccccggcggcuacugccugaccagauggaugcugaucgaggccgagcugaagugcuucggcaacaccgccguggccaagugcaacgagaagcacgacgaggaguucugcgacaugcugagacuguucgacuucugcaagcaggccauccagagacugaagagcgaggcccagaugagcauccagcugaucaacaaggccgugaacgcccugaucaacgaccagcugaucaugaagaaccaccugagagacaugaugggcauccccuacugcaacuacagcaaguacugguaccugaaccacaccagcagcggcagaaccagccugcccaagugcuggcuggugagcaacggcagcuaccugaacgagacccacuucagcgacgacaucgagcagcaggccgacaacaugaucaccgagaugcugcagaaggaguacaucgacagacagggcaagaccccccugggccugguggaccuguucguguucagcaccagcuucuaccugaucagcaucuuccugcaccugaucaagauccccacccacagacacaucgugggcaagcccugccccaagccccacagacugaaccacaugggcaucugcagcugcggccuguacaagcagcccggcgugcccaccagauggaagagaugaggacuaguuauaagacugacuagcccgaugggccucccaacgggcccuccuccccuccuugcaccgagauuaauaaaaaaaaaaaaaaaaaaaaaaaaaaaaaaaaaaaaaaaaaaaaaaaaaaaaaaaaaaaaaaaaaaaaaaaaaaaaaaaaaaaaaaaaaaaaaaaaaaaa

SEQ ID NO: 38155 - RNA, 1662 nt, Artificial Sequence
  mRNA product Design i-3 (A100) comprising derived and/or modified sequence from LASV(KAK-428;Clade n.d. (VII))__ANH09740__GPCmut10 (opt4)
aggagaaagcuuaccaugggccagaucgugaccuucuuccaggaggugccccacgugaucgaggaggugaugaacaucgugcugaucgcccugagccugcuggccauccugaagggccuguacaacuucgccaccugcggcgugaucggccugaucaccuuccugcugcugugcggcagaagcugcagcgccaccuacaagggccaguacgagcugcagacccuggagcugaacauggagagccugaacaugugcaugccccugagcugcaccaagaacaacagccaccacuacaucagagccggcaacaacaccggccuggagcugacccugaccaacaccagcaucaucagccacaaguucugcaaccugagcgacgcccacaagaagaaccuguacgaccacacccugaugagcaucaucaccaccuuccaccugagcauccccaacuucaaccaguacgaggccaugagcugcgacuucaacggcggcaagaucagcauccaguacaaccugagccacagcuacgccggcgacgccgcccagcacugcggcaccguggccaacggcgugcugcagaccuucaugagaauggccuggggcggcagcuaccuggcccuggacagcggcagaagaggcugggacugcaucaucagcagcuaccaguaccugaucauccagaacaccaccugggacgaccacugccaguucagcagacccagccccaucggcuaccugggcuucgugagccagaagaccagagacaucuacaucagcagaagacugcugggcaccuucaccuggacccugagcgacagcgagggccacgacaugcccggcggcuacugccugaccagauggaugcugaucgaggccgaccugaagugcuucggcaacaccgccguggccaagugcaacgagaagcacgacgaggaguucugcgacauguggagacuguucgacuucugcaagcaggccauccagagacugaaggccgaggcccagaugaacauccagcugaucaacaaggccgugaacgcccugaucaacgaccagcugaugaugaagaaccaccugagagacaucaugggcauccccuacugcaacuacagcaaguucugguaccugaacaacaccaccaccggcagaaccagccugcccagaugcuggcugaucagcaacggcagcuaccugaacgagacccacuucagcgacgacaucgagcagcaggccgacaacaugaucaccgagaugcugcagaaggaguacauggacagacagggcaagaccccccugggccugguggaccuguucguguucagcaccagcuucuaccugaucaccaucuuccugcaccuggugaagauccccacccacagacacaucgugggcaagcccugccccaagccccacagacugaaccacaugggcaucugcagcugcggccuguacaagcagcccggcgugcccgugagauggaagagaugaggacuaguuauaagacugacuagcccgaugggccucccaacgggcccuccuccccuccuugcaccgagauuaauaaaaaaaaaaaaaaaaaaaaaaaaaaaaaaaaaaaaaaaaaaaaaaaaaaaaaaaaaaaaaaaaaaaaaaaaaaaaaaaaaaaaaaaaaaaaaaaaaaaa

SEQ ID NO: 38156 - RNA, 1662 nt, Artificial Sequence; identical to SEQ ID NO: 38150
  mRNA product Design i-3 (A100) comprising derived and/or modified sequence from LASV(Pinneo-NIG-1969;Clade I)__AIT17836__GPCmut10 (opt4)

SEQ ID NO: 38157 - RNA, 1662 nt, Artificial Sequence
  mRNA product Design i-3 (A100) comprising derived and/or modified sequence from LASV(ISTH0009-NIG-2011;Clade II)__AIT17404__GPCmut10 (opt4)
aggagaaagcuuaccaugggccagaucaucaccuucuuccaggaggugccccacgugaucgaggaggugaugaacaucgugcugaucgcccugagccugcuggccauccugaagggcaucuacaacguggccaccugcggccuguucggccuggugagcuuccugcugcugugcggcagaagcugcagcaccaccuacaagggcguguacgagcugcagacccuggagcuggacauggccagccugaacaugugcaugccccugagcugcaccaagaacaacagccaccacuacaucauggugggcaacgagaccggccuggagcugacccugaccaacaccagcaucaucaaccacaaguucugcaaccugagcgacgcccacaagaagaaccuguacgaccacgcccugaugagcaucaucagcaccuuccaccugagcauccccaacuucaaccaguacgaggccaugagcugcgacuucaacggcggcaagaucagcgugcaguacaaccugagccacgccuacgccguggacgccgccaaccacugcggcaccaucgccaacggcgugcugcagaccuucaugagaauggccuggggcggcagcuacaucgcccuggacagcggcaagggcagcugggacugcaucaugaccagcuaccaguaccugaucauccagaacaccaccugggaggaccacugccaguucagcagacccagccccaucggcuaccugggccugcugagccagagaaccagagacaucuacaucagcagaagacugcugggcaccuucaccuggacccugagcgacagcgagggcaacgagacccccggcggcuacugccugaccagauggaugcugaucgaggccgagcugaagugcuucggcaacaccgccguggccaagugcaacgagaagcacgacgaggaguucugcgacaugcugagacuguucgacuucugcaagcaggccaucagaagacugaagaccgaggcccagaugagcauccagcugaucaacaaggccgugaacgcccugaucaacgaccagcugaucaugaagaaccaccugagagacaucaugggcauccccuacugcaacuacagcaaguacugguaccugaaccacaccgugaccggcaagaccagccugcccagaugcuggcuggugagcaacggcagcuaccugaacgagacccacuucagcgacgacaucgagcagcaggccgacaacaugaucaccgagcugcugcagaaggaguacauggacagacagggcaagaccccccugggccugguggaccuguucguguucagcaccagcuucuaccugaucagcaucuuccugcaccugaucaagauccccacccacagacacaucaccggcaagcccugccccaagccccacagacugaaccacaugggcaucugcagcugcggccuguacaagcaccccggcgugcccgugaaguggaagagaugaggacuaguuauaagacugacuagcccgaugggccucccaacgggcccuccuccccuccuugcaccgagauuaauaaaaaaaaaaaaaaaaaaaaaaaaaaaaaaaaaaaaaaaaaaaaaaaaaaaaaaaaaaaaaaaaaaaaaaaaaaaaaaaaaaaaaaaaaaaaaaaaaaaa

SEQ ID NO: 38158 - RNA, 1662 nt, Artificial Sequence
  mRNA product Design i-3 (A100) comprising derived and/or modified sequence from LASV(ISTH2010-NIG-2012;Clade II)__AIT17482__GPCmut10 (opt4)
aggagaaagcuuaccaugggccagaucaucaccuucuuccaggaggugccccacgugaucgaggaggugaugaacaucgugcugaucgcccugagccugcuggccauccugaagggcaucuacaacguggccaccugcggccuguucggccuggugagcuuccugcugcugugcggcagaagcugcagcaccaccuacaagggcguguacgagcugcagacccuggagcuggacauggccagccugaacaugugcaugccccugagcugcaccaagaacaacagccaccacuacaucauggugggcaacgagaccggccuggagcugacccugaccaacaccagcaucaucaaccacaaguucugcaaccugagcgacgcccacaagaagaaccuguacgaccacgcccugaugagcaucaucagcaccuuccaccugagcauccccaacuucaaccaguacgaggccaugagcugcgacuucaacggcggcaagaucagcgugcaguacaaccugagccacgccuacgccguggacgccgccaaccacugcggcaccaucgccaacggcgugcugcagaccuucaugagaauggccuggggcggcagcuacaucgcccuggacagcggcaagggcagcugggacugcaucaugaccagcuaccaguaccugaucauccagaacaucaccugggaggaccacugccaguucagcagacccagccccaucggcuaccugggccugcugagccagagaaccagagacaucuacaucagcagaagacugcugggcaccuucaccuggacccugagcgacagcgagggcaacgagacccccggcggcuacugccugaccagauggaugcugaucgaggccgagcugaagugcuucggcaacaccgccguggccaagugcaacgagaagcacgacgaggaguucugcgacaugcugagacuguucgacuucugcaagcaggccaucagaagacugaagaccgaggcccagaugagcauccagcugaucaacaaggccgugaacgcccugaucaacgaccagcugaucaugaagaaccaccugagagacaucaugggcauccccuacugcaacuacagcaaguacugguaccugaaccacaccgugaccggcaagaccagccugcccagaugcuggcuggugagcaacggcagcuaccugaacgagacccacuucagcgacgacaucgagcagcaggccgacaacaugaucaccgagcugcugcagaaggaguacaucgacagacagggcaagaccccccugggccugguggaccuguucguguucagcaccagcuucuaccugaucagcaucuuccugcaccuggugaagauccccacccacagacacguggugggcaagcccugccccaagccccacagacugaaccacaugggcaucugcagcugcggccuguacaagcaccccggcgugcccgugaaguggaagagaugaggacuaguuauaagacugacuagcccgaugggccucccaacgggcccuccuccccuccuugcaccgagauuaauaaaaaaaaaaaaaaaaaaaaaaaaaaaaaaaaaaaaaaaaaaaaaaaaaaaaaaaaaaaaaaaaaaaaaaaaaaaaaaaaaaaaaaaaaaaaaaaaaaaa

SEQ ID NO: 38159 - RNA, 1662 nt, Artificial Sequence
  mRNA product Design i-3 (A100) comprising derived and/or modified sequence from LASV(Lassa virus/H.sapiens-wt/NGA/2015/ISTH_0543;Clade II)__AVO03639__GPCmut10 (opt4)
aggagaaagcuuaccaugggccagaucaucaccuucuuccaggaggugccccacgugaucgaggaggugaugaacaucgugcugaucgcccugagccugcuggccauccugaagggcaucuacaacguggccaccugcggccuguucggccuggugagcuuccugcugcugugcggcagaagcugcagcaccaccuacaagggcguguacgagcugcagacccuggagcuggacauggccaaccugaacaugugcaugccccugagcugcaccaagaacaacagccaccacuacaucauggugggcaacgagaccggccuggagcugacccugaccaacaccagcaucaucaaccacaaguucugcaaccugagcgacgcccacaagaagaaccuguacgaccacgcccugaugagcaucaucagcaccuuccaccugagcauccccaacuucaaccaguacgaggccaugagcugcgacuucaacggcggcaagaucagcgugcaguacaaccugagccacaccuacgccguggacgccgccaaccacugcggcaccaucgccaacggcgugcugcagaccuucaugagaauggccuggggcggcagcuacaucgcccuggacagcggcaagggcagcugggacugcaucaugaccagcuaccaguaccuggugauccagaacaccaccugggaggaccacugccaguucagcagacccagccccaucggcuaccugggccugcugagccagagaaccagagacaucuacaucagcagaagacugcugggcaccuucaccuggacccugagcgacagcgagggcaacgagacccccggcggcuacugccugaccagauggaugcugaucgaggccgagcugaagugcuucggcaacaccgccguggccaagugcaacgagaagcacgacgaggaguucugcgacaugcugagacuguucgacuucugcaagcaggccaucagaagacugaagaccgaggcccagaugagcauccagcugaucaacaaggccgugaacgcccugaucaacgaccagcugaucaugaagaaccaccugagagacaucaugggcauccccuacugcaacuacagcaaguacugguaccugaaccacaccgugaccggcaagaccagccugcccagaugcuggcuggugagcaacggcagcuaccugaacgagacccacuucagcgacgacaucgagcagcaggccgacaacaugaucaccgagcugcugcagaaggaguacaucgacagacagggcaagaccccccugggccugguggaccuguucguguucagcaccagcuucuaccugaucagcaucuuccugcaccuggugaagauccccacccacagacacaucaccggcaagcccugccccaagccccacagacugaaccacaugggcaucugcagcugcggccuguacaagcaccccggcgugcccgugaaguggaagagaugaggacuaguuauaagacugacuagcccgaugggccucccaacgggcccuccuccccuccuugcaccgagauuaauaaaaaaaaaaaaaaaaaaaaaaaaaaaaaaaaaaaaaaaaaaaaaaaaaaaaaaaaaaaaaaaaaaaaaaaaaaaaaaaaaaaaaaaaaaaaaaaaaaaa

SEQ ID NO: 38160 - RNA, 1662 nt, Artificial Sequence
  mRNA product Design i-3 (A100) comprising derived and/or modified sequence from LASV(Lassa virus/H.sapiens-wt/NGA/2016/ISTH_0009;Clade II)__AVO03571__GPCmut10 (opt4)
aggagaaagcuuaccaugggccagaucaucaccuucuuccaggaggugccccacgugaucgaggaggugaugaacaucgugcugaucgcccugagccugcuggccauccugaagggcaucuacaacguggccaccugcggccugcugggccuggugagcuuccugcugcugugcggcagaagcugcagcaccaccuacaagggcguguacgagcugcagacccuggagcuggacauggccagccugaacaugugcaugccccugagcugcaccaagaacaacagccaccacuacaucauggugggcaacgagaccggccuggagcugacccugaccaacaccagcaucaucaaccacaaguucugcaaccugagcgacgcccacaagaagaaccuguacgaccacgcccugaugagcaucaucagcaccuuccaccugagcauccccaacuucaaccaguacgaggccaugagcugcgacuucaacggcggcagaaucagcgugcaguacaaccugagccacagcuacgccguggacgccgccaaccacugcggcaccaucgccaacggcgugcugcagaccuucaugagaauggccuggggcggcagcuacaucgcccuggacagcggcaagggcagcugggacugcaucaugaccagcuaccaguaccugaucauccagaacaccaccugggaggaccacugccaguucagcagacccagccccaucggcuaccugggccugcugagccagagaaccagagacaucuacaucagcagaagacugcugggcaccuucaccuggacccugagcgacagcgagggcaacgagacccccggcggcuacugccugaccagauggaugcugaucgaggccgagcugaagugcuucggcaacaccgccguggccaagugcaacgagaagcacgacgaggaguucugcgacaugcugagacuguucgacuucugcaagcaggccaucagaagacugaagaccgaggcccagaugagcauccagcugaucaacaaggccgugaacgcccugaucaacgaccagcugaucaugaagaaccaccugagagacaucaugggcauccccuacugcaacuacagcaaguacugguaccugaaccacaccgugaccggcaagaccagccugcccagaugcuggcuggugagcaacggcagcuaccugaacgagacccacuucagcgacgacaucgagcagcaggccgacaacaugaucaccgagcugcugcagaaggaguacaucgacagacagggcaagaccccccugggccugguggaccuguucguguucagcaccagcuucuaccugaucagcaucuuccugcaccuggugaagauccccacccacagacacaucaccggcaagcccugccccaagccccacagacugaaccacaugggcaucugcagcugcggccuguacaaccaccccggcgugcccgugaaguggaagagaugaggacuaguuauaagacugacuagcccgaugggccucccaacgggcccuccuccccuccuugcaccgagauuaauaaaaaaaaaaaaaaaaaaaaaaaaaaaaaaaaaaaaaaaaaaaaaaaaaaaaaaaaaaaaaaaaaaaaaaaaaaaaaaaaaaaaaaaaaaaaaaaaaaaa

SEQ ID NO: 38161 - RNA, 1662 nt, Artificial Sequence
  mRNA product Design i-3 (A100) comprising derived and/or modified sequence from LASV(Lassa virus/H.sapiens-wt/NGA/2016/ISTH_0017;Clade II)__AVO03567__GPCmut10 (opt4)
aggagaaagcuuaccaugggccagaucaucaccuucuuccaggaggugccccacgugaucgaggaggugaugaacaucgugcugaucgcccugagccugcuggccauccugaagggcaucuacaacguggccaccugcggccuguucggccuggugagcuuccugcugcugugcggcagaagcugcagcaccaccuacaagggcguguacgagcugcagacccuggagcuggacauggccagccugaacaugugcaugccccugagcugcaccaagaacaacagccaccacuacaucauggugggcaacgagaccggccuggagcugacccugaccaacaccagcaucaucaaccacaaguucugcaaccugagcgacgcccacaagaagaaccuguacgaccacgcccugaugagcaucaucagcaccuuccaccugagcauccccaacuucaaccaguacgaggccaugagcugcgacuucaacggcggcaagaucagcgugcaguacaaccugagccacaccuacgccaucgacgccgccaaccacugcggcaccaucgccaacggcgugcugcagaccuucaugagaauggccuggggcggcagcuacaucgcccuggacagcggcaagggcagcugggacugcaucaugaccagcuaccaguaccugaucauccagaacaccaccugggaggaccacugccaguucagcagacccagccccaucggcuaccugggccugcugagccagagaaccagagacaucuacaucagcagaagacugcugggcaccuucaccuggacccugagcgacagcgagggcaacgagacccccggcggcuacugccugaccagauggaugcugaucgaggccgagcugaagugcuucggcaacaccgccguggccaagugcaacgagaagcacgacgaggaguucugcgacaugcugagacuguucgacuucugcaagcaggccaucagaagacugaagaccgaggcccagaugagcauccagcugaucaacaaggccgugaacgcccugaucaacgaccagcugaucaugaagaaccaccugagagacaucaugggcauccccuacugcaacuacagcaaguacugguaccugaaccacaccgugaccggcaagaccagccugcccagaugcuggcuggugagcaacggcagcuaccugaacgagacccacuucagcgacgacaucgagcagcaggccgacaacaugaucaccgagcugcugcagaaggaguacauggacagacagggcaagaccccccugggccugguggaccuguucguguucagcaccagcuucuaccugaucagcaucuuccugcaccuggugagaauccccacccacagacacgugaucggcaagcccugccccaagccccacagacugaaccacaugggcaucugcagcugcggccuguacaagcaccccggcgugcccgugaaguggaagagaugaggacuaguuauaagacugacuagcccgaugggccucccaacgggcccuccuccccuccuugcaccgagauuaauaaaaaaaaaaaaaaaaaaaaaaaaaaaaaaaaaaaaaaaaaaaaaaaaaaaaaaaaaaaaaaaaaaaaaaaaaaaaaaaaaaaaaaaaaaaaaaaaaaaa

SEQ ID NO: 38162 - RNA, 1662 nt, Artificial Sequence
  mRNA product Design i-3 (A100) comprising derived and/or modified sequence from LASV(Lassa virus/H.sapiens-wt/NGA/2018/ISTH_0959;Clade II)__AVV65099__GPCmut10 (opt4)
aggagaaagcuuaccaugggccagaucaucaccuucuuccaggaggugccccacgugaucgaggaggugaugaacaucgugcugaucgcccugagccugcuggccauccugaagggcaucuacaacguggugaccugcggccuguucggccuggugagcuuccugcugcugugcggcagaagcugcagcaccaccuacaagggcguguacgagcugcagacccuggagcuggacauggccagccugaacaugugcaugccccugagcugcaccaagaacaacagccaccacuacaucauggugggcaacgagaccggccuggagcugacccugaccaacaccagcaucaucaaccacaaguucugcaaccugagcgacgcccacaagaagaaccuguacgaccacgcccugaugagcaucaucagcaccuuccaccugagcauccccaacuucaaccaguacgaggccaugagcugcgacuucaacggcggcaagaucagcgugcaguacaaccugagccacgccuacgccaucgacgccgccaaccacugcggcaccaucgccaacggcgugcugcagaccuucaugagaauggccuggggcggcagcuacaucgcccuggacagcggcaagggcagcugggacugcaucaugaccagcuaccaguaccugaucauccagaacaccaccugggaggaccacugccaguucagcagacccagccccaucggcuaccugggccugcugagccagagaaccagagacaucuacaucagcagaagacugcugggcaccuucaccuggacccugagcgacagcgagggcaacgagacccccggcggcuacugccugaccagauggaugcugaucgaggccgagcugaagugcuucggcaacaccgccguggccaagugcaacgagaagcacgacgaggaguucugcgacaugcugagacuguucgacuucugcaagcaggccaucagaagacugaagaccgaggcccagaugagcauccagcugaucaacaaggccgugaacgcccugaucaacgaccagcugaucaugaagaaccaccugagagacaucaugggcauccccuacugcaacuacagcaaguacugguaccugaaccacaccgugaccggcaagaccagccugcccagaugcuggcuggugagcaacggcagcuaccugaacgagacccacuucagcgacgacaucgagcagcaggccgacaacaugaucaccgagcugcugcagaaggaguacaucgacagacagggcaagaccccccugggccugguggaccuguucguguucagcaccagcuucuaccugaucagcaucuuccugcaccuggugaagauccccacccacagacacgugaucggcaagcccugccccaagccccacagacugaaccacaugggcaucugcagcugcggccuguacaagcaccccggcgugcccgugaaguggaagagaugaggacuaguuauaagacugacuagcccgaugggccucccaacgggcccuccuccccuccuugcaccgagauuaauaaaaaaaaaaaaaaaaaaaaaaaaaaaaaaaaaaaaaaaaaaaaaaaaaaaaaaaaaaaaaaaaaaaaaaaaaaaaaaaaaaaaaaaaaaaaaaaaaaaa

SEQ ID NO: 38163 - RNA, 1662 nt, Artificial Sequence
  mRNA product Design i-3 (A100) comprising derived and/or modified sequence from LASV(LASV003-NIG-2008;Clade II)__AIT17580__GPCmut10 (opt4)
aggagaaagcuuaccaugggccagaucaucaccuucuuccaggaggugccccacgugaucgaggaggugaugaacaucgugcugaucgcccugagccugcuggccauccugaagggcaucuacaacguggccaccugcggccuguucggccuggugagcuuccugcugcugugcggcagaagcugcagcaccaccuacaagggcguguacgagcugcagacccuggagcuggacauggccagccugaacaugugcaugccccugagcugcaccaagaacaacagccaccacuacaucauggugggcaacgagaccggccuggagcugacccugaccaacaccagcaucaucaaccacaaguucugcaaccugagcgacgcccacaagaagaaccuguacgaccacgcccugaugagcaucaucagcaccuuccaccugagcauccccaacuucaaccaguacgaggccaugagcugcgacuucaacggcggcaagaucagcgugcaguacaaccugagccacaccuacgccguggacgccgccaaccacugcggcaccaucgccaacggcgugcugcagaccuucaugagaauggccuggggcggcagcuacaucgcccuggacagcggcaagggcagcugggacugcaucaugaccagcuaccaguaccugaucauccagaacaccaccugggaggaccacugccaguucagcagacccagccccaucggcuaccugggccugcugagccagagaaccagagacaucuacaucagcagaagacugcugggcaccuucaccuggacccugagcgacagcgagagcaacgagacccccggcggcuacugccugaccagauggaugcugaucgaggccgagcugaagugcuucggcaacaccgccguggccaagugcaacgagaagcacgacgaggaguucugcgacaugcugagacuguucgacuucugcaagcaggccaucagaagacugaaggccgaggcccagaugagcauccagcugaucaacaaggccgugaacgcccugaucaacgaccagcugaucaugaagaaccaccugagagacaucaugggcauccccuacugcaacuacagcaaguacugguaccugaaccacaccgugaccggcagaaccagccugcccagaugcuggcuggugagcaacggcagcuaccugaacgagacccacuucagcgacgacaucgagcagcaggccgacaacaugaucaccgagcugcugcagaaggaguacauggacagacagggcaagaccccccugggccugguggaccuguucguguucagcaccagcuucuaccugaucagcaucuuccugcaccuggugaagauccccacccacagacacgugaucggcaagcccugccccaagccccacagacugaaccacaugggcaucugcagcugcggccuguacaagcaccccggcgugcccgugaaguggaagagaugaggacuaguuauaagacugacuagcccgaugggccucccaacgggcccuccuccccuccuugcaccgagauuaauaaaaaaaaaaaaaaaaaaaaaaaaaaaaaaaaaaaaaaaaaaaaaaaaaaaaaaaaaaaaaaaaaaaaaaaaaaaaaaaaaaaaaaaaaaaaaaaaaaaa

SEQ ID NO: 38164 - RNA, 1662 nt, Artificial Sequence
  mRNA product Design i-3 (A100) comprising derived and/or modified sequence from LASV(LASV035-NIG-2009;Clade II)__AIT17588__GPCmut10 (opt4)
aggagaaagcuuaccaugggccagaucaucaccuucuuccaggaggugccccacgugaucgaggaggugaugaacaucgugcugaucgcccugagccugcuggccauccugaagggcaucuacaacguggccaccugcggccuguucggccuggugagcuuccugcugcugugcggcagaagcugcagcaccaccuacaagggcguguacgagcugcagacccuggagcuggacauggccagccugaacaugugcaugccccugagcugcaccaagaacaacagccaccacuacaucauggugggcaacgagaccggccuggagcugacccugaccaacaccagcaucaucaaccacaaguucugcaaccugagcgacgcccacaagaagaaccuguacgaccacgcccugaugagcaucaucagcaccuuccaccugagcauccccaacuucaaccaguacgaggccaugagcugcgacuucaacggcggcaagaucagcgugcaguacaaccugagccacgccuacgccguggacgccgccaaccacugcggcaccaucgccaacggcgugcugcagaccuucaugagaauggccuggggcggcagcuacaucgcccuggacagcggcaagggcagcugggacugcaucaugaccagcuaccaguaccugaucauccagaacaccaccugggaggaccacugccaguucagcagacccagccccaucggcuaccugggccugcugagccagagaaccagagacaucuacaucagcagaagacugcugggcaccuucaccuggacccugagcgacagcgagggcaacgagacccccggcggcuacugccugaccagauggaugcugaucgaggccgagcugaagugcuucggcaacaccgccguggccaagugcaacgagaagcacgacgaggaguucugcgacaugcugagacuguucgacuucugcaagcaggccaucagaagacugaaggccgaggcccagaugagcauccagcugaucaacaaggccgugaacgcccugaucaacgaccagcugaucaugaagaaccaccugagagacaucaugggcauccccuacugcaacuacagcaaguacugguaccugaaccacaccgugaccggcaagaccagccugcccagaugcuggcuggugagcaacggcagcuaccugaacgagacccacuucagcgacgacaucgagcagcaggccgacaacaugaucaccgagcugcugcagaaggaguacaucgacagacagggcaagaccccccugggccugguggaccuguucguguucagcaccagcuucuaccugaucagcaucuuccugcaccuggugaagauccccacccacagacacgugaucggcaagcccugccccaagccccacagacugaaccacaugggcaucugcagcugcggccuguacaagcaccccggcgugcccgugaaguggaagagaugaggacuaguuauaagacugacuagcccgaugggccucccaacgggcccuccuccccuccuugcaccgagauuaauaaaaaaaaaaaaaaaaaaaaaaaaaaaaaaaaaaaaaaaaaaaaaaaaaaaaaaaaaaaaaaaaaaaaaaaaaaaaaaaaaaaaaaaaaaaaaaaaaaaa

SEQ ID NO: 38165 - RNA, 1662 nt, Artificial Sequence
  mRNA product Design i-3 (A100) comprising derived and/or modified sequence from LASV(LASV1000-NIG-2009;Clade II)__AIT17782__GPCmut10 (opt4)
aggagaaagcuuaccaugggccagaucaucaccuucuuccaggaggugccccacgugaucgaggaggugaugaacaucgugcugaucgcccugagccugcuggccauccugaagggcaucuacaacguggccaccugcggccuguucggccuggugagcuuccugcugcugugcggcagaagcugcagcaccaccuacaagggcguguacgagcugcagacccuggagcuggacauggccagccugaacaugugcaugccccugagcugcaccaagaacaacagccaccacuacaucauggugggcaacgagaccggccuggagcugacccugaccaacaccagcaucaucaaccacaaguucugcaaccugagcgacgcccacaagaagaaccuguacgaccacgcccugaugagcaucaucagcaccuuccaccugagcauccccaacuucaaccaguacgaggccaugagcugcgacuucaacggcggcaagaucagcgugcaguacaaccugagccacaccuacgccguggacgccgccaaccacugcggcaccaucgccaacggcgugcugcagaccuucaugagaauggccuggggcggcagcuacaucgcccuggacagcggcaagggcagcugggacugcaucaugaccagcuaccaguaccugaucauccagaacaccaccugggaggaccacugccaguucagcagacccagccccaucggcuaccugggccugcugagccagagaaccagagacaucuacaucagcagaagacugcugggcaccuucaccuggacccugagcgacagcgagggcaacgagacccccggcggcuacugccugaccagauggaugcugaucgaggccgagcugaagugcuucggcaacaccgccguggccaagugcaacgagaagcacgacgaggaguucugcgacaugcugagacuguucgacuucugcaagcaggccaucaagagacugaagaccgaggcccagaugagcauccagcugaucaacaaggccgugaacgcccugaucaacgaccagcugaucaugaagaaccaccugagagacaucaugggcauccccuacugcaacuacagcaaguacugguaccugaaccacaccgugaccggcaagaccagccugcccagaugcuggcuggugagcaacggcagcuaccugaacgagacccacuucagcgacgacaucgagcagcaggccgacaacaugaucaccgagcugcugcagaaggaguacaucgacagacagggcaagaccccccugggccugguggaccuguucguguucagcaccagcuucuaccugaucagcaucuuccugcaccuggugaagauccccacccacagacacguggugggcaagcccugccccaagccccacagacugaaccacaugggcaucugcagcugcggccuguacaagcaccccggcgugcccgugaaguggaagagaugaggacuaguuauaagacugacuagcccgaugggccucccaacgggcccuccuccccuccuugcaccgagauuaauaaaaaaaaaaaaaaaaaaaaaaaaaaaaaaaaaaaaaaaaaaaaaaaaaaaaaaaaaaaaaaaaaaaaaaaaaaaaaaaaaaaaaaaaaaaaaaaaaaaa

SEQ ID NO: 38166 - RNA, 1662 nt, Artificial Sequence
  mRNA product Design i-3 (A100) comprising derived and/or modified sequence from LASV(LASV221-NIG-2010;Clade II)__AIT17624__GPCmut10 (opt4)
aggagaaagcuuaccaugggccagaucaucaccuucuuccaggaggugccccacgugaucgaggaggugaugaacaucgugcugaucgcccugagccugcuggccauccugaagggcaucuacaacguggccaccugcggccuguucggccuggugagcuuccugcugcugugcggcagaagcugcagcaccaccuacaagggcguguacgagcugcagacccuggagcuggacauggccagccugaacaugugcaugccccugagcugcaccaagaacaacagccaccacuacaucauggugggcaacgagaccggccuggagcugacccugaccaacaccagcaucaucaaccacaaguucugcaaccugagcgacgcccacaagaagaaccuguacgaccacgcccugaugagcaucaucagcaccuuccaccugagcauccccaacuucaaccaguacgaggccaugagcugcgacuucaacggcggcaagaucagcgugcaguacaaccugagccacaccuacgccaucgacgccgccaaccacugcggcaccaucgccaacggcgugcugcagaccuucaugagaauggccuggggcggcagcuacaucgcccuggacagcggcaagggcagcugggacugcaucaugaccagcuaccaguaccugaucauccagaacaccaccugggaggaccacugccaguucagcagacccagccccaucggcuaccugggccugcugagccagagaaccagagacaucuacaucagcagaagacugcugggcaccuucaccuggacccugagcgacagcgagggcaacgagacccccggcggcuacugccugaccagauggaugcugaucgaggccgagcugaagugcuucggcaacaccgccguggccaagugcaacgagaagcacgacgaggaguucugcgacaugcugagacuguucgacuucugcaagcaggccaucagaagacugaagaccgaggcccagaugagcauccagcugaucaacaaggccgugaacgcccugaucaacgaccagcugaucaugaagaaccaccugagagacaucaugggcauccccuacugcaacuacagcaaguacugguaccugaaccacaccgugaccggcaagaccagccugcccagaugcuggcuggugagcaacggcagcuaccugaacgagacccacuucagcgacgacaucgagcagcaggccgacaacaugaucaccgagaugcugcagaaggaguacauggacagacagggcaagaccccccugggccugguggaccuguucguguucagcaccagcuucuaccugaucagcaucuuccugcaccuggugaagauccccacccacagacacgugaucggcaagcccugccccaagccccacagacugaaccacaugggcaucugcagcugcggccuguacaagcaccccggcgugcccgugaaguggaagagaugaggacuaguuauaagacugacuagcccgaugggccucccaacgggcccuccuccccuccuugcaccgagauuaauaaaaaaaaaaaaaaaaaaaaaaaaaaaaaaaaaaaaaaaaaaaaaaaaaaaaaaaaaaaaaaaaaaaaaaaaaaaaaaaaaaaaaaaaaaaaaaaaaaaa

SEQ ID NO: 38167 - RNA, 1662 nt, Artificial Sequence
  mRNA product Design i-3 (A100) comprising derived and/or modified sequence from LASV(LASV237-NIG-2010;Clade II)__AIT17638__GPCmut10 (opt4)
aggagaaagcuuaccaugggccagaucaucaccuucuuccaggaggugccccacgugaucgaggaggugaugaacaucgugcugaucgcccugagccugcuggccauccugaagggcaucuacaacguggccaccugcggccuguucggccuggugagcuuccugcugcugugcggcagaagcugcagcaccaccuacaagggcguguacgagcugcagacccuggagcuggacauggccagccugaacaugugcaugccccugagcugcaccaagaacaacagccaccacuacaucauggugggcaacgagaccggccuggagcugacccugaccaacaccagcaucaucaaccacaaguucugcaaccugagcgacgcccacaagaaggaccuguacgaccacgcccugaugagcaucaucagcaccuuccaccugagcauccccaacuucaaccaguacgaggccaugagcugcgacuucaacggcggcaagaucagcgugcaguacaaccugagccacaccuacgccguggacgccgccaaccacugcggcaccaucgccaacggcgugcugcagaccuucaugagaauggccuggggcggcagcuacaucgcccuggacagcggcaagggcagcugggacugcaucaugaccagcuaccaguaccugaucauccagaacaccaccugggaggaccacugccaguucagcagacccagccccaucggcuaccugggccugcugagccagagaaccagagacaucuacaucagcagaagacugcugggcaccuucaccuggacccugagcgacagcgagggcaacgagacccccggcggcuacugccugaccagauggaugcugaucgaggccgagcugaagugcuucggcaacaccgccguggccaagugcaacgagaagcacgacgaggaguucugcgacaugcugagacuguucgacuucugcaagcaggccaucagaagacugaagaccgaggcccagaugagcauccagcugaucaacaaggccgugaacgcccugaucaacgaccagcugaucaugaagaaccaccugagagacaucaugggcauccccuacugcaacuacagcaaguacugguaccugaaccacaccgugaccggcaagaccagccugcccagaugcuggcuggugagcaacggcagcuaccugaacgagacccacuucagcgacgacaucgagcagcaggccgacaacaugaucaccgagcugcugcagaaggaguacauggacagacagggcaagaccccccugggccugguggaccuguucguguucagcaccagcuucuaccugaucagcaucuuccugcaccugaucaagauccccacccacagacacaucaccggcaagcccugccccaagccccacagacugaaccacaugggcaucugcagcugcggccuguacaagcaccccggcgugcccgugaaguggaagagaugaggacuaguuauaagacugacuagcccgaugggccucccaacgggcccuccuccccuccuugcaccgagauuaauaaaaaaaaaaaaaaaaaaaaaaaaaaaaaaaaaaaaaaaaaaaaaaaaaaaaaaaaaaaaaaaaaaaaaaaaaaaaaaaaaaaaaaaaaaaaaaaaaaaa

SEQ ID NO: 38168 - RNA, 1662 nt, Artificial Sequence
  mRNA product Design i-3 (A100) comprising derived and/or modified sequence from LASV(LASV253-NIG-2011;Clade II)__AIT17670__GPCmut10 (opt4)
aggagaaagcuuaccaugggccagaucaucaccuucuuccaggaggugccccacgugaucgaggaggugaugaacaucgugcugaucgcccugagccugcuggccauccugaagggcaucuacaacguggccaccugcggccuguucggccuggugagcuuccugcugcugugcggcagaagcugcagcaccaccuacaagggcguguacgagcugcagacccuggagcuggacauggccagccugaacaugugcaugccccugagcugcaccaagaacaacagccaccacuacaucauggugggcaacgagaccggccuggagcugacccugaccaacaccagcaucaucaaccacaaguucugcaaccugagcgacgcccacaagaagaaccuguacgaccacgcccugaugagcaucaucagcaccuuccaccugagcauccccaacuucaaccaguacgaggccaugagcugcgacuucaacggcggcaagaucagcgugcaguacaaccugagccacaccuacgccguggacgccgccaaccacugcggcaccaucgccaacggcgugcugcagaccuucaugagaauggccuggggcggcagcuacaucgcccuggacagcggcaagggcagcugggacugcaucaugaccagcuaccaguaccugaucauccagaacaccaccugggaggaccacugccaguucagcagacccagccccaucggcuaccugggccugcugagccagagaaccagagacaucuacaucagcagaagacugcugggcaccuucaccuggacccugagcgacagcgagggcaacgagacccccggcggcuacugccugaccagauggaugcugaucgaggccgagcugaagugcuucggcaacaccgccguggccaagugcaacgagaagcacgacgaggaguucugcgacaugcugagacuguucgacuucugcaagcaggccaucagaagacugaaggccgaggcccagaugagcauccagcugaucaacaaggccgugaacgcccugaucaacgaccagcugaucaugaagaaccaccugagagacaucaugggcauccccuacugcaacuacagcaaguacugguaccugaaccacaccgugaccggcagaaccagccugcccagaugcuggcuggugagcaacggcagcuaccugaacgagacccacuucagcgacgacaucgagcagcaggccgacaacaugaucaccgagcugcugcagaaggaguacaucgacagacagggcaagaccccccugggccugguggaccuguucguguucagcaccagcuucuaccugaucagcaucuuccugcaccuggugaagauccccacccacagacacaucaucggcaagcccugccccaagccccacagacugaaccacaugggcaucugcagcugcggccuguacaagcaccccggcgugcccgugaaguggaagagaugaggacuaguuauaagacugacuagcccgaugggccucccaacgggcccuccuccccuccuugcaccgagauuaauaaaaaaaaaaaaaaaaaaaaaaaaaaaaaaaaaaaaaaaaaaaaaaaaaaaaaaaaaaaaaaaaaaaaaaaaaaaaaaaaaaaaaaaaaaaaaaaaaaaa

SEQ ID NO: 38169 - RNA, 1662 nt, Artificial Sequence
  mRNA product Design i-3 (A100) comprising derived and/or modified sequence from LASV(LASV254-NIG-2011;Clade II)__AIT17674__GPCmut10 (opt4)
aggagaaagcuuaccaugggccagaucaucaccuucuuccaggaggugccccacgugaucgaggaggugaugaacaucgugcugaucgcccugagccugcuggccauccugaagggcaucuacaacguggccaccugcggccuguucggccuggugagcuuccugcugcugugcggcagaagcugcagcaccaccuacaagggcguguacgagcugcagacccuggagcuggacaugaccaaccugaacaugugcaugccccugagcugcaccaagaacaacagccaccacuacaucauggugggcaacgagaccggccuggagcugacccugaccaacaccagcaucaucaaccacaaguucugcaaccugagcgacgcccacaagaagaaccuguacaaccacgcccugaugagcaucaucagcaccuuccaccugagcauccccaacuucaaccaguacgaggccaugagcugcgacuucaacggcggcaagaucagcgugcaguacaaccugagccacagcuacgccguggacgccgccaaccacugcggcaccaucgccaacggcgugcugcagaccuucaugagaauggccuggggcggcagcuacaucgcccuggacagcggcaagggcaacugggacugcaucaugaccagcuaccaguaccugaucauccagaacaccaccugggaggaccacugccaguucagcagacccagccccaucggcuaccugggccugcugagccagagaaccagagacaucuacaucagcagaagacugcugggcaccuucaccuggacccugagcgacagcgagggcaacgagacccccggcggcuacugccugaccagauggaugcugaucgaggccgagcugaagugcuucggcaacaccgccguggccaagugcaacgagaagcacgacgaggaguucugcgacaugcugagacuguucgacuucugcaagcaggccaucagaagacugaagaccgaggcccaggccaacauccagcugaucaacaaggccgugaacgcccugaucaacgaccagcugaucaugaagaaccaccugagagacaucaugggcauccccuacugcaacuacagcaaguacugguaccugaaccacaccgugaccggcaagaccagccugcccagaugcuggcuggugagcaacggcagcuaccugaacgagacccacuucagcgacgacaucgagcagcaggccgacaacaugaucaccgagcugcugcagaaggaguacauggacagacagggcaagaccccccugggccugguggaccuguucguguucagcaccagcuucuaccugaucagcaucuuccugcaccuggugaagauccccacccacagacacgugaucggcaagcccugccccaagccccacagacugaaccacaugggcaucugcagcugcggccuguacaagcaccccggcgugcccgugaaguggaagagaugaggacuaguuauaagacugacuagcccgaugggccucccaacgggcccuccuccccuccuugcaccgagauuaauaaaaaaaaaaaaaaaaaaaaaaaaaaaaaaaaaaaaaaaaaaaaaaaaaaaaaaaaaaaaaaaaaaaaaaaaaaaaaaaaaaaaaaaaaaaaaaaaaaaa

SEQ ID NO: 38170 - RNA, 1662 nt, Artificial Sequence
  mRNA product Design i-3 (A100) comprising derived and/or modified sequence from LASV(Nig08-A19;Clade III)__ADU56618__GPCmut10 (opt4)
aggagaaagcuuaccaugggccagaucgugaccuucuuccaggaggugccccacgugaucgaggaggugaugaacaucgugcugaucgcccugagcauccuggccauccugaagggccuguacaacaucgccaccugcggccugaucggccuggugaccuuccugcugcugagcggcagaagcugcagcaugaccuacaagggcguguacgagcugcagacccuggagcugaacaugaacacccugaacaugugcaugccccugagcugcaccaagaacaacagccaccacuacaucauggugggcaacgagaccggccuggagcugacccugaccaacaccagccugcugcaccacaaguucugcaaccugagcgacgcccacaagaagaaccuguacgaccacacccugaugagcaucaucagcaccuuccaccugagcauccccaacuucaaccaguacgaggccaugagcugcgacuucaacggcggcaagaucaccgugcaguacaaccugagccacagcuacgccaucgacgccgccaaccacugcggcaccguggccaacggcgugcugcagaccuucaugagaauggccuggggcggcagcuacaucgcccuggacagcggcagaggcaagugggacugcaucaugaccagcuaccaguaccugaucauccagaacaccaccugggaggaccacugccaguucagcagacccagccccaucggcuaccugggccugcugagccagagaaccagagacaucuacaucagcagaagacugcugggcaccuucaccuggacccugagcgacagcgagggcaacgagacccccggcggcuacugccugaccagauggaugcugaucgaggccgagcugaagugcuucggcaacaccgccguggccaagugcaacgagaagcacgacgaggaguucugcgacaugcugagacuguucgacuucugcaagcaggccaucagaagacugaaggccgaggcccagaugagcauccagcugaucaacaaggccgugaacgcccugaucaacgaccagcugaucaugaagaaccaccugagagacaucaugggcauccccuacugcaacuacagcaaguacugguaccugaaccacaccagcaccggcagaaccagccugcccagaugcuggcuggugagcaacggcagcuaccugaacgagacccacuucagcgacgacaucgagcagcaggccgacaacaugaucaccgagaugcugcagaaggaguaccuggacagacagggcaagaccccccugggccugguggaccuguucguguucagcaccagcuucuaccugaucagcaucuuccugcaccuggugaagauccccacccacagacacaucgugggcaagcccugccccaagccccacagacugaaccacaugggcaucugcagcugcggccuguacaagcagcccggcgugcccgugagauggaagagaugaggacuaguuauaagacugacuagcccgaugggccucccaacgggcccuccuccccuccuugcaccgagauuaauaaaaaaaaaaaaaaaaaaaaaaaaaaaaaaaaaaaaaaaaaaaaaaaaaaaaaaaaaaaaaaaaaaaaaaaaaaaaaaaaaaaaaaaaaaaaaaaaaaaa

SEQ ID NO: 38171 - RNA, 1665 nt, Artificial Sequence
  mRNA product Design i-3 (A100) comprising derived and/or modified sequence from LASV(G1180-SLE-2010;Clade IV)__AIT17168__GPCmut10 (opt4)
aggagaaagcuuaccaugggccagaucgugaccuucuuccaggaggugccccacgugaucgaggaggugaugaacaucgugcugaucgcccugagcauccuggccgugcugaagggccuguacaacuucgccaccugcggccuggugggccugcugaccuuccugcugcugugcggcagaagcugcaccgccagcagauacaagggcguguacgagcugcagacccuggagcugaacauggagacccugaacaugugcaugccccugagcugcaccaagaacaacagccaccacuacaucauggugggcaacgagaccggccuggagcugacccugaccaacaccagcaucaucaaccacaaguucugcaaccugagcgacgcccacaagaagaaccuguacgaccacgcccugaugagcaucaucagcaccuuccaccugagcauccccaacuucaaccaguacgaggccaugagcugcgacuucaacggcggcaagaucagcgugcaguacaaccugagccacagcuacgccggcgacgccgccaaccacugcggcaccguggccaacggcgugcugcagaccuucaugagaauggccuggggcggcagcuacaucgcccuggacagcggccacggcagcugggacugcaucaugaccagcuaccaguaccugaucauccagaacaccaccugggaggaccacugccaguucagcagacccagccccaucggcuaccugggccugcugagccagagaaccagagacaucuacaucagcagaagacugcugggcaccuucaccuggacccugagcgacagcgagggcaaggacacccccggcggcuacugccugaccagauggaugcugaucgaggccgagcugaagugcuucggcaacaccgccguggccaagugcaacgagaagcacgacgaggaguucugcgacaugcugagacuguucgacuucugcaagcaggccauccagagacugaaggccgaggcccagaugagcauccagcugaucaacaaggccgugaacgcccugaucaacgaccagcugaucaugaagaaccaccugagagacaucaugggcauccccuacugcaacuacagcaaguacugguaccugaaccacaccaccaccggcaagaccagccugcccaagugcuggcuggugagcaacggcagcuaccugaacgagacccacuucagcgacgacaucgagcagcaggccgacaacaugaucaccgagaugcugcagaaggaguacauggagagacagggcaagaccccccugggccugguggaccuguucguguucagcaccagcuucuaccugaucagcaucuuccugcaccuggugaagauccccacccacagacacaucgugggcaagagcugccccaagccccacagacugaaccacaugggcaucugcagcugcggccuguacaagcagcccggcgugcccgugaaguggaagagaugaggacuaguuauaagacugacuagcccgaugggccucccaacgggcccuccuccccuccuugcaccgagauuaauaaaaaaaaaaaaaaaaaaaaaaaaaaaaaaaaaaaaaaaaaaaaaaaaaaaaaaaaaaaaaaaaaaaaaaaaaaaaaaaaaaaaaaaaaaaaaaaaaaaa

SEQ ID NO: 38172 - RNA, 1665 nt, Artificial Sequence
  mRNA product Design i-3 (A100) comprising derived and/or modified sequence from LASV(G1442-SLE-2011;Clade IV)__AIT17180__GPCmut10 (opt4)
aggagaaagcuuaccaugggccagaucgugaccuucuuccaggaggugccccacgugaucgaggaggugaugaacaucgugcugaucgcccugagcauccuggccgugcugaagggccuguacaacguggccaccugcggccugaucggccuggugaccuuccugcugcugugcggcagaagcugcaccaccacccuguacaagggcguguacgagcugcagacccuggagcugaacauggagacccugaacaugugcaugccccugagcugcaccaagaacaacagccaccacuacaucagagugggcaacgagaccggccuggagcugacccugaccaacaccagcaucaucaaccacaaguucugcaaccugagcgacgcccacaagaagaaccuguacgaccacgcccugaugagcaucaucagcaccuuccaccugagcauccccaacuucaaccaguacgaggccaugagcugcgacuucaacggcggcaagaucagcgugcaguacaaccugagccacagcuacgccggcgacgccgccaaccacugcggcaccguggccaacggcgugcugcagaccuucaugagaauggccuggggcggcagcuacaucgcccuggacagcggcagaggcaacugggacugcaucaugaccagcuaccaguaccugaucauccagaacaccaccugggacgaccacugccaguucagcagacccagccccaucggcuaccugggccugcugagccagagaaccagagacguguacaucagcagaagacugcugggcaccuucaccuggacccugagcgacagcgagggcaaggacacccccggcggcuacugccugaccagauggaugcugaucgaggccgagcugaagugcuucggcaacaccgccguggccaagugcaacgagaagcacgacgaggaguucugcgacaugcugagacuguucgacuucugcaagcaggccauccagagacugaaggccgaggcccagaugagcauccagcugaucaacaaggccgugaacgcccugaucaacgaccagcugaucaugaagaaccaccugagagacaucaugggcauccccuacugcaacuacagcaaguacugguaccugaacaacaccgccaccggcaagaccagccugcccaagugcuggcugaucagcaacggcagcuaccugaacgagacccacuucagcgacgacaucgagcaggaggccgacaacaugaucaccgagaugcugcagaaggaguacauggagagacagggcaagaccccccugggccugguggaccuguucguguucagcaccagcuucuaccugaucagcaucuuccugcaccuggugaagauccccacccacagacacaucgugggcaagagcugccccaagccccacagacugaaccacaugggcaucugcagcugcggccuguacaagcagcccggcgugcccgugagauggaagagaugaggacuaguuauaagacugacuagcccgaugggccucccaacgggcccuccuccccuccuugcaccgagauuaauaaaaaaaaaaaaaaaaaaaaaaaaaaaaaaaaaaaaaaaaaaaaaaaaaaaaaaaaaaaaaaaaaaaaaaaaaaaaaaaaaaaaaaaaaaaaaaaaaaaa

SEQ ID NO: 38173 - RNA, 1665 nt, Artificial Sequence
  mRNA product Design i-3 (A100) comprising derived and/or modified sequence from LASV(G3010-SLE-2013;Clade IV)__AIT17344__GPCmut10 (opt4)
aggagaaagcuuaccaugggccagaucgugaccuucuuccaggaggugccccacgugaucgaggaggugaugaacaucgugcugaucgcccugagcauccuggccgugcugaagggccuguacaacuucgccaccugcggccuggugggccuggugaccuuccugcugcugugcggcagaagcugcaccaccagccuguacaagggcguguacgagcugcagacccuggagcugaacauggagacccugaacaugugcaugccccugagcugcaccaagaacaacagccaccacuacaucauggugggcaacgagaccggccuggagcugacccugaccaacaccagcaucaucaaccacaaguucugcaaccugagcgacgcccacaagaagaaccuguacaaccacgcccugaugagcaucaucagcaccuuccaccugagcauccccaacuucaaccaguacgaggccaugagcugcgacuucaacggcggcaagaucagcgugcaguacaaccugagccacagcuacgccggcgacgccgccagccacugcggcaccguggccaacggcgugcugcagaccuucaugagaauggccuggggcggcagcuacaucgcccuggacagcggcuacggcaagugggacugcaucaugaccagcuaccaguaccugaucauccagaacaccaccugggaggaccacugccaguucagcagacccagccccaucggcuaccugggccugcugagccagagaaccagagacaucuacaucagcagaagacugcugggcaccuucaccuggacccugagcgacagcgagggcaaggacacccccggcggcuacugccugaccagauggaugcugaucgaggccgagcugaagugcuucggcaacaccgccguggccaagugcaacgagaagcacgacgaggaguucugcgacaugcugagacuguucgacuucugcaagcaggccauccagagacugaagaccgaggcccagaugagcauccagcugaucaacaaggccgugaacgcccugaucaacgaccagcugaucaugaagaaccaccugagagacaucaugggcauccccuacugcaacuacagcaaguacugguaccugaaccacaccaccaccggcaagaccagccugcccaagugcuggcuggugagcaacggcagcuaccugaacgagacccacuucagcgacgacaucgagcagcaggccgacaacaugaucaccgagaugcugcagaaggaguacauggagagacagggcaagaccccccugggccugguggaccuguucguguucagcaccagcuucuaccugaucagcaucuuccugcaccuggugaagauccccacccacagacacaucgugggcaagagcugccccaagccccacagacugaaccacaugggcaucugcagcugcggccuguacaagcagcccggcgugcccgugagauggaagagaugaggacuaguuauaagacugacuagcccgaugggccucccaacgggcccuccuccccuccuugcaccgagauuaauaaaaaaaaaaaaaaaaaaaaaaaaaaaaaaaaaaaaaaaaaaaaaaaaaaaaaaaaaaaaaaaaaaaaaaaaaaaaaaaaaaaaaaaaaaaaaaaaaaaa

SEQ ID NO: 38174 - RNA, 1665 nt, Artificial Sequence
  mRNA product Design i-3 (A100) comprising derived and/or modified sequence from LASV(G502-SLE-2009;Clade IV)__AIT17126__GPCmut10 (opt4)
aggagaaagcuuaccaugggccagaucgugaccuucuuccaggaggugccccacgugaucgaggaggugaugaacaucgugcugaucgcccugagcauccuggccgugcugaagggccuguacaacuucgccaccugcggccuggugggccugcugaccuuccugcugcugugcggcagaagcugcaccaccggccuguacaagggcguguacgagcugcagacccuggagcugaacauggagacccugaacaugugcaugccccugagcugcaccaagaacaacagccaccacuacaucauggugggcaacgagaccggccuggagcugacccugaccaacaccagcaucaucaaccacaaguucugcaaccugagcgacgcccacaagaagaaccuguacgaccacgcccugaugagcaucaucagcaccuuccaccugagcauccccaacuucaaccaguacgaggccaugagcugcgacuucaacggcggcaagaucagcgugcaguacaaccugagccacagcuacgccggcgacgccgccgaccacugcggcaccguggccaacggcgugcugcagaccuucaugagaauggccuggggcggcagcuacaucgcccuggacagcggcagaggcagaugggacugcaucaugaccagcuaccaguaccugaucauccagaacaccaccugggaggaccacugccaguucagcagacccagccccaucggcuaccugggccugcugagccagagaaccagagacaucuacaucagcagaagacugcugggcaccuucaccuggacccugagcgacagcgagggcaaggacacccccggcggcuacugccugaccagauggaugcugaucgaggccgagcugaagugcuucggcaacaccgccguggccaagugcaacgagaagcacgacgaggaguucugcgacaugcugagacuguucgacuucugcaagcaggccauccagagacugaaggccgaggcccagaugagcauccagcugaucaacaaggccgugaacgcccugaucaacgaccagcuggugaugaagaaccaccugagagacaucaugggcauccccuacugcaacuacagcagauacugguaccugaaccacaccaccaccggcagaaccagccugcccaagugcuggcuggugagcaacggcagcuaccugaacgagacccacuucagcgacgacaucgagcagcaggccgacaacaugaucaccgagaugcugcagaaggaguacauggagagacagggcaagaccccccugggccugguggaccuguucguguucagcaccagcuucuaccugaucagcaucuuccugcaccuggugaagauccccacccacagacacaucgugggcaagagcugccccaagccccacagacugaaccacaugggcaucugcagcugcggccuguacaagcagcccggcgugcccgugaaguggaagagaugaggacuaguuauaagacugacuagcccgaugggccucccaacgggcccuccuccccuccuugcaccgagauuaauaaaaaaaaaaaaaaaaaaaaaaaaaaaaaaaaaaaaaaaaaaaaaaaaaaaaaaaaaaaaaaaaaaaaaaaaaaaaaaaaaaaaaaaaaaaaaaaaaaaa

SEQ ID NO: 38175 - RNA, 1665 nt, Artificial Sequence
  mRNA product Design i-3 (A100) comprising derived and/or modified sequence from LASV(G733-SLE-2010;Clade IV)__AIT17154__GPCmut10 (opt4)
aggagaaagcuuaccaugggccagaucgugaccuucuuccaggaggugccccacgugaucgaggaggugaugaacaucgugcugaucgcccugagcauccuggccgugcugaagggccuguacaacuucgccaccugcggcaucgugggccuggugagcuuccugcugcugugcggcagaagcugcaccaccagccuguacaagggcguguacgagcugcagacccuggagcugaacauggagacccugaacaugugcaugccccugagcugcaccaagaacaacagccaccacuacaucauggugggcaacgagaccggccuggagcugacccugaccaacaccagcaucaucaaccacaaguucugcaaccugagcgacgcccacaagaagaaccuguacgaccacgcccugaugagcaucaucagcaccuuccaccugagcauccccaacuucaaccaguacgaggccaugagcugcgacuucaacggcggcaagaucagcgugcaguacaaccugagccacagcuacgccggcgacgccgccaaccacugcggcaccaucgccaacggcgugcugcagaccuucaugagaauggccuggggcggcagcuacaucgcccuggacagcggcagagacagaugggacugcaucaugaccagcuaccaguaccugaucauccagaacaccaccugggaggaccacugccaguucagcagacccagccccaucggcuaccugggccugcugagccagagaaccagagacaucuacaucagcagaagacugcugggcaccuucaccuggacccugagcgacagcgagggcaaggacacccccggcggcuacugccugaccagauggaugcugaucgaggccgagcugaagugcuucggcaacaccgccguggccaagugcaacgagaagcacgacgaggaguucugcgacaugcugagacuguucgacuucugcaagcaggccauccagagacugaaggccgaggcccagaugagcauccagcugaucaacaaggccgugaacgcccugaucaacgaccagcugaucaugaagaaccaccugagagacaucaugggcauccccuacugcaacuacagcaaguacugguaccugaaccacaccaccaccggcaagaccagccugcccaagugcuggcuggugagcaacggcagcuaccugaacgagacccacuucagcgacgacaucgagcagcaggccgacaacaugaucaccgagaugcugcagaaggaguacauggagagacagggcaagaccccccugggccugguggaccuguucguguucagcaccagcuucuaccugaucagcaucuuccugcaccuggugaagauccccacccacagacacguggugggcaagagcugccccaagccccacagacugaaccacaugggcaucugcagcugcggccuguacggccagcccggcgugcccgugaaguggaagagaugaggacuaguuauaagacugacuagcccgaugggccucccaacgggcccuccuccccuccuugcaccgagauuaauaaaaaaaaaaaaaaaaaaaaaaaaaaaaaaaaaaaaaaaaaaaaaaaaaaaaaaaaaaaaaaaaaaaaaaaaaaaaaaaaaaaaaaaaaaaaaaaaaaaa

SEQ ID NO: 38176 - RNA, 1665 nt, Artificial Sequence
  mRNA product Design i-3 (A100) comprising derived and/or modified sequence from MOPV/LASV reassortant(IGS-1;Clade IV)__AFY05576__GPCmut10 (opt4)
aggagaaagcuuaccaugggccagaucgugaccuucuuccaggaggugccccacgugaucgaggaggugaugaacaucgugcugaucgcccugagcgugcuggccgugcugaagggccuguacaacuucgccaccugcggccuggugggccuggugaccuuccugcugcugugcggcagaagcugcaccaccagccuguacaagggcguguacgagcugcagacccuggagcugaacauggagacccugaacaugugcaugccccugagcugcaccaagaacaacagccaccacuacaucauggugggcaacgagaccggccuggagcugacccugaccaacaccagcaucaucaaccacaaguucugcaaccugagcgacgcccacaagaagaaccuguacgaccacgcccugaugagcaucaucagcaccuuccaccugagcauccccaacuucaaccaguacgaggccaugagcugcgacuucaacggcggcaagaucagcgugcaguacaaccugagccacagcuacgccggcgacgccgccaaccacugcggcaccguggccaacggcgugcugcagaccuucaugagaauggccuggggcggcagcuacaucgcccuggacagcggcagaggcaacugggacugcaucaugaccagcuaccaguaccugaucauccagaacaccaccugggaggaccacugccaguucagcagacccagccccaucggcuaccugggccugcugagccagagaaccagagacaucuacaucagcagaagacugcugggcaccuucaccuggacccugagcgacagcgagggcgaggacacccccggcggcuacugccugaccagauggaugcugaucgaggccgagcugaagugcuucggcaacaccgccguggccaagugcaacgagaagcacgacgaggaguucugcgacaugcugagacuguucgacuucugcaagcaggccauccagagacugaaggccgaggcccagaugagcauccagcugaucaacaaggccgugaacgcccugaucaacgaccagcugaucaugaagaaccaccugagagacaucaugggcauccccuacugcaacuacagcaaguacugguaccugaaccacaccaccaccggcagaaccagccugcccaagugcuggcuggugagcaacggcagcuaccugaacgagacccacuucagcgacgacaucgagcagcaggccgacaacaugaucaccgagaugcugcagaaggaguacauggagagacagggcaagaccccccugggccugguggaccuguucguguucagcaccagcuucuaccugaucagcaucuuccugcaccuggugaagauccccacccacagacacaucgugggcaagagcugccccaagccccacagacugaaccacaugggcaucugcagcugcggccuguacaagcagcccggcgugcccgugaaguggaagagaugaggacuaguuauaagacugacuagcccgaugggccucccaacgggcccuccuccccuccuugcaccgagauuaauaaaaaaaaaaaaaaaaaaaaaaaaaaaaaaaaaaaaaaaaaaaaaaaaaaaaaaaaaaaaaaaaaaaaaaaaaaaaaaaaaaaaaaaaaaaaaaaaaaaa

SEQ ID NO: 38177 - RNA, 1665 nt, Artificial Sequence
  mRNA product Design i-3 (A100) comprising derived and/or modified sequence from LASV(LM765-SLE-2012;Clade IV)__AIT17814__GPCmut10 (opt4)
aggagaaagcuuaccaugggccagaucgugaccuucuuccaggaggugccccacgugaucgaggaggugaugaacaucgugcugaucgcccugagcauccuggccgugcugaagggccuguacaacuucgccaccugcggccuggugggccuggugaccuuccugcugcugugcggcagaagcugcaccaccagccuguacaagggcguguacgagcugcagacccuggagcugaacauggagacccugaacaugugcaugccccugagcugcaccaagaacaacagccaccacuacaucauggugggcaacgagaccggccuggagcugacccugaccaacaccagcaucaucgaccacaaguucugcaaccugagcgacgcccacagaaagaaccuguacgaccacgcccugaugagcaucaucagcaccuuccaccugagcauccccaacuucaaccaguacgaggccaugagcugcgacuucaacggcggcaagaucagcgugcaguacaaccugagccacagcuacgccaaggacgccgccgaccacugcggcaccguggccaacggcgugcugcagaccuucaugagaauggccuggggcggcagcuacaucgcccuggacagcggcagaggcagaugggacugcaucaugaccagcuaccaguaccugaucauccagaacaccaccugggaggaccacugccaguucagcagacccagccccaucggcuaccugggccugcugagccagagaaccagagacaucuacaucagcagaagacugcugggcaccuucaccuggacccugagcgacagcgagggcaaggacacccccggcggcuacugccugaccagauggaugcugaucgaggccgagcugaagugcuucggcaacaccgccguggccaagugcaacgagaagcacgacgaggaguucugcgacaugcugagacuguucgacuucugcaagcaggccauccagagacugaaggccgaggcccagaugagcauccagcugaucaacaaggccgugaacgcccugaucaacgaccagcugaucaugaagaaccaccugagagacaucaugggcauccccuacugcaacuacagcaaguacugguaccugaaccacaccaccaccggcaagaccagccugcccaagugcuggcuggugagcaacggcagcuaccugaacgagacccacuucagcgacgacaucgagcagcaggccgacaacaugaucaccgagaugcugcagaaggaguacauggagagacagggcaagaccccccugggccugguggaccuguucguguucagcaccagcuucuaccugaucagcaucuuccugcaccuggugaagauccccacccacagacacaucgugggcaagcccugccccaagccccacagacugaaccacaugggcaucugcagcugcggccuguacaagcagcccggcgugcccgugaaguggaagagaugaggacuaguuauaagacugacuagcccgaugggccucccaacgggcccuccuccccuccuugcaccgagauuaauaaaaaaaaaaaaaaaaaaaaaaaaaaaaaaaaaaaaaaaaaaaaaaaaaaaaaaaaaaaaaaaaaaaaaaaaaaaaaaaaaaaaaaaaaaaaaaaaaaaa

SEQ ID NO: 38178 - RNA, 1665 nt, Artificial Sequence
  mRNA product Design i-3 (A100) comprising derived and/or modified sequence from LASV(LM776-SLE-2012;Clade IV)__AIT17824__GPCmut10 (opt4)
aggagaaagcuuaccaugggccagaucgugaccuucuuccaggaggugccccacgugaucgaggaggugaugaacaucgugcugaucgcccugagcauccuggccgugcugaagggccuguacaacuucgccaccugcggccuggugggccuggugaccuuccugcugcugugcggcagaagcugcaccaccagcguguacaagggcguguacgagcugcagacccuggagcugaacauggagacccugaacaugugcaugccccugagcugcaccaagaacaacagccaccacuacaucauggugggcaacgagaccggccuggagcugacccugaccaacaccagcaucaucaaccacaaguucugcaaccugagcgacgcccacaagaagaaccuguacgaccacgcccugaugagcaucaucagcaccuuccaccugagcauccccaacuucaaccaguacgaggccaugagcugcgacuucaacggcggcaagaucagcgugcaguacaaccugagccacagcuacgccggcgacgccgccaaccacugcggcaccguggccaacggcgugcugcagaccuucaugagaauggccuggggcggcagcuacaucgcccuggacagcggccacggcaagugggacugcaucaugaccagcuaccaguaccugaucauccagaacaccaccugggaggaccacugccaguucagcagacccagccccaucggcuaccugggccugcugagccagagaaccagagacaucuacaucagcagaagacugcugggcaccuucaccuggacccugagcgacagcgagggcaaggacacccccggcggcuacugccugaccagauggaugcugaucgaggccgagcugaagugcuucggcaacaccgccguggccaagugcaacgagaagcacgacgaggaguucugcgacaugcugagacuguucgacuucugcaagcaggccauccagagacugaaggccgaggcccagaugagcauccagcugaucaacaaggccgugaacgcccugaucaacgaccagcugaucaugaagaaccaccugagagacaucaugggcauccccuacugcaacuacagcaaguacugguaccugaaccacaccaccaccggcaagaccagccugcccaagugcuggcuggugagcaacggcagcuaccugaacgagacccacuucagcgacgacaucgagcagcaggccgacaacaugaucaccgagaugcugcagaaggaguacauggagagacagggcaagaccccccugggccugguggaccuguucguguucagcaccagcuucuaccugaucagcaucuuccugcaccuggugaagauccccacccacagacacaucgugggcaagagcugccccaagccccacagacugaaccacaugggcaucugcagcugcggccuguacaagcagcccggcgugcccgugagauggaagagaugaggacuaguuauaagacugacuagcccgaugggccucccaacgggcccuccuccccuccuugcaccgagauuaauaaaaaaaaaaaaaaaaaaaaaaaaaaaaaaaaaaaaaaaaaaaaaaaaaaaaaaaaaaaaaaaaaaaaaaaaaaaaaaaaaaaaaaaaaaaaaaaaaaaa

SEQ ID NO: 38179 - RNA, 1665 nt, Artificial Sequence
  mRNA product Design i-3 (A100) comprising derived and/or modified sequence from LASV(Mad39;Clade IV)__ANH09722__GPCmut10 (opt4)
aggagaaagcuuaccaugggccagaucgugaccuucuuccaggaggugccccacgugaucgaggaggugaugaacaucgugcugaucgcccugagcauccuggccgugcugaagggccuguacaacguggccaccugcggccugaucggccuggugaccuuccugcugcugugcggcagaagcugcaccaccacccuguacaagggcguguacgagcugcaggcccuggagcugaacauggagacccugaacaugugcaugccccugagcugcaccaagaacaacagccaccacuacaucagagugggcaacgagaccggccuggagcugacccugaccaacaccagccugaucaaccacaaguucugcaaccugagcgacgcccacaagaagaaccuguacgaccacgcccugaugagcaucaucagcaccuuccaccugagcauccccaacuucaaccaguacgaggccaugagcugcgacuucaacgacggcaagaucagcgugcaguacaaccugagccacaccuacgccggcgacaccgccaaccacugcggcaccguggccaacggcgugcugcagaccuucaugagaauggccuggggcggcagcuacaucgcccuggacagcggcagaggcggcugggacugcaucaugaccagcuaccaguaccugaucauccagaacaccaccugggaggaccacugccaguucagcagacccagccccaucggcuaccugggccugcugagccagagaaccagagacaucuacaucagcagaagacugcugggcaccuucaccuggacccugagcgacagcgagggcaaggacacccccggcggcuacugccugaccagauggaugcugaucgaggccgagcugaagugcuucggcaacaccgccguggccaagugcaacgagaagcacgacgaggaguucugcgacaugcugagacuguucgacuucugcaagcaggccauccagagacugaaggccgaggcccagaugagcauccagcugaucaacaaggccgugaacgcccugaucaacgaccagcugaucaugaagaaccaccugagagacaucaugggcauccccuacugcaacuacagcaaguacugguaccugaaccacaccgugaccggcaagaccagccugcccaagugcuggcuggugagcaacggcagcuaccugaacgagacccacuucagcgacgacaucgagcagcaggccgacaacaugaucaccgagaugcugcagaaggaguacauggagagacagggcaagaccccccugggccugguggaccuguucguguucagcaccagcuucuaccugaucagcaucuuccugcaccuggugaagauccccacccacagacacguggugggcaagcccugccccaagccccacagacugaaccacaugggcaucugcagcugcggcuucuacaagcagcccggcgugcccgugagauggaagagaugaggacuaguuauaagacugacuagcccgaugggccucccaacgggcccuccuccccuccuugcaccgagauuaauaaaaaaaaaaaaaaaaaaaaaaaaaaaaaaaaaaaaaaaaaaaaaaaaaaaaaaaaaaaaaaaaaaaaaaaaaaaaaaaaaaaaaaaaaaaaaaaaaaaa

SEQ ID NO: 38180 - RNA, 1665 nt, Artificial Sequence
  mRNA product Design i-3 (A100) comprising derived and/or modified sequence from LASV(Z0947-SLE-2011;Clade IV)__AIT17840__GPCmut10 (opt4)
aggagaaagcuuaccaugggccagaucgugaccuucuuccaggaggugccccacgugaucgaggaggugaugaacaucgugcugaucgcccugagcauccuggccgugcugaagggccuguacaacuucgccaccugcggccuggugggccuggugaccuuccugcugcugugcggcagaagcugcaccaucagccuguacaagggcguguacgagcugcagacccuggagcugaacauggagacccugaacaugugcaugccccugagcugcaccaagaacaacagccaccacuacaucauggugggcaacgagaccggccuggagcugacccugaccaacaccagcaucaucaaccacaaguucugcaaccugagcgacgcccacaagaagaaccuguacgaccacgcccugaugagcaucaucagcaccuuccaccugagcauccccaacuucaaccaguacgaggccaugagcugcgacuucaacggcggcaagaucagcgugcaguacaaccugagccacagcuacgccggcgacgccgccaaccacugcggcaccguggccaacggcgugcugcagaccuucaugagaauggccuggggcggcagcuacaucgcccuggacagcggcagagacagaugggacugcaucaugaccagcuaccaguaccugaucauccagaacaccaccugggaggaccacugccaguucagcagacccagccccaucggcuaccugggccugcugagccagagaaccagagacaucuacaucagcagaagacugcugggcaccuucaccuggacccugagcgacagcgagggcaaggacacccccggcggcuacugccugaccagauggaugcugaucgaggccgagcugaagugcuucggcaacaccgccguggccaagugcaacgagaagcacgacgaggaguucugcgacaugcugagacuguucgacuucugcaagcaggccauccagagacugaaggccgaggcccagaugagcauccagcugaucaacaaggccgugaacgcccugaucaacgaccagcugaucaugaagaaccaccugagagacaucaugggcauccccuacugcaacuacagcaaguacugguaccugaaccacaccaccaccggcaagaccagccugcccaagugcuggcuggugagcaacggcagcuaccugaacgagacccacuucagcgacgacaucgagcagcaggccgacaacaugaucaccgagaugcugcagaaggaguacauggagagacagggcaagaccccccugggccugguggaccuguucguguucagcaccagcuucuaccugaucagcaucuuccugcaccuggugaagauccccacccacagacacaucgugggcaagcccugccccaagccccacagacugaaccacaugggcaucugcagcugcggccuguacaagcagcccggcgugcccgugaaguggaagagaugaggacuaguuauaagacugacuagcccgaugggccucccaacgggcccuccuccccuccuugcaccgagauuaauaaaaaaaaaaaaaaaaaaaaaaaaaaaaaaaaaaaaaaaaaaaaaaaaaaaaaaaaaaaaaaaaaaaaaaaaaaaaaaaaaaaaaaaaaaaaaaaaaaaa

SEQ ID NO: 38181 - RNA, 1665 nt, Artificial Sequence
  mRNA product Design i-3 (A100) comprising derived and/or modified sequence from LASV(Josiah;Clade IV)__NP_694870__GPCmut10 (opt5)
aggagaaagcuuaccaugggccagaucgugaccuucuuucaagaggucccccacguuauugaagaggugaugaacaucgugcugauugcccucagcguccuggcugugcuuaaggggcuguacaauuucgccacaugcggacucguuggccuggugacguuucuucugcucugugggagauccugcaccacaucucuguauaaaggagucuacgaacugcagacccucgagcugaacauggaaacacuuaauauguguaugccucugagcugcaccaagaacaauucccaucacuauaucauggugggcaacgagacagggcucgagcugacccuuacgaauaccucuauuaucaaccauaaauucuguaaucugagcgacgcgcacaagaaaaaccucuacgaucaugcucugauguccaucauuucuacauuucaccugagcaucccgaauuucaaccaguaugaagccauguccugcgacuuuaauggaggcaagauuagcguucaguacaaccucucucacuccuaugccggcgaugcugccaaucauugugggaccguggcuaacggaguccugcaaacauucaugcggauggccuggggcgggagcuacaucgcgcuugacucuggacgcggcaacugggauugcauuaugaccuccuaccaguaucugaucauucagaauacgacaugggaggaccacugucaguuuagcagacccucuccuaucggguaccucggacugcuuucccaacggacccgcgauaucuauauuagcagacggcugcucggcacauucaccuggacccuguccgacucugaaggcaaggauacacccgggggauacugccugacgcgcuggaugcucaucgaggccgagcugaaauguuuuggcaacaccgcuguggccaagugcaaugaaaaacaugacgaggaguucugcgauaugcuuagacuguuugacuucuguaagcaggcuauucagcggcucaaagccgaagcgcagaugagcauccaacugauuaacaaggccgugaaugcucuuaucaacgaucagcugaucaugaagaaucaccuccgcgacauuauggggaucccuuauugcaacuacuccaaauauugguaccugaaucacacaaccacaggaagaaccagccugcccaaguguuggcucgucucuaacggcuccuaccugaaugaaacgcauuucagcgacgauauugagcagcaagccgacaacaugaucacagagaugcuucagaaagaauauauggagcggcaggggaagaccccucugggacucguugaucuguuuguguucucuaccagcuuuuaccugauuuccaucuuccuucaccucgugaaaaucccgacacaucgccacauugucggcaagucuugccccaaaccucauagacugaaucacaugggcaucuguagcugcgggcuguauaagcagcccggagugccuguuaaguggaaacggugaggacuaguuauaagacugacuagcccgaugggccucccaacgggcccuccuccccuccuugcaccgagauuaauaaaaaaaaaaaaaaaaaaaaaaaaaaaaaaaaaaaaaaaaaaaaaaaaaaaaaaaaaaaaaaaaaaaaaaaaaaaaaaaaaaaaaaaaaaaaaaaaaaaa

SEQ ID NO: 38182 - RNA, 1662 nt, Artificial Sequence
  mRNA product Design i-3 (A100) comprising derived and/or modified sequence from LASV(LP;Clade I)__AAF86701__GPCmut10 (opt5)
aggagaaagcuuaccaugggccagaucauuaccuucuuucaagaggugccccacgucaucgaagagguuaugaacauugugcugaucgcccucagccugcuugcuauucugaaggggcucuacaauaucgccacaugcggaaucauuggccugguggcguuccuuuuucugugugggaaauccugcucucucacgcugaagggaggcuaugaacugcagacccucgagcugaacauggaaacacuuaauauguguaugccucugagcugcaccaaaaacuccucucaucacuacaucagagucgggaaugagacaggacucgagcugacccuuacaaacaccagcauuaucaaucauaaguucuguaaccuguccgacgcucacaaaaagaaucucuaugaucaugcccugaugucuauuaucagcacguuucaccuguccauuccgaacuucaaucaguacgaagccaugagcugcgacuuuaacggcggcaagaucucugugcaguauaaucucucccacagcuacgcuggggaugccgcugagcauuguggaaccguugccaacggcgugcugcaaacauucaugcggauggcguggggagggcgcuauaucgcccuugacucuggcaaagggaauugggauugcauuaugaccuccuaccaguaccugaucauucagaacacaaccugggaagaccacugucaguuuagcagacccucuccuaucggauaucucggccugcuuucccaacggacgcgcgauauuuacaucagcagacggcugcucggcacauucaccuggacacuguccgacucugaggggaacgagacccccggaggcuauugccugacccgcuggaugcucaucgaagcugagcugaaguguuuugggaauacagccgucgcuaaaugcaacgaaaagcaugaugaggaguucugcgacaugcuuagacuguuugauuucuguaaacaggccauucggcgccucaaggcggaagcccagaugagcauccagcugauuaauaaggcugugaacgcccuuaucaaugaccaacugauuaugaaaaaccaccucagagauaucaugggaaucccuuacugcaauuauuccaaguacugguaucugaaccacacgagcucuggccggaccucccugcccaaauguuggcucauuagcaaugggucuuaccugaacgagacacaguucagcgacgacaucgaacagcaagcugauaauaugauuaccgagaugcuucagaaggaauacaucgagcgccagggaaaaacaccucugggccucguugacauuuuuaucuucuccaccucuuuuuaucugauuagcaucuuccugcaucuuaucaagauuccgacgcacagacauaucgugggcaaacccugcccuaagccccaccggcucaaccauaugggggucuguuccugcggacuguacaagcacccuggcgugcccacaaaauggaagcgcugaggacuaguuauaagacugacuagcccgaugggccucccaacgggcccuccuccccuccuugcaccgagauuaauaaaaaaaaaaaaaaaaaaaaaaaaaaaaaaaaaaaaaaaaaaaaaaaaaaaaaaaaaaaaaaaaaaaaaaaaaaaaaaaaaaaaaaaaaaaaaaaaaaaa

SEQ ID NO: 38183 - RNA, 1662 nt, Artificial Sequence
  mRNA product Design i-3 (A100) comprising derived and/or modified sequence from LASV(803213;Clade II)__AAF86703__GPCmut10 (opt5)
aggagaaagcuuaccaugggccagaucauuaccuucuuucaagaggugccccacgucaucgaagagguuaugaacauugugcugaucgcccucagccugcuugcuauucugaaggggaucuacaauguggccacaugcggacucuucggccugaucuccuuucuucugcucugugggagaucuugcagcgucacguauaaaggaguguacgaacugcagacccuggagcucaacauggcgaaucugaacauguguaugccucuuuccugcacaaagaauaacucucaucacuauauuaugguuggcaaugaaaccgggcuggagcucacacugaccaacacaagcaucauuaaucauaaauucuguaaccuuuccgacgcucacaagaaaaaucuguacgaucaugcccucaugucuaucauuagcaccuuucaccuguccaucccgaacuucaaucaguaugaggccaugagcugcgacuuuaacggaggcaagauuucugugcaguacaaucugucccacagcuucgcugucgaugccgcuaaccauuguggcacgaucgccaacggggugcuccaaaccuuuaugcggauggcguggggaggcucuuauaucgcccuggacuccgggaagggaaauugggauugcauuaugacaagcuaccaguaccuuaucauucagaacaccacaugggaagaccacugucaguucucucgccccuccccuaucggcuaucuggggcuccugagccaaagaacccgggauauuuacaucucccgcagacuucugggaacguuuacauggacccucucugacagcgagggcaaugaagcucccggcggguauugccugacacgguggaugcugaucgaggccgagcucaaauguuucggaaacaccgcuguugccaagugcaaugaaaaacaugaugaggaauuuugcgacaugcugcgccuuuucgauuucuguaagcaggcgauuaaaagacugaagaccgaggcccagauguccauccagcucauuaacaaggcugugaaugcccugaucaacgaccaacuuauuaugaaaaaucaucugcgggauaucaugggcaucccuuacugcaacuauagccgcuacugguaucucaaucacacagucacggggaagaccucucugcccagauguuggcugguguccaacggaagcuaccucaaugaaacacacuuuucugacgacauugagcagcaggcugauaacaugaucaccgagaugcugcaaaaagaauacauggaccggcagggcaagacaccucuugggcugguggaucucuucgucuuuagcaccuccuucuaucugauuucuaucuuucugcaccuuguuaaaauuccgacgcaucgccacaucgugggaaagcccugcccuaaaccccauagacucaaucacaugggcauuuguagcugcggccuguacaagcacccuggggugcccgucaaguggaaacggugaggacuaguuauaagacugacuagcccgaugggccucccaacgggcccuccuccccuccuugcaccgagauuaauaaaaaaaaaaaaaaaaaaaaaaaaaaaaaaaaaaaaaaaaaaaaaaaaaaaaaaaaaaaaaaaaaaaaaaaaaaaaaaaaaaaaaaaaaaaaaaaaaaaa

SEQ ID NO: 38184 - RNA, 1662 nt, Artificial Sequence
  mRNA product Design i-3 (A100) comprising derived and/or modified sequence from LASV(GA391;Clade III)__CAA36645__GPCmut10 (opt5)
aggagaaagcuuaccaugggccagaucgugaccuucuuucaagaggucccccacguuauugaagaggugaugaacaucgugcugauugcccucagcauccuggcuauucuuaaggggcuguacaaugucgccacaugcggacucaucggccuggugacguuccuucugcucuccgggagaucuuguagccugaucuauaaaggaaccuacgaacugcagacacucgagcugaacauggaaacccuuaauaugugcaugccucuguccuguacaaagaacaauucucaucacuauauucggguuggcaacgagaccgggcucgagcugacacuuaccaauacgagcauccugaaccauaaauuuugcaaucucuccgacgcgcacaagcgcaaccuguacgaucauucucugaugagcauuaucuccaccuuccaccucagcauuccgaauuuuaaccaguaugaagcuaugucuugugacuucaauggaggcaaaaucacagugcaguacaaccugucccacagcuuugccgucgaugccgcuggccauugcgggacccuugccaauggagugcugcaaacauucaugagaauggcuuggggcgggucuuauauugcccucgacuccggacggggcaacugggauuguaucaugaccagcuaccaguaccugaucauucagaacacgacaugggacgaucacugccaguuuucucgccccuccccuaucggguaucuuggacugcucagccaaagaacccgggacauuuacaucucccgcagacugcugggcacauucaccuggacccucucugauagcgagggcaaugaaacacccgggggauauugucugacgcgguggaugcuuauugaggcggagcugaagugcuuuggcaacaccgccguugcuaaguguaaugaaaaacaugacgaggaguucugcgauaugcuccgccuguuugacuucugcaagcaggccaucagacggcuuaaaacagaagcucagauguccauccagcugauuaacaaggccgugaaugcgcucaucaacgaucaacugauuaugaaaaaucaucugcgcgacaucauggggauuccuuacuguaacuauagcagauacugguaucucaaucacaccucuacaggaaagaccucccugccccggugcuggcuuaucagcaacggcucuuaccugaaugaaacgaaguucagcgacgauaucgagcagcaggccgacaacaugauuacagagaugcuccaaaaagaauacaucgaucgccaggggaagaccccucugggacuggucgaccuuuuuguguucuccaccucuuuuuaucucauuagcaucuuccugcaccuggugaaaauuccgacacacagacauaucgucggcaagcccuguccuaaaccccaccggcucaaucauaugggcauuugcuccugugggcuguacaagcagccuggaguucccgugagauggaaacgcugaggacuaguuauaagacugacuagcccgaugggccucccaacgggcccuccuccccuccuugcaccgagauuaauaaaaaaaaaaaaaaaaaaaaaaaaaaaaaaaaaaaaaaaaaaaaaaaaaaaaaaaaaaaaaaaaaaaaaaaaaaaaaaaaaaaaaaaaaaaaaaaaaaaa

SEQ ID NO: 38185 - RNA, 1665 nt, Artificial Sequence
  mRNA product Design i-3 (A100) comprising derived and/or modified sequence from LASV(AV;Clade V)__CCA30314__GPCmut10 (opt5)
aggagaaagcuuaccaugggccagaucgugaccuucuuucaagaggucccccacguuauugaagaggugaugaacaucgugcugauugcccucagcauccuggcuguccuuaaggggcuguacaauauugccacaugcggacucaucggccugaucacguuccuucugcucugugggagauccugcucuagcaaccuguauaaaggaguguacgaacugcagucccucgaccugaauauggagacccuuaacauguguaugccucugucuugcacaaagaauaacagccaucacuauauucggguuggcaaugauaccgggcucgaacugacacuuaccaacacauccauccugaaucauaaauuuuguaaccucucugacgcgcacaagaaagaucuguacgaccaugcucugaugagcauuaucuccaccuuccaccucagcauuccgaauuuuaaccaguaugaggccaugucuugcgauuucaauggaggcaagaucuccgugcaguacaaccugagccacucuuaugccauugacgcugccaaucauuguggcacggucgcuaacgggauccuucaaaccuuuaugcgcauggccuggggaggcuccuacaucgcgcuggauagcgggagaggaaacugggacugcauuaugacaucuuaccaguaucucaucauucagaauaccacaugggagaaccacugucaguucucccggcccagcccuaucggcuaccuggggcuucugucccaacgcaccagagauauuuauaucucucggcgccuccugggaacguuuacauggacccugagcgacuccgaaggcaaugccacacccggcggguacugccucaccagauggaugcugaucgaggcugaacuuaaguguuucggaaacaccgccguggcuaaaugcaaugagaagcaugaugaggaauuuugcgacaugcugcgccucuucgauuuuuguaaacaggccauuagccggcugaagucugaggcgcagauguccauccagcuuauuaacaaagccguuaaugcucugaucaacgaccaacucauuaugaagaaucaccugagagacaucaugggcaucccuuauugcaacuacagcaaguauugguaccugaaucacacaauuacggggaaaaccucucuccccaaguguuggcuggugagcaacggauccuaccuuaaugaaacacauuucucugaugacaucgagcagcaggccgauaacaugauuaccgaaaugcugcaaaaagaguauauggagcggcagggcaagacaccucucgggcuggucgaccuguucguguuuagcaccuccuucuaccuuaucagcauuuuucuccgccuggugaaaaucccgacgcacagacauauugucggaaagcccugcccuaaaccccaccggcugaaucauaugggcaucuguucuugcggccucuauaagcagccugggguucccgugcgcuggaagagaugaggacuaguuauaagacugacuagcccgaugggccucccaacgggcccuccuccccuccuugcaccgagauuaauaaaaaaaaaaaaaaaaaaaaaaaaaaaaaaaaaaaaaaaaaaaaaaaaaaaaaaaaaaaaaaaaaaaaaaaaaaaaaaaaaaaaaaaaaaaaaaaaaaaa

SEQ ID NO: 38186 - RNA, 1662 nt, Artificial Sequence
  mRNA product Design i-3 (A100) comprising derived and/or modified sequence from LASV(Togo/2016/7082;Clade VI)__AMR44577__GPCmut10 (opt5)
aggagaaagcuuaccaugggccagaucauuaccuucuuucaagaggugccccacgucaucgaagagguuaugaacauugugcugaucgcccucagccugcuugcuauucugaaggggguguacaaugucgccacaugcggaaucaucggccucgugacguuccuguuucuuugugggagauccugcucucugauuuauaaaggaagcuacgaacuccagacccuggagcugaacauggaaacacucaauauguguaugccucuguccugcaccaagaacucuagccaucacuauauccggguuggcaaugagacagggcuugagcugacccucacaaacaccuccauuaucaaucauaaauucuguaaccugucugacgcgcacaagcgcaaucuuuacgaucaugcucugaugagcauucucuccacguuucaccugagcaucccgaacuucaaucaguaugaagccaugucuugcgacuuuaacggaggcaaaauuuccgugcaguacaaucugagccacgccuaugcugucgaugccgcugagcauuguggcaccguggccaacgggguucuccaaacauucaugagaauggcguggggaggcucuuacaucgcccuggacuccgggcggggaaauugggauugcaucaugaccagcuaccaguaucuuauuauccagaacacaaccugggaagaccacugucaguuuucucgccccuccccuauuggcuaccuggggcuccugagccaaagaacgcgggauaucuauauuucccgcagacuucugggaacauucaccuggacacucucugacagcgagggcaacgagacccccggcggguacugccugacccgguggaugcugaucgaagcugagcucaaguguuuuggaaauacagccguggcuaagugcaacgaaaaacaugaugaggaguucugcgacaugcugcgccuuuuugauuucuguaagcaggccauccagagacugaaauccgaagcgcagaugagcauucaacucaucaauaaggccgucaacgcucugauuaaugaccagcuuaucaugaaaaaccaucugcgggauaugaugggcauuccuuauugcaauuacucuaaguauugguaccucaaccacacguccagcgggcgcaccucucugcccaaguguuggcuggugagcaauggauccuaccucaacgagacacacuucucugacgacaucgaacagcaagccgauaauaugaucaccgagaugcugcagaaagaauauauugacagacagggcaagacaccucuugggcugguggaucucuuugucuucagcaccuccuuuuaccugaucagcauuuuccugcaccuuaucaaaauuccgacgcaucggcacaucguuggaaagcccugcccuaaaccccaucgccucaaccacaugggcauuuguucuugcggccuguauaagcagccuggggugcccacaagauggaaacggugaggacuaguuauaagacugacuagcccgaugggccucccaacgggcccuccuccccuccuugcaccgagauuaauaaaaaaaaaaaaaaaaaaaaaaaaaaaaaaaaaaaaaaaaaaaaaaaaaaaaaaaaaaaaaaaaaaaaaaaaaaaaaaaaaaaaaaaaaaaaaaaaaaaa

SEQ ID NO: 38187 - RNA, 1662 nt, Artificial Sequence
  mRNA product Design i-3 (A100) comprising derived and/or modified sequence from LASV(KAK-428;Clade n.d. (VII))__ANH09740__GPCmut10 (opt5)
aggagaaagcuuaccaugggccagaucgugaccuucuuucaagaggucccccacguuauugaagaggugaugaacaucgugcugauugcccucagccugcuugcuauccugaaggggcucuacaauuucgccacaugcggagucauuggccugaucacguuucuucugcucugugggagauccugcucugcgaccuauaaaggacaguacgaacugcagacacuggagcucaacauggaaagccugaauauguguaugccucuuuccugcaccaagaacaauucucaucacuauauccgggcuggcaacaauacagggcuggagcucacccugacaaacaccagcauuaucucccauaaauucuguaaucuuucugacgcccacaagaaaaaccuguacgaucauacgcucaugagcauuaucaccacauuucaccuguccauuccgaauuucaaccaguaugaggccaugagcugcgacuuuaauggaggcaagaucucuauucaauacaaccugucccacagcuaugcuggcgaugccgcucagcauugugggaccguggccaauggaguucuccagacauucaugcgcauggcguggggcgggucuuaccuggcccuugacuccggaagacggggcugggauugcaucaucagcucuuaccaguaucugauuauccaaaacaccacgugggacgaucacugucaguuuucccgccccagcccuauuggguaccucggauucgugucccagaagacaagagacaucuauauuucucggcgccugcuuggcaccuuuacauggacccugagcgauuccgaaggccaugacaugcccgggggauacugccucaccagauggaugcugaucgaggcugaucugaaauguuucggcaacacagccgucgcuaagugcaaugaaaaacacgacgaggaguuuugcgauauguggcgccucuucgacuucuguaagcaggccauccaacggcugaaagcggaagcccagaugaacauucagcuuaucaauaaggcugugaacgcccugauuaaugaccaacucaugaugaagaaccaccugagagauaucauggggauuccuuauugcaauuacagcaaauuuugguaucuuaacaauacgaccacaggacggaccucucugccccgcuguuggcucaucuccaacggcagcuaccugaaugagacacauuucucugacgauaucgaacagcaggcugacaacaugauuaccgagaugcugcagaaggaauacauggauagacaagggaaaacgccucucggacugguugaccuuuuuguguucagcacauccuuuuaucugaucaccauuuuccuccaccuggucaagaucccgacccaucggcacauugugggcaaacccugcccuaagccccaucgccugaaucacaugggcaucuguucuugcgggcuuuacaaacagccuggagugcccgucagauggaagcggugaggacuaguuauaagacugacuagcccgaugggccucccaacgggcccuccuccccuccuugcaccgagauuaauaaaaaaaaaaaaaaaaaaaaaaaaaaaaaaaaaaaaaaaaaaaaaaaaaaaaaaaaaaaaaaaaaaaaaaaaaaaaaaaaaaaaaaaaaaaaaaaaaaaa

SEQ ID NO: 38188 - RNA, 1662 nt, Artificial Sequence; identical to SEQ ID NO: 38182
  mRNA product Design i-3 (A100) comprising derived and/or modified sequence from LASV(Pinneo-NIG-1969;Clade I)__AIT17836__GPCmut10 (opt5)

SEQ ID NO: 38189 - RNA, 1662 nt, Artificial Sequence
  mRNA product Design i-3 (A100) comprising derived and/or modified sequence from LASV(ISTH0009-NIG-2011;Clade II)__AIT17404__GPCmut10 (opt5)
aggagaaagcuuaccaugggccagaucauuaccuucuuucaagaggugccccacgucaucgaagagguuaugaacauugugcugaucgcccucagccugcuugcuauucugaaggggaucuacaauguggccacaugcggacucuucggccuggucuccuuucuucugcucugugggagaucuugcagcacgaccuauaaaggaguguacgaacugcagacacuggagcucgacauggcgucccugaacauguguaugccucuuucuugcaccaagaauaacagccaucacuauaucaugguuggcaaugaaacagggcuggagcucacccugacaaacaccuccauuaucaaucauaaauucuguaaccuuucugaugcucacaagaaaaaucuguacgaccaugcccucaugagcauuaucuccacguuucaccugagcauuccgaacuucaaucaguaugaggccaugucuugcgauuuuaacggaggcaagaucuccgugcaguacaaucugagccacgcuuaugccgucgacgcugccaaccauuguggcaccauugcgaauggggugcuccaaacauucaugcggauggccuggggaggcucuuacaucgcucuggauuccgggaagggaagcugggacugcaucaugaccucuuaccaguaucuuauuauccagaacacaaccugggaagaucacugucaguuuucccgccccagcccuauuggcuaccuggggcuccugucccaaagaacgcgggacaucuauauuucucgcagacuucugggaacauucaccuggacacucagcgauuccgagggcaacgaaacccccggcggguacugccugacccgguggaugcugaucgaggccgagcucaaauguuuuggaaauacagcuguugccaagugcaacgaaaaacaugacgaggaguucugcgauaugcugcgccuuuuugacuucuguaagcaggcgaucagacggcugaaaacggaagcccagaugagcauucagcucaucaauaaggcugugaacgcccugauuaaugaucaacuuaucaugaagaaccaucugcgcgacauuaugggcaucccuuauugcaauuacucuaaauauugguaccucaaccacaccgucacagggaagaccucccugcccagauguuggcuggugagcaauggaucuuaccucaacgaaacacacuucagcgacgauaucgagcagcaggcugacaauaugauuaccgagcugcuucaaaaagaauauauggaucggcagggcaagacgccucuggggcucguggaccuguuugucuucuccacaucuuuuuaccugaucagcauuuuccuucaccucaucaaaauuccgacccaucgccacaucaccggaaagcccugcccuaaaccccauagacugaaccacaugggcauuuguuccugcggccuguauaagcacccugggguucccgugaaguggaaacggugaggacuaguuauaagacugacuagcccgaugggccucccaacgggcccuccuccccuccuugcaccgagauuaauaaaaaaaaaaaaaaaaaaaaaaaaaaaaaaaaaaaaaaaaaaaaaaaaaaaaaaaaaaaaaaaaaaaaaaaaaaaaaaaaaaaaaaaaaaaaaaaaaaaa

SEQ ID NO: 38190 - RNA, 1662 nt, Artificial Sequence
  mRNA product Design i-3 (A100) comprising derived and/or modified sequence from LASV(ISTH2010-NIG-2012;Clade II)__AIT17482__GPCmut10 (opt5)
aggagaaagcuuaccaugggccagaucauuaccuucuuucaagaggugccccacgucaucgaagagguuaugaacauugugcugaucgcccucagccugcuugcuauucugaaggggaucuacaauguggccacaugcggacucuucggccuggucuccuuucuucugcucugugggagaucuugcagcacgaccuauaaaggaguguacgaacugcagacacuggagcucgacauggcgucccugaacauguguaugccucuuucuugcaccaagaauaacagccaucacuauaucaugguuggcaaugaaacagggcuggagcucacccugacaaacaccuccauuaucaaucauaaauucuguaaccuuucugaugcucacaagaaaaaucuguacgaccaugcccucaugagcauuaucuccacguuucaccugagcauuccgaacuucaaucaguaugaggccaugucuugcgauuuuaacggaggcaagaucuccgugcaguacaaucugagccacgcuuaugccgucgacgcugccaaccauuguggcaccauugcgaauggggugcuccaaacauucaugcggauggccuggggaggcucuuacaucgcucuggauuccgggaagggaagcugggacugcaucaugaccucuuaccaguaucuuauuauccagaacauuacaugggaagaucacugucaguuuucccgccccagcccuaucggcuaccuggggcuccugucccaaagaacccgggacauuuauaucucucgcagacuucugggaacguucacauggacccucagcgauuccgagggcaacgaaacacccggcggguacugccugacccgguggaugcugaucgaggccgagcucaaauguuuuggaaauaccgcuguugccaagugcaacgaaaaacaugacgaggaguucugcgauaugcugcgccuuuuugacuucuguaagcaggcgauuagacggcugaaaacagaagcccagaugagcauccagcucauuaauaaggcugugaacgcccugaucaaugaucaacuuauuaugaagaaccaucugcgcgacaucaugggcaucccuuauugcaauuacucuaaauauugguaccucaaccacacggucaccgggaagacaucccugcccagauguuggcuggugagcaauggaucuuaccucaacgaaacccacuucagcgacgauauugagcagcaggcugacaauaugaucacagagcugcuucaaaaagaauauauugaucggcagggcaagaccccucuggggcucguggaccuguuugucuucuccacgucuuuuuaccugaucagcauuuuccuucaccucguuaaaaucccgacacaucgccacguggugggaaagcccugcccuaaaccccauagacugaaccacaugggcauuuguuccugcggccuguauaagcacccugggguccccgugaaguggaaacggugaggacuaguuauaagacugacuagcccgaugggccucccaacgggcccuccuccccuccuugcaccgagauuaauaaaaaaaaaaaaaaaaaaaaaaaaaaaaaaaaaaaaaaaaaaaaaaaaaaaaaaaaaaaaaaaaaaaaaaaaaaaaaaaaaaaaaaaaaaaaaaaaaaaa

SEQ ID NO: 38191 - RNA, 1662 nt, Artificial Sequence
  mRNA product Design i-3 (A100) comprising derived and/or modified sequence from LASV(Lassa virus/H.sapiens-wt/NGA/2015/ISTH_0543;Clade II)__AVO03639__GPCmut10 (opt5)
aggagaaagcuuaccaugggccagaucauuaccuucuuucaagaggugccccacgucaucgaagagguuaugaacauugugcugaucgcccucagccugcuugcuauucugaaggggaucuacaauguggccacaugcggacucuucggccuggucuccuuucuucugcucugugggagaucuugcagcacgaccuauaaaggaguguacgaacugcagacacuggagcucgacauggcgaaccugaauauguguaugccucuuuccugcaccaagaacaauucucaucacuauaucaugguuggcaacgaaacagggcuggagcucacccugacaaauaccagcauuaucaaccauaaauucuguaaucuuuccgaugcucacaagaaaaaccuguacgaccaugcccucaugucuauuaucagcacguuucaccuguccauuccgaauuucaaccaguaugaggccaugagcugcgauuuuaauggaggcaagaucucugugcaguacaaccugucccacaccuaugcugucgacgccgcuaaucauuguggcacaauugccaacggggugcuccaaaccuucaugcggauggcguggggaggcagcuacaucgcccuggauucugggaagggauccugggacugcaucaugacaagcuaccaguaucuuguuauucagaacaccacgugggaagaucacugucaguuuucucgccccuccccuaucggcuaccuggggcuccugagccaaagaacacgggacauuuauaucucccgcagacuucugggaaccuucacauggacccucucugauagcgagggcaaugaaacccccggcggguacugccugacacgguggaugcugauugaggcugagcucaaauguuuuggaaacacggccguggcuaagugcaaugaaaaacaugacgaggaguucugcgauaugcugcgccuuuuugacuucuguaagcaggccaucagacggcugaaaaccgaagcgcagauguccauccagcucauuaacaaggccgucaaugcucugaucaacgaucaacuuauuaugaagaaucaucugcgcgacaucaugggcauuccuuauugcaacuacagcaaauauugguaccucaaucacacagugaccgggaagacaucucugcccagauguuggcugguguccaacggaagcuaccucaaugaaacccacuucucugacgauaucgagcagcaggccgacaacaugaucacggagcugcuucaaaaagaauauauugaucggcagggcaagacaccucuggggcucgucgaccuguuuguuuucagcaccuccuuuuaccugaucucuauuuuccuucaccucgugaaaaucccgacccaucgccacauuacaggaaagcccugcccuaaaccccauagacugaaucacaugggcaucuguagcugcggccuguauaagcacccuggggugcccgucaaguggaaacggugaggacuaguuauaagacugacuagcccgaugggccucccaacgggcccuccuccccuccuugcaccgagauuaauaaaaaaaaaaaaaaaaaaaaaaaaaaaaaaaaaaaaaaaaaaaaaaaaaaaaaaaaaaaaaaaaaaaaaaaaaaaaaaaaaaaaaaaaaaaaaaaaaaaa

SEQ ID NO: 38192 - RNA, 1662 nt, Artificial Sequence
  mRNA product Design i-3 (A100) comprising derived and/or modified sequence from LASV(Lassa virus/H.sapiens-wt/NGA/2016/ISTH_0009;Clade II)__AVO03571__GPCmut10 (opt5)
aggagaaagcuuaccaugggccagaucauuaccuucuuucaagaggugccccacgucaucgaagagguuaugaacauugugcugaucgcccucagccugcuugcuauucugaaggggaucuacaauguggccacaugcggacuccugggccuugucuccuuccugcuccugugugggagaucuugcagcacgaccuauaaaggaguguacgaacugcagacacucgagcuggacauggcgucccuuaacauguguaugccucugucuugcaccaagaauaacagccaucacuauaucaugguuggcaaugaaacagggcucgagcugacccuuacaaacaccuccauuaucaaucauaaauuuuguaaccugucugaugcucacaagaaaaaucucuacgaccaugcccugaugagcauuaucuccacguuccaccugagcauuccgaacuuuaaucaguaugaggccaugucuugcgauuucaacggaggccggaucuccgugcaguacaaucucagccacucuuaugcugucgacgccgcuaaccauuguggcaccauugccaauggggugcugcaaacauuuaugcgcauggcguggggaggcuccuacaucgcccuugauagcgggaagggaucuugggacugcaucaugaccuccuaccaguaucugauuauccagaacacaaccugggaagaucacugucaguucagcagacccuccccuauuggcuaccucgggcugcuuucucaacggacgcgcgacaucuauauuagcagacggcugcucggaacauuuaccuggacacuguccgauagcgagggcaacgaaacccccggcggguacugccugacccgcuggaugcucaucgaggcugagcugaaguguuucggaaauacagccguugcuaaaugcaacgaaaagcaugacgaggaauuuugcgauaugcuuagacuguucgacuuuuguaaacaggccauccggcgccucaagacggaggcgcagaugucuauucagcugaucaauaaagccgugaacgcucuuauuaaugaucaacugaucaugaagaaccaccucagagacauuaugggcaucccuuauugcaauuacuccaaguauugguaccugaaccacaccgucacagggaaaaccagccugccccgguguuggcucgugucuaauggaagcuaccugaacgaaacacauuucuccgacgauaucgagcagcaggccgacaauaugauuaccgagcuucugcaaaaggaauauaucgaucgccagggcaaaacgccucucgggcugguggaccuguucgucuuuucuaccagcuucuaccuuauuuccaucuuucuccaccugguuaagauuccgacacauagacacaucaccggaaaacccugcccuaagccccaucggcugaaccacaugggcauuuguagcugcggccucuauaaucacccuggggugcccgugaaauggaagcgcugaggacuaguuauaagacugacuagcccgaugggccucccaacgggcccuccuccccuccuugcaccgagauuaauaaaaaaaaaaaaaaaaaaaaaaaaaaaaaaaaaaaaaaaaaaaaaaaaaaaaaaaaaaaaaaaaaaaaaaaaaaaaaaaaaaaaaaaaaaaaaaaaaaaa

SEQ ID NO: 38193 - RNA, 1662 nt, Artificial Sequence
  mRNA product Design i-3 (A100) comprising derived and/or modified sequence from LASV(Lassa virus/H.sapiens-wt/NGA/2016/ISTH_0017;Clade II)__AVO03567__GPCmut10 (opt5)
aggagaaagcuuaccaugggccagaucauuaccuucuuucaagaggugccccacgucaucgaagagguuaugaacauugugcugaucgcccucagccugcuugcuauucugaaggggaucuacaauguggccacaugcggacucuucggccuggucuccuuucuucugcucugugggagaucuugcagcacgaccuauaaaggaguguacgaacugcagacacuggagcucgacauggcgucccugaacauguguaugccucuuucuugcaccaagaauaacagccaucacuauaucaugguuggcaaugaaacagggcuggagcucacccugacaaacaccuccauuaucaaucauaaauucuguaaccuuucugaugcucacaagaaaaaucuguacgaccaugcccucaugagcauuaucuccacguuucaccugagcauuccgaacuucaaucaguaugaggccaugucuugcgauuuuaacggaggcaagaucuccgugcaguacaaucugagccacaccuaugcuauugacgccgcuaaccauuguggcacaaucgccaaugggguccuccaaaccuucaugcggauggcguggggaggcucuuacaucgcccuggauuccgggaagggaagcugggacugcauuaugacaucuuaccaguaucuuaucauucagaacaccacgugggaagaucacugucaguuuucccgccccagcccuaucggcuaccuggggcuccugucccaaagaacacgggacauuuauaucucucgcagacuucugggaaccuucacauggacccucagcgauuccgagggcaacgaaacccccggcggguacugccugacacgguggaugcugaucgaggcugagcucaaauguuuuggaaauacggccguggcuaagugcaacgaaaaacaugacgaggaguucugcgauaugcugcgccuuuuugacuucuguaagcaggccauuagacggcugaaaaccgaagcgcagaugagcauccagcucauuaauaaggccguuaacgcucugaucaaugaucaacuuauuaugaagaaccaucugcgcgacaucaugggcaucccuuauugcaauuacucuaaauauugguaccucaaccacacagugaccgggaagacaucccugcccagauguuggcuggucagcaauggaucuuaccucaacgaaacccacuucagcgacgauauugagcagcaggccgacaauaugaucacggagcugcuucaaaaagaauauauggaucggcagggcaagacaccucuggggcucguggaccuguuuguguucuccaccucuuuuuaccugauuagcaucuuccuucaccucguccgcauuccgacccauagacacguuaucggaaaacccugcccuaagccccaucggcugaaccacaugggcauuuguuccugcggccuguauaaacacccuggggugcccgugaaguggaagcgcugaggacuaguuauaagacugacuagcccgaugggccucccaacgggcccuccuccccuccuugcaccgagauuaauaaaaaaaaaaaaaaaaaaaaaaaaaaaaaaaaaaaaaaaaaaaaaaaaaaaaaaaaaaaaaaaaaaaaaaaaaaaaaaaaaaaaaaaaaaaaaaaaaaaa

SEQ ID NO: 38194 - RNA, 1662 nt, Artificial Sequence
  mRNA product Design i-3 (A100) comprising derived and/or modified sequence from LASV(Lassa virus/H.sapiens-wt/NGA/2018/ISTH_0959;Clade II)__AVV65099__GPCmut10 (opt5)
aggagaaagcuuaccaugggccagaucauuaccuucuuucaagaggugccccacgucaucgaagagguuaugaacauugugcugaucgcccucagccugcuugcuauucugaaggggaucuacaauguggucacaugcggacucuucggccugguguccuuucuucugcucugugggagaucuugcagcacgaccuauaaaggaguuuacgaacugcagacacuggagcucgacauggccucccugaacauguguaugccucuuucuugcaccaagaauaacagccaucacuauaucauggugggcaaugaaacagggcuggagcucacccugacaaacaccuccauuaucaaucauaaauucuguaaccuuucugaugcgcacaagaaaaaucuguacgaccaugcucucaugagcauuaucuccacguuucaccugagcauuccgaacuucaaucaguaugaggccaugucuugcgauuuuaacggaggcaagaucuccguccaguacaaucugagccacgccuaugcuauugacgccgcuaaccauuguggcaccaucgccaauggggugcuccaaacauucaugcggauggcguggggaggcucuuacaucgcccuggauuccgggaagggaagcugggacugcauuaugaccucuuaccaguaucuuaucauucagaacacaaccugggaagaucacugucaguuuucccgccccagcccuaucggcuaccuggggcuccugucccaaagaacgcgggacauuuauaucucucgcagacuucugggaacauucaccuggacacucagcgauuccgagggcaacgaaacccccggcggguacugccugacccgguggaugcugaucgaggcugagcucaaauguuuuggaaauacagccguugcuaagugcaacgaaaaacaugacgaggaguucugcgauaugcugcgccuuuuugacuucuguaagcaggccauuagacggcugaaaacggaagcgcagaugagcauccagcucauuaauaaggccgugaacgcucugaucaaugaucaacuuauuaugaagaaccaucugcgcgacaucaugggcaucccuuauugcaauuacucuaaauauugguaccucaaccacaccgucacagggaagaccucccugcccagauguuggcuggugagcaauggaucuuaccucaacgaaacacacuucagcgacgauauugagcagcaggccgacaauaugaucaccgagcugcuucaaaaagaauauauugaucggcagggcaagacgccucuggggcucguggaccuguuugucuucuccacaucuuuuuaccugaucagcauuuuccuucaccucguuaaaaucccgacccaucgccacgugauuggaaagcccugcccuaaaccccauagacugaaccacaugggcaucuguuccugcggccuguauaagcacccuggggugcccgucaaguggaaacggugaggacuaguuauaagacugacuagcccgaugggccucccaacgggcccuccuccccuccuugcaccgagauuaauaaaaaaaaaaaaaaaaaaaaaaaaaaaaaaaaaaaaaaaaaaaaaaaaaaaaaaaaaaaaaaaaaaaaaaaaaaaaaaaaaaaaaaaaaaaaaaaaaaaa

SEQ ID NO: 38195 - RNA, 1662 nt, Artificial Sequence
  mRNA product Design i-3 (A100) comprising derived and/or modified sequence from LASV(LASV003-NIG-2008;Clade II)__AIT17580__GPCmut10 (opt5)
aggagaaagcuuaccaugggccagaucauuaccuucuuucaagaggugccccacgucaucgaagagguuaugaacauugugcugaucgcccucagccugcuugcuauucugaaggggaucuacaauguggccacaugcggacucuucggccuggucuccuuucuucugcucugugggagaucuugcagcacgaccuauaaaggaguguacgaacugcagacacuggagcucgacauggcgucccugaacauguguaugccucuuucuugcaccaagaauaacagccaucacuauaucaugguuggcaaugaaacagggcuggagcucacccugacaaacaccuccauuaucaaucauaaauucuguaaccuuucugaugcucacaagaaaaaucuguacgaccaugcccucaugagcauuaucuccacguuucaccugagcauuccgaacuucaaucaguaugaggccaugucuugcgauuuuaacggaggcaagaucuccgugcaguacaaucugagccacaccuaugcugucgacgccgcuaaccauuguggcacaauugccaauggggugcuccaaaccuucaugcggauggcguggggaggcucuuacaucgcccuggauuccgggaagggaagcugggacugcaucaugacaucuuaccaguaucuuauuauccagaacaccacgugggaagaucacugucaguuuucccgccccagcccuauuggcuaccuggggcuccugucccaaagaacacgggacaucuauauuucucgcagacuucugggaaccuucacauggacccucagcgauuccgagagcaacgaaacccccggcggcuacugccugacacgguggaugcugaucgaggcugagcucaaauguuuugggaauacggccguugcuaagugcaacgaaaaacaugacgaggaguucugcgauaugcugcgccuuuuugacuucuguaagcaggccaucagacggcugaaagcggaagcccagaugucuauucagcucaucaauaaggcugugaacgcccugauuaaugaucaacuuaucaugaagaaccaucugcgcgacauuaugggaaucccuuauugcaauuacuccaaauauugguaccucaaccacaccgucacaggcagaaccagccugccccgguguuggcuggugucuaaugggagcuaccucaacgaaacacacuucuccgacgauaucgagcagcaggcugacaauaugauuaccgagcugcuucaaaaggaauauauggaucgccagggaaaaacgccucugggccucguggaccuguuugucuucucuaccagcuuuuaccugaucuccauuuuccuucaccucguuaagaucccgacacauagacacgugauugggaaacccugcccuaagccccaucggcugaaccacaugggaaucuguagcugcggccuguauaaacacccuggcgugcccgucaaguggaagcgcugaggacuaguuauaagacugacuagcccgaugggccucccaacgggcccuccuccccuccuugcaccgagauuaauaaaaaaaaaaaaaaaaaaaaaaaaaaaaaaaaaaaaaaaaaaaaaaaaaaaaaaaaaaaaaaaaaaaaaaaaaaaaaaaaaaaaaaaaaaaaaaaaaaaa

SEQ ID NO: 38196 - RNA, 1662 nt, Artificial Sequence
  mRNA product Design i-3 (A100) comprising derived and/or modified sequence from LASV(LASV035-NIG-2009;Clade II)__AIT17588__GPCmut10 (opt5)
aggagaaagcuuaccaugggccagaucauuaccuucuuucaagaggugccccacgucaucgaagagguuaugaacauugugcugaucgcccucagccugcuugcuauucugaaggggaucuacaauguggccacaugcggacucuucggccuggucuccuuucuucugcucugugggagaucuugcagcacgaccuauaaaggaguguacgaacugcagacacuggagcucgacauggcgucccugaacauguguaugccucuuucuugcaccaagaauaacagccaucacuauaucaugguuggcaaugaaacagggcuggagcucacccugacaaacaccuccauuaucaaucauaaauucuguaaccuuucugaugcucacaagaaaaaucuguacgaccaugcccucaugagcauuaucuccacguuucaccugagcauuccgaacuucaaucaguaugaggccaugucuugcgauuuuaacggaggcaagaucuccgugcaguacaaucugagccacgcuuaugccgucgacgcugccaaccauuguggcaccauugcgaauggggugcuccaaacauucaugcggauggccuggggaggcucuuacaucgcucuggauuccgggaagggaagcugggacugcaucaugaccucuuaccaguaucuuauuauccagaacacaaccugggaagaucacugucaguuuucccgccccagcccuauuggcuaccuggggcuccugucccaaagaacgcgggacaucuauauuucucgcagacuucugggaacauucaccuggacacucagcgauuccgagggcaacgaaacccccggcggguacugccugacccgguggaugcugaucgaggccgagcucaaauguuuuggaaauacagcuguugccaagugcaacgaaaaacaugacgaggaguucugcgauaugcugcgccuuuuugacuucuguaagcaggcgaucagacggcugaaagccgaagcucagaugagcauucagcucaucaauaaggccgugaacgcucugauuaaugaucaacuuaucaugaagaaccaucugcgcgacauuaugggcaucccuuauugcaauuacucuaaauauugguaccucaaccacacggucaccgggaagacaucccugcccagauguuggcuggugagcaauggaucuuaccucaacgaaacccacuucagcgacgauaucgagcagcaggccgacaauaugauuacagagcugcuucaaaaagaauauaucgaucggcagggcaagaccccucuggggcucguggaccuguuugucuucuccacgucuuuuuaccugauuagcaucuuccuucaccucguuaaaauuccgacacaucgccacgugaucggaaagcccugcccuaaaccccauagacugaaccacaugggcauuuguuccugcggccuguauaagcacccuggggugcccgucaaguggaaacggugaggacuaguuauaagacugacuagcccgaugggccucccaacgggcccuccuccccuccuugcaccgagauuaauaaaaaaaaaaaaaaaaaaaaaaaaaaaaaaaaaaaaaaaaaaaaaaaaaaaaaaaaaaaaaaaaaaaaaaaaaaaaaaaaaaaaaaaaaaaaaaaaaaaa

SEQ ID NO: 38197 - RNA, 1662 nt, Artificial Sequence
  mRNA product Design i-3 (A100) comprising derived and/or modified sequence from LASV(LASV1000-NIG-2009;Clade II)__AIT17782__GPCmut10 (opt5)
aggagaaagcuuaccaugggccagaucauuaccuucuuucaagaggugccccacgucaucgaagagguuaugaacauugugcugaucgcccucagccugcuugcuauucugaaggggaucuacaauguggccacaugcggacucuucggccuggucuccuuucuucugcucugugggagaucuugcagcacgaccuauaaaggaguguacgaacugcagacacuggagcucgacauggcgucccugaacauguguaugccucuuucuugcaccaagaauaacagccaucacuauaucaugguuggcaaugaaacagggcuggagcucacccugacaaacaccuccauuaucaaucauaaauucuguaaccuuucugaugcucacaagaaaaaucuguacgaccaugcccucaugagcauuaucuccacguuucaccugagcauuccgaacuucaaucaguaugaggccaugucuugcgauuuuaacggaggcaagaucuccgugcaguacaaucugagccacaccuaugcugucgacgccgcuaaccauuguggcacaauugccaauggggugcuccaaaccuucaugcggauggcguggggaggcucuuacaucgcccuggauuccgggaagggaagcugggacugcaucaugacaucuuaccaguaucuuauuauccagaacaccacgugggaagaucacugucaguuuucccgccccagcccuauuggcuaccuggggcuccugucccaaagaacacgggacaucuauauuucucgcagacuucugggaaccuucacauggacccucagcgauuccgagggcaacgaaacccccggcggguacugccugacacgguggaugcugaucgaggcugagcucaaauguuuuggaaauacggccguugcuaagugcaacgaaaaacaugacgaggaguucugcgauaugcugcgccuuuuugacuucuguaagcaggccaucaaaagacugaagaccgaagcgcagaugagcauucagcucaucaauaaggccgugaacgcucugauuaaugaucaacuuaucaugaaaaaccaucugcgggacauuaugggcaucccuuauugcaauuacucuaaguauugguaccucaaccacacagucaccgggaaaacaucccugccccgcuguuggcuggugagcaauggaucuuaccucaacgaaacccacuucagcgacgauaucgagcagcaggccgacaauaugauuacggagcugcuucaaaaggaauauaucgauagacagggcaaaacaccucuggggcucguggaccuguuugucuucuccaccucuuuuuaccugauuagcaucuuccuucaccucguuaagauuccgacccaucggcacguggugggaaaacccugcccuaagccccaucgccugaaccacaugggcaucuguuccugcggccuguauaagcacccugggguccccgugaaauggaagagaugaggacuaguuauaagacugacuagcccgaugggccucccaacgggcccuccuccccuccuugcaccgagauuaauaaaaaaaaaaaaaaaaaaaaaaaaaaaaaaaaaaaaaaaaaaaaaaaaaaaaaaaaaaaaaaaaaaaaaaaaaaaaaaaaaaaaaaaaaaaaaaaaaaaa

SEQ ID NO: 38198 - RNA, 1662 nt, Artificial Sequence
  mRNA product Design i-3 (A100) comprising derived and/or modified sequence from LASV(LASV221-NIG-2010;Clade II)__AIT17624__GPCmut10 (opt5)
aggagaaagcuuaccaugggccagaucauuaccuucuuucaagaggugccccacgucaucgaagagguuaugaacauugugcugaucgcccucagccugcuugcuauucugaaggggaucuacaauguggccacaugcggacucuucggccuggucuccuuucuucugcucugugggagaucuugcagcacgaccuauaaaggaguguacgaacugcagacacuggagcucgacauggcgucccugaacauguguaugccucuuucuugcaccaagaauaacagccaucacuauaucaugguuggcaaugaaacagggcuggagcucacccugacaaacaccuccauuaucaaucauaaauucuguaaccuuucugaugcucacaagaaaaaucuguacgaccaugcccucaugagcauuaucuccacguuucaccugagcauuccgaacuucaaucaguaugaggccaugucuugcgauuuuaacggaggcaagaucuccgugcaguacaaucugagccacaccuaugcuauugacgccgcuaaccauuguggcacaaucgccaaugggguccuccaaaccuucaugcggauggcguggggaggcucuuacaucgcccuggauuccgggaagggaagcugggacugcauuaugacaucuuaccaguaucuuaucauucagaacaccacgugggaagaucacugucaguuuucccgccccagcccuaucggcuaccuggggcuccugucccaaagaacacgggacauuuauaucucucgcagacuucugggaaccuucacauggacccucagcgauuccgagggcaacgaaacccccggcggguacugccugacacgguggaugcugaucgaggcugagcucaaauguuuuggaaauacggccguggcuaagugcaacgaaaaacaugacgaggaguucugcgauaugcugcgccuuuuugacuucuguaagcaggccauuagacggcugaaaaccgaagcgcagaugagcauccagcucauuaauaaggccguuaacgcucugaucaaugaucaacuuauuaugaagaaccaucugcgcgacaucaugggcaucccuuauugcaauuacucuaaauauugguaccucaaccacacagugaccgggaagacaucccugcccagauguuggcuggucagcaauggaucuuaccucaacgaaacccacuucagcgacgauauugagcagcaggccgacaauaugaucacggagaugcugcaaaaagaauauauggaucggcagggcaagacaccucuugggcugguggaccucuuuguguucuccaccucuuuuuaccugauuagcaucuuccugcaccuugucaaaauuccgacccaucgccacguuaucggaaagcccugcccuaaaccccauagacucaaccacaugggcauuuguuccugcggccuguauaagcacccuggggugcccgugaaguggaaacggugaggacuaguuauaagacugacuagcccgaugggccucccaacgggcccuccuccccuccuugcaccgagauuaauaaaaaaaaaaaaaaaaaaaaaaaaaaaaaaaaaaaaaaaaaaaaaaaaaaaaaaaaaaaaaaaaaaaaaaaaaaaaaaaaaaaaaaaaaaaaaaaaaaaa

SEQ ID NO: 38199 - RNA, 1662 nt, Artificial Sequence
  mRNA product Design i-3 (A100) comprising derived and/or modified sequence from LASV(LASV237-NIG-2010;Clade II)__AIT17638__GPCmut10 (opt5)
aggagaaagcuuaccaugggccagaucauuaccuucuuucaagaggugccccacgucaucgaagagguuaugaacauugugcugaucgcccucagccugcuugcuauucugaaggggaucuacaauguggccacaugcggacucuucggccuggucuccuuucuucugcucugugggagaucuugcagcacgaccuauaaaggaguguacgaacugcagacacuggagcucgacauggcgucccugaacauguguaugccucuuucuugcaccaagaauaacagccaucacuauaucaugguuggcaaugaaacagggcuggagcucacccugacaaacaccuccauuaucaaucauaaauucuguaaccuuucugaugcucacaagaaagaccuguacgaucaugcccucaugagcauuaucuccacguuucaccugagcauuccgaauuucaaccaguaugaggccaugucuugcgacuuuaauggaggcaagaucuccgugcaguacaaccugagccacaccuaugcugucgaugccgcuaaucauuguggcacaauugccaacggggugcuccaaaccuucaugcggauggcguggggaggcucuuacaucgcccuggacuccgggaagggaagcugggauugcaucaugacaucuuaccaguaucuuauuauccagaauaccacgugggaagaccacugucaguuuucccgccccagcccuauuggcuaccuggggcuccugucccaaagaacacgggauaucuauauuucucgcagacuucugggaaccuucacauggacccucagcgacuccgagggcaacgaaacccccggcggguacugccugacacgguggaugcugaucgaggcugagcucaaauguuuuggaaacacggccguugcuaagugcaaugaaaaacaugaugaggaguucugcgacaugcugcgccuuuuugauuucuguaagcaggccaucagacggcugaaaaccgaagcgcagaugagcauucagcucaucaacaaggccgugaaugcucugauuaacgaccaacuuaucaugaagaaucaucugcgcgacauuaugggcaucccuuauugcaacuacucuaaauauugguaccucaaucacacagucaccgggaagacaucccugcccagauguuggcuggugagcaacggaucuuaccucaaugaaacccacuucagcgaugacaucgagcagcaggccgauaacaugauuacggagcugcuucaaaaagaauauauggaccggcagggcaagacaccucuggggcucguggaucuguuugucuucuccaccucuuuuuaccugaucagcauuuuccuucaccucaucaaaauuccgacccaucgccacaucacaggaaagcccugcccuaaaccccauagacugaaucacaugggcauuuguuccugcggccuguauaagcacccugggguucccgugaaguggaaacggugaggacuaguuauaagacugacuagcccgaugggccucccaacgggcccuccuccccuccuugcaccgagauuaauaaaaaaaaaaaaaaaaaaaaaaaaaaaaaaaaaaaaaaaaaaaaaaaaaaaaaaaaaaaaaaaaaaaaaaaaaaaaaaaaaaaaaaaaaaaaaaaaaaaa

SEQ ID NO: 38200 - RNA, 1662 nt, Artificial Sequence
  mRNA product Design i-3 (A100) comprising derived and/or modified sequence from LASV(LASV253-NIG-2011;Clade II)__AIT17670__GPCmut10 (opt5)
aggagaaagcuuaccaugggccagaucauuaccuucuuucaagaggugccccacgucaucgaagagguuaugaacauugugcugaucgcccucagccugcuugcuauucugaaggggaucuacaauguggccacaugcggacucuucggccuggucuccuuucuucugcucugugggagaucuugcagcacgaccuauaaaggaguguacgaacugcagacacuggagcucgacauggcgucccugaacauguguaugccucuuucuugcaccaagaauaacagccaucacuauaucaugguuggcaaugaaacagggcuggagcucacccugacaaacaccuccauuaucaaucauaaauucuguaaccuuucugaugcucacaagaaaaaucuguacgaccaugcccucaugagcauuaucuccacguuucaccugagcauuccgaacuucaaucaguaugaggccaugucuugcgauuuuaacggaggcaagaucuccgugcaguacaaucugagccacaccuaugcugucgacgccgcuaaccauuguggcacaauugccaauggggugcuccaaaccuucaugcggauggcguggggaggcucuuacaucgcccuggauuccgggaagggaagcugggacugcaucaugacaucuuaccaguaucuuauuauccagaacaccacgugggaagaucacugucaguuuucccgccccagcccuauuggcuaccuggggcuccugucccaaagaacacgggacaucuauauuucucgcagacuucugggaaccuucacauggacccucagcgauuccgagggcaacgaaacccccggcggguacugccugacacgguggaugcugaucgaggcugagcucaaauguuuuggaaauacggccguugcuaagugcaacgaaaaacaugacgaggaguucugcgauaugcugcgccuuuuugacuucuguaagcaggccaucagacggcugaaagcggaagcccagaugagcauucagcucaucaauaaggcugugaacgcccugauuaaugaucaacuuaucaugaagaaccaucugcgcgacauuaugggcaucccuuauugcaauuacucuaaauauugguaccucaaccacaccgucacagggagaaccucccugccccgguguuggcuggugagcaauggaucuuaccucaacgaaacacacuucagcgacgauaucgagcagcaggcugacaauaugauuaccgagcugcuucaaaaggaauauaucgaucgccagggcaaaacgccucuggggcucguggaccuguuugucuucuccacaucuuuuuaccugauuagcaucuuccuucaccucguuaagauuccgacccauagacacaucauuggaaaacccugcccuaagccccaucggcugaaccacaugggcaucuguuccugcggccuguauaaacacccuggggugcccgugaaguggaagcgcugaggacuaguuauaagacugacuagcccgaugggccucccaacgggcccuccuccccuccuugcaccgagauuaauaaaaaaaaaaaaaaaaaaaaaaaaaaaaaaaaaaaaaaaaaaaaaaaaaaaaaaaaaaaaaaaaaaaaaaaaaaaaaaaaaaaaaaaaaaaaaaaaaaaa

SEQ ID NO: 38201 - RNA, 1662 nt, Artificial Sequence
  mRNA product Design i-3 (A100) comprising derived and/or modified sequence from LASV(LASV254-NIG-2011;Clade II)__AIT17674__GPCmut10 (opt5)
aggagaaagcuuaccaugggccagaucauuaccuucuuucaagaggugccccacgucaucgaagagguuaugaacauugugcugaucgcccucagccugcuugcuauucugaaggggaucuacaauguggccacaugcggacucuucggccuggucuccuuucuucugcucugugggagaucuugcagcacgaccuauaaaggaguguacgaacugcagacacuggagcucgacaugaccaaccugaauauguguaugccucuuuccugcacaaagaacaauucucaucacuauaucaugguuggcaacgaaaccgggcuggagcucacacugaccaauacgagcauuaucaaccauaaauucuguaaucuuuccgaugcgcacaagaaaaaccuguacaaucaugcucucaugucuauuaucagcaccuuucaccuguccauuccgaacuucaaucaguaugaggccaugagcugcgacuuuaacggaggcaagaucucugugcaguacaaucugucccacagcuaugccgucgaugcugccaaccauuguggcacaauugcuaacggggugcuccaaaccuucaugcggauggccuggggaggcucuuacaucgcgcuggacuccgggaagggaaauugggauugcaucaugacaagcuaccaguaucuuauuauccagaacaccacgugggaagaccacugucaguuuucucgccccuccccuauuggcuaccuggggcuccugagccaaagaacacgggauaucuauauuucccgcagacuucugggaaccuucacauggacccucucugacagcgagggcaaugaaacccccggcggguacugccugacacgguggaugcugaucgaggccgagcucaaauguuuuggaaacacggcuguugccaagugcaaugaaaaacaugaugaggaguucugcgacaugcugcgccuuuuugauuucuguaagcaggcuaucagacggcugaaaaccgaagcccaggcgaacauucagcucaucaauaaggccgugaacgcucugauuaaugaccaacuuaucaugaagaaccaucugcgcgauauuaugggcaucccuuauugcaauuacuccaaauauugguaccucaaccacacagucaccgggaagacaagccugcccagauguuggcuggugucuaauggauccuaccucaacgaaacccacuucagcgacgacaucgagcagcaggccgauaauaugauuacggagcugcuucaaaaagaauauauggaccggcagggcaagacaccucuggggcucguggaucuguuugucuucucuaccagcuuuuaccugaucuccauuuuccuucaccucguuaaaaucccgacccaucgccacgugauuggaaagcccugcccuaaaccccauagacugaaccacaugggcaucuguucuugcggccuguauaagcacccuggggugcccgucaaguggaaacggugaggacuaguuauaagacugacuagcccgaugggccucccaacgggcccuccuccccuccuugcaccgagauuaauaaaaaaaaaaaaaaaaaaaaaaaaaaaaaaaaaaaaaaaaaaaaaaaaaaaaaaaaaaaaaaaaaaaaaaaaaaaaaaaaaaaaaaaaaaaaaaaaaaaa

SEQ ID NO: 38202 - RNA, 1662 nt, Artificial Sequence
  mRNA product Design i-3 (A100) comprising derived and/or modified sequence from LASV(Nig08-A19;Clade III)__ADU56618__GPCmut10 (opt5)
aggagaaagcuuaccaugggccagaucgugaccuucuuucaagaggucccccacguuauugaagaggugaugaacaucgugcugauugcccucagcauccuggcuauucuuaaggggcuguacaauaucgccacaugcggacucaucggccuggucacguuccuucugcucuccgggagaucuuguagcaugaccuauaaaggaguguacgaacugcagacacuggagcucaacaugaauacccugaacaugugcaugccucuuuccuguacaaagaauaacucucaucacuauauuaugguuggcaaugaaaccgggcuggagcucacacugaccaacacgagccuucugcaucacaaauuuugcaaucucuccgacgcgcauaagaaaaaccuguacgaucacacccugaugucuaucauuagcacauuccaccucuccaucccgaauuuuaaccaguaugaggcuaugagcugugacuucaauggaggcaagauuaccgugcaguacaaccugucucauuccuaugccaucgaugccgcuaaucacugcggcacagucgccaacggggugcuucaaaccuuuaugcggauggcuuggggaggcagcuacauugcccuggacucugggcgcggaaagugggauuguaucaugacguccuaccaguaucucaucauucagaacacaaccugggaagaccauugccaguucagcagacccucuccuaucggcuaccuggggcuucugucccaacggacacgcgauauuuauaucagcagacggcuccugggaaccuuuaccuggacacuguccgacucugagggcaaugaaacgcccggcggguacugucucacccgcuggaugcugauugaggcggagcuuaaaugcuucggaaacacagccguugcuaaguguaaugaaaaacacgaugaggaauuuugcgacaugcugagacucuucgauuuuugcaagcaggccauccggcgccugaaagcugaggcccagaugagcauccagcuuauuaacaaggcggugaaugcccugaucaacgaccaacucauuaugaagaaucaccugagagauaucaugggcauuccuuauuguaacuacuccaaauauugguaccugaaucauaccagcacagggcggaccucucucccccgcugcuggcuggucuccaacggaagcuaccuuaaugaaacgcacuucucugacgacaucgagcagcaggcugauaacaugaucacagagaugcugcaaaaggaauaucucgacagacagggcaaaaccccucuggggcugguggaucuuuucguguuuagcaccuccuucuaccucauuucuaucuuucugcaucuggucaagauuccgacacaccggcauaucguuggaaaacccuguccuaagccccaccgccucaaucacaugggcauuugcagcuguggccuguauaaacagccuggggugcccgugagauggaagcggugaggacuaguuauaagacugacuagcccgaugggccucccaacgggcccuccuccccuccuugcaccgagauuaauaaaaaaaaaaaaaaaaaaaaaaaaaaaaaaaaaaaaaaaaaaaaaaaaaaaaaaaaaaaaaaaaaaaaaaaaaaaaaaaaaaaaaaaaaaaaaaaaaaaa

SEQ ID NO: 38203 - RNA, 1665 nt, Artificial Sequence
  mRNA product Design i-3 (A100) comprising derived and/or modified sequence from LASV(G1180-SLE-2010;Clade IV)__AIT17168__GPCmut10 (opt5)
aggagaaagcuuaccaugggccagaucgugaccuucuuucaagaggucccccacguuauugaagaggugaugaacaucgugcugauugcccucagcauccuggcuguccuuaaggggcuguacaauuucgccacaugcggacucgugggccugcuuacguuucugcuccugugugggagauccugcaccgcgucucgguauaaaggaguuuacgaacugcagacacucgagcugaacauggaaacccuuaauauguguaugccucugagcugcacaaagaacaauucccaucacuauauuauggugggcaacgagaccgggcucgagcugacacuuaccaauacgucuaucaucaaccauaaauucuguaaucugagcgacgcucacaagaaaaaccucuacgaucaugcccugauguccauuaucucuaccuuucaccugagcauuccgaauuucaaccaguaugaagccauguccugcgacuuuaauggaggcaagaucagcguccaguacaaccucucucacuccuaugcuggcgaugccgcuaaucauugugggacaguggccaacggaguucugcaaaccuucaugcgcauggcguggggcgggagcuacauugcccuugacucuggacacggcuccugggauugcaucaugacaagcuaccaguaucugauuauccagaacaccacgugggaggaccauugucaguuuucuagacccuccccuaucggguaccucggacugcuuagccaacggacacgcgauauuuauaucuccagacggcugcucggcaccuucacauggacccugucugacagcgaaggcaaggauacccccgggggauacugccugacacgcuggaugcucauugaggcugagcugaaauguuuuggcaauacggccguggcuaagugcaacgaaaaacacgacgaggaguucugcgauaugcuuagacuguuugacuucuguaagcaggccauccagcggcucaaagcggaagcccagauguccauucaacugaucaauaaggcugucaacgcccuuaucaaugaucagcugauuaugaagaaccaccuccgcgacaucauggggauuccuuauugcaauuacagcaaauauugguaccugaaccauaccacaaccggaaagacaucucugcccaaauguuggcucguguccaauggcagcuaccugaacgaaacccacuucucugacgauaucgagcagcaagcugacaauaugauuacggagaugcuucagaaggaauauauggagagacaggggaaaacaccucugggacucguggaucuguuugucuucagcaccuccuuuuaccugaucucuaucuuccuucaucucguuaagauuccgacccaccggcauaucgugggcaaaagcugccccaagccucaccgccugaaccacaugggcauuuguuccugcgggcuguauaagcagcccggagugccugucaaauggaagagaugaggacuaguuauaagacugacuagcccgaugggccucccaacgggcccuccuccccuccuugcaccgagauuaauaaaaaaaaaaaaaaaaaaaaaaaaaaaaaaaaaaaaaaaaaaaaaaaaaaaaaaaaaaaaaaaaaaaaaaaaaaaaaaaaaaaaaaaaaaaaaaaaaaaa

SEQ ID NO: 38204 - RNA, 1665 nt, Artificial Sequence
  mRNA product Design i-3 (A100) comprising derived and/or modified sequence from LASV(G1442-SLE-2011;Clade IV)__AIT17180__GPCmut10 (opt5)
aggagaaagcuuaccaugggccagaucgugaccuucuuucaagaggucccccacguuauugaagaggugaugaacaucgugcugauugcccucagcauccuggcuguccuuaaggggcuguacaauguggccacaugcggacucauuggccugguuacguuccuucugcucugugggagauccugcaccacaacccuguauaaaggaguguacgaacugcagacacucgagcugaacauggaaacccuuaauauguguaugccucugucuugcacaaagaacaauagccaucacuauauccgggucggcaacgagaccgggcucgagcugacgcuuaccaauacauccaucauuaaccauaaauuuuguaaucugucugacgcgcacaagaaaaaccucuacgaucaugcucugaugagcaucauuuccaccuuccaccugucuaucccgaauuuuaaccaguaugaagccaugagcugcgacuucaauggaggcaagauuuccgugcaguacaaccucagccacucuuaugccggcgaugcugccaaucauugugggacaguugcuaacggagugcugcaaaccuuuaugcgcauggccuggggcggguccuacaucgcgcuugacagcggaagaggcaacugggauugcauuaugacgucuuaccaguaucugaucauccagaauacaaccugggacgaucacugucaguucucccggcccagcccuauuggguaccucggacugcuuucucaacgcacaagagacgucuauaucucccggcgccugcucggcaccuuuaccuggacacugagcgauuccgagggcaaggacacgcccgggggauacugccugaccagauggaugcucauugaagccgagcugaaauguuucggcaacacagcuguggccaagugcaaugagaaacaugaugaagaguuuugcgacaugcuucggcuguucgauuuuuguaagcaggcuauccagcgccucaaagccgaagcgcagaugucuauucaacugaucaacaaggccgugaaugcucuuaucaacgaccagcugauuaugaagaaucaccucagagacaucauggggauuccuuauugcaacuacagcaaauauugguaccugaauaacaccgccacaggaaagaccucccugcccaaauguuggcucaucagcaauggcucuuaccugaacgagacgcacuucuccgaugacauugaacaggaggcugauaauaugaucacagagaugcuucaaaaggaauauauggagcggcaggggaaaaccccucugggacucgucgaccuguucguuuuuagcaccucuuucuaccugaucagcauuuuucuucaucucgugaagaucccgacacaccgccauauugugggcaaauccugccccaagccucacagacugaaccauaugggcaucuguucuugcgggcuguauaagcagcccggagucccugugcgguggaaacgcugaggacuaguuauaagacugacuagcccgaugggccucccaacgggcccuccuccccuccuugcaccgagauuaauaaaaaaaaaaaaaaaaaaaaaaaaaaaaaaaaaaaaaaaaaaaaaaaaaaaaaaaaaaaaaaaaaaaaaaaaaaaaaaaaaaaaaaaaaaaaaaaaaaaa

SEQ ID NO: 38205 - RNA, 1665 nt, Artificial Sequence
  mRNA product Design i-3 (A100) comprising derived and/or modified sequence from LASV(G3010-SLE-2013;Clade IV)__AIT17344__GPCmut10 (opt5)
aggagaaagcuuaccaugggccagaucgugaccuucuuucaagaggucccccacguuauugaagaggugaugaacaucgugcugauugcccucagcauccuggcuguccuuaaggggcuguacaauuucgccacaugcggacucgugggccugguuacguuucuucugcucugugggagauccugcaccacaucucuguauaaaggaguguacgaacugcagacccucgagcugaacauggaaacacuuaauauguguaugccucugagcugcaccaagaacaauucccaucacuauauuauggucggcaacgagacagggcucgagcugacccuuacgaauaccucuaucaucaaccauaaauucuguaaucugagcgacgcgcacaagaaaaaccucuacaaucaugcucugauguccauuaucucuacauuucaccugagcauuccgaacuucaaucaguaugaagccauguccugcgauuuuaacggaggcaagaucagcgugcaguacaaucucucucacuccuaugccggcgacgcugccagccauugugggaccguugcuaacggagugcugcaaacauucaugcggauggccuggggcgggucuuacauugcgcuugauuccggauacggcaagugggacugcaucaugaccagcuaucaguaccugauuauccagaacacgacaugggaggaucacugucaguuuucucgccccuccccuaucggguaucucggacugcuuagccaaagaacccgggacauuuacaucucccgcagacugcucggcacauucaccuggacccugucugauagcgaaggcaaagacacacccgggggauauugccugacgcgguggaugcucauugaggccgagcugaaguguuuuggcaauaccgcugucgccaaaugcaacgaaaagcaugaugaggaguucugcgacaugcuucgccuguuugauuucuguaaacaggcuauccagagacucaagacagaagcccagauguccauucaacugaucaauaaggcggugaacgcccuuaucaaugaccagcugauuaugaaaaaccaccuccgggauaucauggggauuccuuacugcaauuauagcaaguacugguaccugaaccacaccacaaccggaaaaacgucucugcccaaguguuggcucguguccaauggcagcuaucugaacgaaacacauuucucugacgacaucgagcagcaagcugauaauaugauuaccgagaugcuucagaaagaauacauggagcgccaggggaagaccccucugggacucgucgaccuguuuguuuucagcacauccuuuuaucugaucucuaucuuccuucaccucgugaaaauuccgacccauagacacaucgugggcaagagcugccccaagccucaucggcugaaccacaugggcauuuguuccugcgggcuguacaaacagcccggagucccugugcgcuggaagagaugaggacuaguuauaagacugacuagcccgaugggccucccaacgggcccuccuccccuccuugcaccgagauuaauaaaaaaaaaaaaaaaaaaaaaaaaaaaaaaaaaaaaaaaaaaaaaaaaaaaaaaaaaaaaaaaaaaaaaaaaaaaaaaaaaaaaaaaaaaaaaaaaaaaa

SEQ ID NO: 38206 - RNA, 1665 nt, Artificial Sequence
  mRNA product Design i-3 (A100) comprising derived and/or modified sequence from LASV(G502-SLE-2009;Clade IV)__AIT17126__GPCmut10 (opt5)
aggagaaagcuuaccaugggccagaucgugaccuucuuucaagaggucccccacguuauugaagaggugaugaacaucgugcugauugcccucagcauccuggcuguccuuaaggggcuguacaauuucgccacaugcggacucgugggccugcuuacguuucugcuccugugugggagauccugcaccacaggacuguauaaaggcguuuacgaacuccagacccuggagcuuaacauggaaacacugaauauguguaugccucucucuugcaccaagaacaauagccaucacuauauuaugguggggaacgagacaggacuggagcuuacccugacgaauaccuccaucaucaaccauaaauucuguaaucucucugacgcgcacaagaaaaaccuguacgaucaugcucugaugagcauuaucuccacauuucaccucucuauuccgaauuucaaccaguaugaagccaugagcugcgacuuuaauggcggcaagaucuccguccaguacaaccugagccacucuuaugccggggaugcugccgaccauuguggaaccguggcuaauggcguucuucaaacauucaugcggauggccuggggaggguccuacauugcgcuggauagcggccgcgggagaugggacugcaucaugaccucuuaccaguaucucauuauccagaacacgacaugggaggaucacugucaguuuucccggcccagcccuaucggauaccugggccuucugucucaacgcaccagagacauuuauaucucccggcgccuccugggcacauucaccuggacccugagcgauuccgaagggaaggacacacccggaggcuacugccucacgagauggaugcugauugaggccgagcuuaaauguuuugggaacaccgcuguggccaagugcaaugaaaaacaugaugaggaguucugcgacaugcugcggcucuuugauuucuguaagcaggcuauccagcgccugaaagccgaagcgcagaugucuauucaacuuaucaacaaggccgucaaugcucugaucaacgaccagcucgugaugaagaaucaccugagagacauuaugggaaucccuuauugcaacuacagccgguauugguaccugaaucacacaaccacaggccgcaccucccuccccaaauguuggcuggugagcaacgggucuuaccuuaaugaaacgcauuucuccgaugacauugagcagcaagccgauaacaugaucacagagaugcugcagaaggaauauauggagagacagggaaaaaccccucucggccuggucgaccuguuuguuuucagcaccucuuuuuaccuuauuagcaucuuccuccaccuggugaagaucccgacacaucggcacauugugggcaaauccugccccaagccucaucgccugaaucacauggggaucuguucuugcggacucuauaaacagcccggcgucccugugaaguggaagagaugaggacuaguuauaagacugacuagcccgaugggccucccaacgggcccuccuccccuccuugcaccgagauuaauaaaaaaaaaaaaaaaaaaaaaaaaaaaaaaaaaaaaaaaaaaaaaaaaaaaaaaaaaaaaaaaaaaaaaaaaaaaaaaaaaaaaaaaaaaaaaaaaaaaa

SEQ ID NO: 38207 - RNA, 1665 nt, Artificial Sequence
  mRNA product Design i-3 (A100) comprising derived and/or modified sequence from LASV(G733-SLE-2010;Clade IV)__AIT17154__GPCmut10 (opt5)
aggagaaagcuuaccaugggccagaucgugaccuucuuucaagaggucccccacguuauugaagaggugaugaacaucgugcugauugcccucagcauccuggcuguccuuaaggggcuguacaauuucgccacaugcggaauugugggccucguuuccuuucugcuucugugugggagaucuugcacgaccagccucuauaaaggaguguacgaacugcagacacuggagcucaacauggaaacccugaauauguguaugccucuuuccugcacaaagaacaauucucaucacuauaucauggucggcaacgagaccgggcuggagcucacacugaccaauacgagcaucauuaaccauaaauucuguaaucuuuccgacgcgcacaagaaaaaccuguacgaucaugcucucaugucuaucauuagcaccuuucaccuguccaucccgaauuucaaccaguaugaagccaugagcugcgacuuuaauggaggcaagauuucugugcaguacaaccugucccacagcuaugccggcgaugcugccaaucauugugggacaaucgcuaacggaguucuccaaaccuucaugcggauggccuggggcgggucuuacauugcgcuggacuccggacgcgauagaugggacugcaucaugacaagcuaccaguaucuuaucauucagaacaccacgugggaggaucacugucaguuuucucggcccuccccuaucggcuaccuggggcuccugagccaacgcacaagagacauuuauaucucccggcgccuucugggaaccuucacauggacccucucugauagcgaaggcaaggacacccccggcggguacugccugacaagauggaugcugauugaggccgagcucaaauguuuuggaaauacggcuguggccaagugcaacgaaaaacaugaugaggaguucugcgacaugcugcggcuuuuugauuucuguaagcaggcuauccagcgccugaaagccgaagcgcagauguccauccaacucauuaauaaggccgucaacgcucugaucaaugaccagcuuauuaugaagaaccaccugagagacaucaugggcauuccuuauugcaauuacagcaaauauugguaccucaaccacaccacaaccgggaagacaucucugcccaaauguuggcugguguccaauggaagcuaccucaacgaaacccauuucucugaugacaucgagcagcaagccgauaauaugaucacggagaugcugcagaaggaauauauggagcggcagggcaaaacaccucuugggcugguggaccucuuugucuucagcaccuccuuuuaccugauuucuaucuuccugcaccuuguuaagauuccgacccaucgccacguggugggaaaaagcugccccaagccucauagacucaaccacaugggcaucuguuccugcggccuguaugggcagcccggagucccugugaaguggaaacggugaggacuaguuauaagacugacuagcccgaugggccucccaacgggcccuccuccccuccuugcaccgagauuaauaaaaaaaaaaaaaaaaaaaaaaaaaaaaaaaaaaaaaaaaaaaaaaaaaaaaaaaaaaaaaaaaaaaaaaaaaaaaaaaaaaaaaaaaaaaaaaaaaaaa

SEQ ID NO: 38208 - RNA, 1665 nt, Artificial Sequence
  mRNA product Design i-3 (A100) comprising derived and/or modified sequence from MOPV/LASV reassortant(IGS-1;Clade IV)__AFY05576__GPCmut10 (opt5)
aggagaaagcuuaccaugggccagaucgugaccuucuuucaagaggucccccacguuauugaagaggugaugaacaucgugcugauugcccucagcguccuggcugugcuuaaggggcuguacaauuucgccacaugcggacucguuggccuggugacguuucuucugcucugugggagauccugcaccacaucucuguauaaaggagucuacgaacugcagacccucgagcugaacauggaaacacuuaauauguguaugccucugagcugcaccaagaacaauucccaucacuauaucauggugggcaacgagacagggcucgagcugacccuuacgaauaccucuauuaucaaccauaaauucuguaaucugagcgacgcgcacaagaaaaaccucuacgaucaugcucugauguccaucauuucuacauuucaccugagcaucccgaauuucaaccaguaugaagccauguccugcgacuuuaauggaggcaagauuagcguucaguacaaccucucucacuccuaugccggcgaugcugccaaucauugugggaccguggcuaacggaguccugcaaacauucaugcggauggccuggggcgggagcuacaucgcgcuugacucuggacgcggcaacugggauugcauuaugaccuccuaccaguaucugaucauucagaauacgacaugggaggaccacugucaguuuagcagacccucuccuaucggguaccucggacugcuuucccaacggacccgcgauaucuauauuagcagacggcugcucggcacauucaccuggacccuguccgacucugaaggcgaggauacacccgggggauacugccugacgcgcuggaugcucaucgaggccgaacugaaguguuuuggcaacaccgcuguggccaaaugcaaugagaagcaugacgaagaguucugcgauaugcuuagacuguuugacuucuguaaacaggcuauucagcggcucaaggccgaagcgcagaugagcauccaacugauuaacaaagccgugaaugcucuuaucaacgaucagcugaucaugaagaaucaccuccgcgacauuauggggaucccuuauugcaacuacuccaaguauugguaccugaaucacacaaccacaggaagaaccagccugcccaaauguuggcucgucucuaacggcuccuaccugaaugagacgcauuucagcgacgauauugagcagcaagccgacaacaugaucacagaaaugcuucagaaggaguauauggaacggcaggggaaaaccccucugggacucguugaucuguuuguguucucuaccagcuuuuaccugauuuccaucuuccuucaccucgugaagaucccgacacaucgccacauugucggcaaaucuugccccaagccucauagacugaaucacaugggcaucuguagcugcgggcuguauaaacagcccggagugccuguuaaguggaagcggugaggacuaguuauaagacugacuagcccgaugggccucccaacgggcccuccuccccuccuugcaccgagauuaauaaaaaaaaaaaaaaaaaaaaaaaaaaaaaaaaaaaaaaaaaaaaaaaaaaaaaaaaaaaaaaaaaaaaaaaaaaaaaaaaaaaaaaaaaaaaaaaaaaaa

SEQ ID NO: 38209 - RNA, 1665 nt, Artificial Sequence
  mRNA product Design i-3 (A100) comprising derived and/or modified sequence from LASV(LM765-SLE-2012;Clade IV)__AIT17814__GPCmut10 (opt5)
aggagaaagcuuaccaugggccagaucgugaccuucuuucaagaggucccccacguuauugaagaggugaugaacaucgugcugauugcccucagcauccuggcuguccuuaaggggcuguacaauuucgccacaugcggacucgugggccugguuacguuucuucugcucugugggagauccugcaccacaucucuguauaaaggaguguacgaacugcagacccucgagcugaacauggaaacacuuaauauguguaugccucugagcugcaccaagaacaauucccaucacuauauuauggucggcaacgagacagggcucgagcugacccuuacgaauaccucuaucaucgaccauaaauucuguaaccugagcgaugcgcaccggaagaaucucuacgaccaugcucugauguccauuaucucuacauuucaccugagcauuccgaacuucaaucaguaugaagccauguccugcgauuuuaacggaggcaaaaucagcgugcaguacaaucucucucacuccuaugccaaggacgcugccgaucauuguggcaccguugcuaacggggugcugcaaacauucaugcgcauggccuggggaggcagcuacauugcgcuugacucugggagaggacggugggauugcaucaugaccuccuaccaguaucugauuauccagaauacgacaugggaggaccacugucaguuuagccgccccucuccuaucggcuaccucgggcugcuuucccaaagaacccgggauauuuauaucagccgcagacugcucggaacauucaccuggacccuguccgacucugaaggcaaggauacacccggcggguacugccugacgcgguggaugcucauugaggccgagcugaaauguuuuggaaacaccgcugucgccaagugcaacgaaaaacaugacgaggaguucugcgauaugcuucgccuguuugacuucuguaagcaggcuauccagagacucaaagccgaagcgcagaugagcauucaacugaucaauaaggccgugaacgcucuuaucaaugaccagcugauuaugaagaaccaccuccgggauaucaugggcauuccuuauugcaauuacuccaaauauugguaccugaaccacacaaccacagggaagaccagccugcccaaauguuggcucgugucuaauggauccuaccugaacgaaacgcauuucagcgacgauaucgagcagcaagccgacaauaugauuacagagaugcuucagaaggaauauauggagcgccagggcaaaaccccucuggggcucgucgaucuguuuguuuucucuaccagcuuuuaccugaucuccaucuuccuucaccucgugaagauuccgacacauagacacaucgugggaaaacccugcccuaagccccaucggcugaaccacaugggcauuuguucuugcggccuguauaagcagccugggguccccgugaaauggaagcgcugaggacuaguuauaagacugacuagcccgaugggccucccaacgggcccuccuccccuccuugcaccgagauuaauaaaaaaaaaaaaaaaaaaaaaaaaaaaaaaaaaaaaaaaaaaaaaaaaaaaaaaaaaaaaaaaaaaaaaaaaaaaaaaaaaaaaaaaaaaaaaaaaaaaa

SEQ ID NO: 38210 - RNA, 1665 nt, Artificial Sequence
  mRNA product Design i-3 (A100) comprising derived and/or modified sequence from LASV(LM776-SLE-2012;Clade IV)__AIT17824__GPCmut10 (opt5)
aggagaaagcuuaccaugggccagaucgugaccuucuuucaagaggucccccacguuauugaagaggugaugaacaucgugcugauugcccucagcauccuggcuguccuuaaggggcuguacaauuucgccacaugcggacucgugggccugguuacguuucuucugcucugugggagauccugcaccacaucuguguauaaaggagucuacgaacugcagacccuggagcucaacauggaaacacugaauauguguaugccucuuagcugcaccaagaacaauucccaucacuauauuauggugggcaacgagacagggcuggagcucacccugacgaauaccucuaucaucaaccauaaauucuguaaucuuagcgacgcgcacaagaaaaaccuguacgaucaugcucucauguccauuaucucuacauuucaccugagcauuccgaauuucaaccaguaugaagccauguccugcgacuuuaauggaggcaagaucagcguucaguacaaccugucucacuccuaugccggcgaugcugccaaucauugugggaccguggcuaacggaguccuccaaacauucaugcggauggccuggggcgggagcuacauugcgcuggacucuggacacggcaagugggauugcaucaugaccuccuaccaguaucuuauuauccagaacacgacaugggaggaccauugucaguuuagccgccccucuccuaucggguaccugggacuccugucccaaagaacccgggauauuuauaucagccgcagacuucugggcacauucaccuggacccucuccgacucugaaggcaaagauacacccgggggauacugccugacgcgguggaugcugauugaggccgagcucaaguguuuuggcaauaccgcuguggccaaaugcaacgaaaagcacgacgaggaguucugcgauaugcugcgccuuuuugacuucuguaaacaggcuauccagagacugaaggccgaagcgcagaugagcauucaacucaucaauaaggccgugaacgcucugaucaaugaucagcuuauuaugaaaaaccaucugcgggacaucauggggauuccuuauugcaauuacuccaaguauugguaccucaaccacacaaccacaggaaaaaccagccugcccaaguguuggcuggucucuaauggcuccuaccucaacgaaacgcacuucagcgacgauaucgagcagcaagccgacaauaugauuacagagaugcugcagaaagaauauauggagcgccaggggaagaccccucuuggacugguugaucucuuuguguucucuaccagcuuuuaccugaucuccaucuuccugcaucuugugaaaauuccgacacacagacauaucgucggcaagucuugccccaagccucaccggcucaaccacaugggcauuuguagcugcgggcuguauaaacagcccggagugccuguucgcuggaagagaugaggacuaguuauaagacugacuagcccgaugggccucccaacgggcccuccuccccuccuugcaccgagauuaauaaaaaaaaaaaaaaaaaaaaaaaaaaaaaaaaaaaaaaaaaaaaaaaaaaaaaaaaaaaaaaaaaaaaaaaaaaaaaaaaaaaaaaaaaaaaaaaaaaaa

SEQ ID NO: 38211 - RNA, 1665 nt, Artificial Sequence
  mRNA product Design i-3 (A100) comprising derived and/or modified sequence from LASV(Mad39;Clade IV)__ANH09722__GPCmut10 (opt5)
aggagaaagcuuaccaugggccagaucgugaccuucuuucaagaggucccccacguuauugaagaggugaugaacaucgugcugauugcccucagcauccuggcuguccuuaaggggcuguacaauguggccacaugcggacucauuggccugguuacguuccuucugcucugugggagauccugcaccacaacccuguauaaaggaguguacgaacugcaggcgcucgagcugaacauggaaacacuuaauauguguaugccucugucuugcaccaagaacaauagccaucacuauauccgggucggcaacgagacagggcucgagcugacccuuacgaauaccucccugaucaaccauaaauuuuguaaucucucugacgcucacaagaaaaaccuguacgaucaugcccugaugagcauuaucuccacauuccaccucucuauuccgaauuuuaaccaguaugaagccaugagcugcgacuucaaugauggaaagaucuccgugcaguacaaccugagccacaccuaugcuggcgacacagccaaucauuguggcaccguugcuaacggggugcuucaaacguuuaugcgcauggccuggggaggcucuuacauugcgcuggauuccgggagaggaggcugggacugcaucaugacaagcuaccaguaucucauuauccagaacaccacaugggaggaucacugucaguucucucggcccuccccuaucggguaccugggacuucugagccaacgcaccagagacauuuauaucucucggcgccuccugggcaccuuuacauggacgcuguccgauagcgaaggcaaggacacccccgggggauacugccucacaagauggaugcugauugaggccgagcuuaaauguuucggcaauaccgcugucgccaagugcaacgaaaaacaugaugaggaauuuugcgacaugcugcgccucuucgauuuuuguaagcaggcuauccagcggcugaaagccgaggcgcagauguccauucaacuuaucaauaaggccgugaacgcucugaucaaugaccagcucauuaugaagaaccaccugagagacaucauggggauuccuuauugcaauuacucuaaauauugguaccugaaccacacagugaccggaaagacgagccuccccaaauguuggcuggucuccaauggcagcuaccuuaacgaaacacauuucucugaugacaucgagcagcaagccgauaauaugauuaccgagaugcugcagaaggaauauauggagcggcaggggaaaaccccucucggacugguugaccuguucguguuuuccaccagcuucuaccuuaucucuaucuuucuccaccuggugaagauuccgacacaucgccacgucgugggcaaacccugcccuaagccccauagacugaaccacaugggcaucuguagcugcggguucuauaagcagccuggaguucccgugcgguggaaacgcugaggacuaguuauaagacugacuagcccgaugggccucccaacgggcccuccuccccuccuugcaccgagauuaauaaaaaaaaaaaaaaaaaaaaaaaaaaaaaaaaaaaaaaaaaaaaaaaaaaaaaaaaaaaaaaaaaaaaaaaaaaaaaaaaaaaaaaaaaaaaaaaaaaaa

SEQ ID NO: 38212 - RNA, 1665 nt, Artificial Sequence
  mRNA product Design i-3 (A100) comprising derived and/or modified sequence from LASV(Z0947-SLE-2011;Clade IV)__AIT17840__GPCmut10 (opt5)
aggagaaagcuuaccaugggccagaucgugaccuucuuucaagaggucccccacguuauugaagaggugaugaacaucgugcugauugcccucagcauccuggcuguccuuaaggggcuguacaauuucgccacaugcggacucgugggccugguuacguuucuucugcucugugggagauccugcaccauuucucuguauaaaggaguguacgaacugcagacacucgagcugaacauggaaacccuuaauauguguaugccucugagcugcacaaagaacaauucccaucacuauaucauggucggcaacgagaccgggcucgagcugacacuuaccaauacgucuaucauuaaccauaaauucuguaaucugagcgacgcgcacaagaaaaaccucuacgaucaugcucugauguccaucauuucuaccuuucaccugagcaucccgaauuucaaccaguaugaagccauguccugcgacuuuaauggaggcaagauuagcgugcaguacaaccucucucacuccuaugccggcgaugcugccaaucauugugggacaguugcuaacggagugcugcaaaccuucaugcggauggccuggggcgggagcuacaucgcgcuugacucuggacgcgauagaugggacugcauuaugacauccuaccaguaucugaucauccagaacaccacgugggaggaucacugucaguuuagccggcccucuccuauuggcuaccucgggcugcuuucccaacgcacaagagacaucuauauuagccggcgccugcucggaaccuucacauggacccuguccgauucugaaggcaaggacacccccggcggguacugccugacaagauggaugcucaucgaggccgagcugaaauguuuuggaaauacggcugucgccaagugcaacgaaaaacaugaugaggaguucugcgacaugcuucggcuguuugauuucuguaagcaggcuauucagcgccucaaagccgaagcgcagaugagcauccaacugaucaauaaggccgugaacgcucuuauuaaugaccagcugaucaugaagaaccaccucagagacauuaugggcaucccuuauugcaauuacuccaaauauugguaccugaaccacaccacaaccgggaagacaagccugcccaaauguuggcucgugucuaauggauccuaccugaacgaaacccauuucagcgaugacauugagcagcaagccgauaauaugaucacggagaugcuucagaaggaauauauggagcggcagggcaaaacaccucuggggcucgucgaccuguuuguuuucucuaccagcuuuuaccugaucuccauuuuccuucaccucgugaagaucccgacccaucgccacauugugggaaaacccugcccuaagccccauagacugaaccacaugggcaucuguucuugcggccuguauaagcagccugggguccccgugaaauggaagcggugaggacuaguuauaagacugacuagcccgaugggccucccaacgggcccuccuccccuccuugcaccgagauuaauaaaaaaaaaaaaaaaaaaaaaaaaaaaaaaaaaaaaaaaaaaaaaaaaaaaaaaaaaaaaaaaaaaaaaaaaaaaaaaaaaaaaaaaaaaaaaaaaaaaa

SEQ ID NO: 38213 - protein, 491 aa, Artificial Sequence
  derived and/or modified protein sequence (artificial) from LASV(Josiah;Clade IV)__NP_694870__GPCmut11
MGQIVTFFQEVPHVIEEVMNIVLIALSVLAVLKGLYNFATCGLVGLVTFLLLCGRSCTTSLYKGVYELQTLELNMETLNMTMPLSCTKNNSHHYIMVGNETGLELTLTNTSIINHKFCNLSDAHKKNLYDHALMSIISTFHLSIPNFNQYEAMSCDFNGGKISVQYNLSHSYAGDAANHCGTVANGVLQTFMRMAWGGSYIALDSGRGNWDCIMTSYQYLIIQNTTWEDHCQFSRPSPIGYLGLLSQRTRDIYISRRLLGTFTWTLSDSEGKDTPGGYCLTRWMLIEAELKCFGNTAVAKCNEKHDEEFCDMLRLFDFNKQAIQRLKAEAQMSIQLINKAVNALINDQLIMKNHLRDIMGIPYCNYSKYCYLNHTTTGRTSLPKCCLVSNGSYLNETHFSDDIEQQADNMITEMLQKEYMERQGKTPLGLVDLFVFSTSFYLISIFLHLVKIPTHRHIVGKSCPKPHRLNHMGICSCGLYKQPGVPVKWKR

SEQ ID NO: 38214 - protein, 490 aa, Artificial Sequence
  derived and/or modified protein sequence (artificial) from LASV(LP;Clade I)__AAF86701__GPCmut11
MGQIITFFQEVPHVIEEVMNIVLIALSLLAILKGLYNIATCGIIGLVAFLFLCGKSCSLTLKGGYELQTLELNMETLNMTMPLSCTKNSSHHYIRVGNETGLELTLTNTSIINHKFCNLSDAHKKNLYDHALMSIISTFHLSIPNFNQYEAMSCDFNGGKISVQYNLSHSYAGDAAEHCGTVANGVLQTFMRMAWGGRYIALDSGKGNWDCIMTSYQYLIIQNTTWEDHCQFSRPSPIGYLGLLSQRTRDIYISRRLLGTFTWTLSDSEGNETPGGYCLTRWMLIEAELKCFGNTAVAKCNEKHDEEFCDMLRLFDFNKQAIRRLKAEAQMSIQLINKAVNALINDQLIMKNHLRDIMGIPYCNYSKYCYLNHTSSGRTSLPKCCLISNGSYLNETQFSDDIEQQADNMITEMLQKEYIERQGKTPLGLVDIFIFSTSFYLISIFLHLIKIPTHRHIVGKPCPKPHRLNHMGVCSCGLYKHPGVPTKWKR

SEQ ID NO: 38215 - protein, 490 aa, Artificial Sequence
  derived and/or modified protein sequence (artificial) from LASV(803213;Clade II)__AAF86703__GPCmut11
MGQIITFFQEVPHVIEEVMNIVLIALSLLAILKGIYNVATCGLFGLISFLLLCGRSCSVTYKGVYELQTLELNMANLNMTMPLSCTKNNSHHYIMVGNETGLELTLTNTSIINHKFCNLSDAHKKNLYDHALMSIISTFHLSIPNFNQYEAMSCDFNGGKISVQYNLSHSFAVDAANHCGTIANGVLQTFMRMAWGGSYIALDSGKGNWDCIMTSYQYLIIQNTTWEDHCQFSRPSPIGYLGLLSQRTRDIYISRRLLGTFTWTLSDSEGNEAPGGYCLTRWMLIEAELKCFGNTAVAKCNEKHDEEFCDMLRLFDFNKQAIKRLKTEAQMSIQLINKAVNALINDQLIMKNHLRDIMGIPYCNYSRYCYLNHTVTGKTSLPRCCLVSNGSYLNETHFSDDIEQQADNMITEMLQKEYMDRQGKTPLGLVDLFVFSTSFYLISIFLHLVKIPTHRHIVGKPCPKPHRLNHMGICSCGLYKHPGVPVKWKR

SEQ ID NO: 38216 - protein, 490 aa, Artificial Sequence
  derived and/or modified protein sequence (artificial) from LASV(GA391;Clade III)__CAA36645__GPCmut11
MGQIVTFFQEVPHVIEEVMNIVLIALSILAILKGLYNVATCGLIGLVTFLLLSGRSCSLIYKGTYELQTLELNMETLNMTMPLSCTKNNSHHYIRVGNETGLELTLTNTSILNHKFCNLSDAHKRNLYDHSLMSIISTFHLSIPNFNQYEAMSCDFNGGKITVQYNLSHSFAVDAAGHCGTLANGVLQTFMRMAWGGSYIALDSGRGNWDCIMTSYQYLIIQNTTWDDHCQFSRPSPIGYLGLLSQRTRDIYISRRLLGTFTWTLSDSEGNETPGGYCLTRWMLIEAELKCFGNTAVAKCNEKHDEEFCDMLRLFDFNKQAIRRLKTEAQMSIQLINKAVNALINDQLIMKNHLRDIMGIPYCNYSRYCYLNHTSTGKTSLPRCCLISNGSYLNETKFSDDIEQQADNMITEMLQKEYIDRQGKTPLGLVDLFVFSTSFYLISIFLHLVKIPTHRHIVGKPCPKPHRLNHMGICSCGLYKQPGVPVRWKR

SEQ ID NO: 38217 - protein, 491 aa, Artificial Sequence
  derived and/or modified protein sequence (artificial) from LASV(AV;Clade V)__CCA30314__GPCmut11
MGQIVTFFQEVPHVIEEVMNIVLIALSILAVLKGLYNIATCGLIGLITFLLLCGRSCSSNLYKGVYELQSLDLNMETLNMTMPLSCTKNNSHHYIRVGNDTGLELTLTNTSILNHKFCNLSDAHKKDLYDHALMSIISTFHLSIPNFNQYEAMSCDFNGGKISVQYNLSHSYAIDAANHCGTVANGILQTFMRMAWGGSYIALDSGRGNWDCIMTSYQYLIIQNTTWENHCQFSRPSPIGYLGLLSQRTRDIYISRRLLGTFTWTLSDSEGNATPGGYCLTRWMLIEAELKCFGNTAVAKCNEKHDEEFCDMLRLFDFNKQAISRLKSEAQMSIQLINKAVNALINDQLIMKNHLRDIMGIPYCNYSKYCYLNHTITGKTSLPKCCLVSNGSYLNETHFSDDIEQQADNMITEMLQKEYMERQGKTPLGLVDLFVFSTSFYLISIFLRLVKIPTHRHIVGKPCPKPHRLNHMGICSCGLYKQPGVPVRWKR

SEQ ID NO: 38218 - protein, 490 aa, Artificial Sequence
  derived and/or modified protein sequence (artificial) from LASV(Togo/2016/7082;Clade VI)__AMR44577__GPCmut11
MGQIITFFQEVPHVIEEVMNIVLIALSLLAILKGVYNVATCGIIGLVTFLFLCGRSCSLIYKGSYELQTLELNMETLNMTMPLSCTKNSSHHYIRVGNETGLELTLTNTSIINHKFCNLSDAHKRNLYDHALMSILSTFHLSIPNFNQYEAMSCDFNGGKISVQYNLSHAYAVDAAEHCGTVANGVLQTFMRMAWGGSYIALDSGRGNWDCIMTSYQYLIIQNTTWEDHCQFSRPSPIGYLGLLSQRTRDIYISRRLLGTFTWTLSDSEGNETPGGYCLTRWMLIEAELKCFGNTAVAKCNEKHDEEFCDMLRLFDFNKQAIQRLKSEAQMSIQLINKAVNALINDQLIMKNHLRDMMGIPYCNYSKYCYLNHTSSGRTSLPKCCLVSNGSYLNETHFSDDIEQQADNMITEMLQKEYIDRQGKTPLGLVDLFVFSTSFYLISIFLHLIKIPTHRHIVGKPCPKPHRLNHMGICSCGLYKQPGVPTRWKR

SEQ ID NO: 38219 - protein, 490 aa, Artificial Sequence
  derived and/or modified protein sequence (artificial) from LASV(KAK-428;Clade n.d. (VII))__ANH09740__GPCmut11
MGQIVTFFQEVPHVIEEVMNIVLIALSLLAILKGLYNFATCGVIGLITFLLLCGRSCSATYKGQYELQTLELNMESLNMTMPLSCTKNNSHHYIRAGNNTGLELTLTNTSIISHKFCNLSDAHKKNLYDHTLMSIITTFHLSIPNFNQYEAMSCDFNGGKISIQYNLSHSYAGDAAQHCGTVANGVLQTFMRMAWGGSYLALDSGRRGWDCIISSYQYLIIQNTTWDDHCQFSRPSPIGYLGFVSQKTRDIYISRRLLGTFTWTLSDSEGHDMPGGYCLTRWMLIEADLKCFGNTAVAKCNEKHDEEFCDMWRLFDFNKQAIQRLKAEAQMNIQLINKAVNALINDQLMMKNHLRDIMGIPYCNYSKFCYLNNTTTGRTSLPRCCLISNGSYLNETHFSDDIEQQADNMITEMLQKEYMDRQGKTPLGLVDLFVFSTSFYLITIFLHLVKIPTHRHIVGKPCPKPHRLNHMGICSCGLYKQPGVPVRWKR

SEQ ID NO: 38220 - protein, 490 aa, Artificial Sequence; identical to SEQ ID NO: 38214
  derived and/or modified protein sequence (artificial) from LASV(Pinneo-NIG-1969;Clade I)__AIT17836__GPCmut11

SEQ ID NO: 38221 - protein, 490 aa, Artificial Sequence
  derived and/or modified protein sequence (artificial) from LASV(ISTH0009-NIG-2011;Clade II)__AIT17404__GPCmut11
MGQIITFFQEVPHVIEEVMNIVLIALSLLAILKGIYNVATCGLFGLVSFLLLCGRSCSTTYKGVYELQTLELDMASLNMTMPLSCTKNNSHHYIMVGNETGLELTLTNTSIINHKFCNLSDAHKKNLYDHALMSIISTFHLSIPNFNQYEAMSCDFNGGKISVQYNLSHAYAVDAANHCGTIANGVLQTFMRMAWGGSYIALDSGKGSWDCIMTSYQYLIIQNTTWEDHCQFSRPSPIGYLGLLSQRTRDIYISRRLLGTFTWTLSDSEGNETPGGYCLTRWMLIEAELKCFGNTAVAKCNEKHDEEFCDMLRLFDFNKQAIRRLKTEAQMSIQLINKAVNALINDQLIMKNHLRDIMGIPYCNYSKYCYLNHTVTGKTSLPRCCLVSNGSYLNETHFSDDIEQQADNMITELLQKEYMDRQGKTPLGLVDLFVFSTSFYLISIFLHLIKIPTHRHITGKPCPKPHRLNHMGICSCGLYKHPGVPVKWKR

SEQ ID NO: 38222 - protein, 490 aa, Artificial Sequence
  derived and/or modified protein sequence (artificial) from LASV(ISTH2010-NIG-2012;Clade II)__AIT17482__GPCmut11
MGQIITFFQEVPHVIEEVMNIVLIALSLLAILKGIYNVATCGLFGLVSFLLLCGRSCSTTYKGVYELQTLELDMASLNMTMPLSCTKNNSHHYIMVGNETGLELTLTNTSIINHKFCNLSDAHKKNLYDHALMSIISTFHLSIPNFNQYEAMSCDFNGGKISVQYNLSHAYAVDAANHCGTIANGVLQTFMRMAWGGSYIALDSGKGSWDCIMTSYQYLIIQNITWEDHCQFSRPSPIGYLGLLSQRTRDIYISRRLLGTFTWTLSDSEGNETPGGYCLTRWMLIEAELKCFGNTAVAKCNEKHDEEFCDMLRLFDFNKQAIRRLKTEAQMSIQLINKAVNALINDQLIMKNHLRDIMGIPYCNYSKYCYLNHTVTGKTSLPRCCLVSNGSYLNETHFSDDIEQQADNMITELLQKEYIDRQGKTPLGLVDLFVFSTSFYLISIFLHLVKIPTHRHVVGKPCPKPHRLNHMGICSCGLYKHPGVPVKWKR

SEQ ID NO: 38223 - protein, 490 aa, Artificial Sequence
  derived and/or modified protein sequence (artificial) from LASV(Lassa virus/H.sapiens-wt/NGA/2015/ISTH_0543;Clade II)__AVO03639__GPCmut11
MGQIITFFQEVPHVIEEVMNIVLIALSLLAILKGIYNVATCGLFGLVSFLLLCGRSCSTTYKGVYELQTLELDMANLNMTMPLSCTKNNSHHYIMVGNETGLELTLTNTSIINHKFCNLSDAHKKNLYDHALMSIISTFHLSIPNFNQYEAMSCDFNGGKISVQYNLSHTYAVDAANHCGTIANGVLQTFMRMAWGGSYIALDSGKGSWDCIMTSYQYLVIQNTTWEDHCQFSRPSPIGYLGLLSQRTRDIYISRRLLGTFTWTLSDSEGNETPGGYCLTRWMLIEAELKCFGNTAVAKCNEKHDEEFCDMLRLFDFNKQAIRRLKTEAQMSIQLINKAVNALINDQLIMKNHLRDIMGIPYCNYSKYCYLNHTVTGKTSLPRCCLVSNGSYLNETHFSDDIEQQADNMITELLQKEYIDRQGKTPLGLVDLFVFSTSFYLISIFLHLVKIPTHRHITGKPCPKPHRLNHMGICSCGLYKHPGVPVKWKR

SEQ ID NO: 38224 - protein, 490 aa, Artificial Sequence
  derived and/or modified protein sequence (artificial) from LASV(Lassa virus/H.sapiens-wt/NGA/2016/ISTH_0009;Clade II)__AVO03571__GPCmut11
MGQIITFFQEVPHVIEEVMNIVLIALSLLAILKGIYNVATCGLLGLVSFLLLCGRSCSTTYKGVYELQTLELDMASLNMTMPLSCTKNNSHHYIMVGNETGLELTLTNTSIINHKFCNLSDAHKKNLYDHALMSIISTFHLSIPNFNQYEAMSCDFNGGRISVQYNLSHSYAVDAANHCGTIANGVLQTFMRMAWGGSYIALDSGKGSWDCIMTSYQYLIIQNTTWEDHCQFSRPSPIGYLGLLSQRTRDIYISRRLLGTFTWTLSDSEGNETPGGYCLTRWMLIEAELKCFGNTAVAKCNEKHDEEFCDMLRLFDFNKQAIRRLKTEAQMSIQLINKAVNALINDQLIMKNHLRDIMGIPYCNYSKYCYLNHTVTGKTSLPRCCLVSNGSYLNETHFSDDIEQQADNMITELLQKEYIDRQGKTPLGLVDLFVFSTSFYLISIFLHLVKIPTHRHITGKPCPKPHRLNHMGICSCGLYNHPGVPVKWKR

SEQ ID NO: 38225 - protein, 490 aa, Artificial Sequence
  derived and/or modified protein sequence (artificial) from LASV(Lassa virus/H.sapiens-wt/NGA/2016/ISTH_0017;Clade II)__AVO03567__GPCmut11
MGQIITFFQEVPHVIEEVMNIVLIALSLLAILKGIYNVATCGLFGLVSFLLLCGRSCSTTYKGVYELQTLELDMASLNMTMPLSCTKNNSHHYIMVGNETGLELTLTNTSIINHKFCNLSDAHKKNLYDHALMSIISTFHLSIPNFNQYEAMSCDFNGGKISVQYNLSHTYAIDAANHCGTIANGVLQTFMRMAWGGSYIALDSGKGSWDCIMTSYQYLIIQNTTWEDHCQFSRPSPIGYLGLLSQRTRDIYISRRLLGTFTWTLSDSEGNETPGGYCLTRWMLIEAELKCFGNTAVAKCNEKHDEEFCDMLRLFDFNKQAIRRLKTEAQMSIQLINKAVNALINDQLIMKNHLRDIMGIPYCNYSKYCYLNHTVTGKTSLPRCCLVSNGSYLNETHFSDDIEQQADNMITELLQKEYMDRQGKTPLGLVDLFVFSTSFYLISIFLHLVRIPTHRHVIGKPCPKPHRLNHMGICSCGLYKHPGVPVKWKR

SEQ ID NO: 38226 - protein, 490 aa, Artificial Sequence
  derived and/or modified protein sequence (artificial) from LASV(Lassa virus/H.sapiens-wt/NGA/2018/ISTH_0959;Clade II)__AVV65099__GPCmut11
MGQIITFFQEVPHVIEEVMNIVLIALSLLAILKGIYNVVTCGLFGLVSFLLLCGRSCSTTYKGVYELQTLELDMASLNMTMPLSCTKNNSHHYIMVGNETGLELTLTNTSIINHKFCNLSDAHKKNLYDHALMSIISTFHLSIPNFNQYEAMSCDFNGGKISVQYNLSHAYAIDAANHCGTIANGVLQTFMRMAWGGSYIALDSGKGSWDCIMTSYQYLIIQNTTWEDHCQFSRPSPIGYLGLLSQRTRDIYISRRLLGTFTWTLSDSEGNETPGGYCLTRWMLIEAELKCFGNTAVAKCNEKHDEEFCDMLRLFDFNKQAIRRLKTEAQMSIQLINKAVNALINDQLIMKNHLRDIMGIPYCNYSKYCYLNHTVTGKTSLPRCCLVSNGSYLNETHFSDDIEQQADNMITELLQKEYIDRQGKTPLGLVDLFVFSTSFYLISIFLHLVKIPTHRHVIGKPCPKPHRLNHMGICSCGLYKHPGVPVKWKR

SEQ ID NO: 38227 - protein, 490 aa, Artificial Sequence
  derived and/or modified protein sequence (artificial) from LASV(LASV003-NIG-2008;Clade II)__AIT17580__GPCmut11
MGQIITFFQEVPHVIEEVMNIVLIALSLLAILKGIYNVATCGLFGLVSFLLLCGRSCSTTYKGVYELQTLELDMASLNMTMPLSCTKNNSHHYIMVGNETGLELTLTNTSIINHKFCNLSDAHKKNLYDHALMSIISTFHLSIPNFNQYEAMSCDFNGGKISVQYNLSHTYAVDAANHCGTIANGVLQTFMRMAWGGSYIALDSGKGSWDCIMTSYQYLIIQNTTWEDHCQFSRPSPIGYLGLLSQRTRDIYISRRLLGTFTWTLSDSESNETPGGYCLTRWMLIEAELKCFGNTAVAKCNEKHDEEFCDMLRLFDFNKQAIRRLKAEAQMSIQLINKAVNALINDQLIMKNHLRDIMGIPYCNYSKYCYLNHTVTGRTSLPRCCLVSNGSYLNETHFSDDIEQQADNMITELLQKEYMDRQGKTPLGLVDLFVFSTSFYLISIFLHLVKIPTHRHVIGKPCPKPHRLNHMGICSCGLYKHPGVPVKWKR

SEQ ID NO: 38228 - protein, 490 aa, Artificial Sequence
  derived and/or modified protein sequence (artificial) from LASV(LASV035-NIG-2009;Clade II)__AIT17588__GPCmut11
MGQIITFFQEVPHVIEEVMNIVLIALSLLAILKGIYNVATCGLFGLVSFLLLCGRSCSTTYKGVYELQTLELDMASLNMTMPLSCTKNNSHHYIMVGNETGLELTLTNTSIINHKFCNLSDAHKKNLYDHALMSIISTFHLSIPNFNQYEAMSCDFNGGKISVQYNLSHAYAVDAANHCGTIANGVLQTFMRMAWGGSYIALDSGKGSWDCIMTSYQYLIIQNTTWEDHCQFSRPSPIGYLGLLSQRTRDIYISRRLLGTFTWTLSDSEGNETPGGYCLTRWMLIEAELKCFGNTAVAKCNEKHDEEFCDMLRLFDFNKQAIRRLKAEAQMSIQLINKAVNALINDQLIMKNHLRDIMGIPYCNYSKYCYLNHTVTGKTSLPRCCLVSNGSYLNETHFSDDIEQQADNMITELLQKEYIDRQGKTPLGLVDLFVFSTSFYLISIFLHLVKIPTHRHVIGKPCPKPHRLNHMGICSCGLYKHPGVPVKWKR

SEQ ID NO: 38229 - protein, 490 aa, Artificial Sequence
  derived and/or modified protein sequence (artificial) from LASV(LASV1000-NIG-2009;Clade II)__AIT17782__GPCmut11
MGQIITFFQEVPHVIEEVMNIVLIALSLLAILKGIYNVATCGLFGLVSFLLLCGRSCSTTYKGVYELQTLELDMASLNMTMPLSCTKNNSHHYIMVGNETGLELTLTNTSIINHKFCNLSDAHKKNLYDHALMSIISTFHLSIPNFNQYEAMSCDFNGGKISVQYNLSHTYAVDAANHCGTIANGVLQTFMRMAWGGSYIALDSGKGSWDCIMTSYQYLIIQNTTWEDHCQFSRPSPIGYLGLLSQRTRDIYISRRLLGTFTWTLSDSEGNETPGGYCLTRWMLIEAELKCFGNTAVAKCNEKHDEEFCDMLRLFDFNKQAIKRLKTEAQMSIQLINKAVNALINDQLIMKNHLRDIMGIPYCNYSKYCYLNHTVTGKTSLPRCCLVSNGSYLNETHFSDDIEQQADNMITELLQKEYIDRQGKTPLGLVDLFVFSTSFYLISIFLHLVKIPTHRHVVGKPCPKPHRLNHMGICSCGLYKHPGVPVKWKR

SEQ ID NO: 38230 - protein, 490 aa, Artificial Sequence
  derived and/or modified protein sequence (artificial) from LASV(LASV221-NIG-2010;Clade II)__AIT17624__GPCmut11
MGQIITFFQEVPHVIEEVMNIVLIALSLLAILKGIYNVATCGLFGLVSFLLLCGRSCSTTYKGVYELQTLELDMASLNMTMPLSCTKNNSHHYIMVGNETGLELTLTNTSIINHKFCNLSDAHKKNLYDHALMSIISTFHLSIPNFNQYEAMSCDFNGGKISVQYNLSHTYAIDAANHCGTIANGVLQTFMRMAWGGSYIALDSGKGSWDCIMTSYQYLIIQNTTWEDHCQFSRPSPIGYLGLLSQRTRDIYISRRLLGTFTWTLSDSEGNETPGGYCLTRWMLIEAELKCFGNTAVAKCNEKHDEEFCDMLRLFDFNKQAIRRLKTEAQMSIQLINKAVNALINDQLIMKNHLRDIMGIPYCNYSKYCYLNHTVTGKTSLPRCCLVSNGSYLNETHFSDDIEQQADNMITEMLQKEYMDRQGKTPLGLVDLFVFSTSFYLISIFLHLVKIPTHRHVIGKPCPKPHRLNHMGICSCGLYKHPGVPVKWKR

SEQ ID NO: 38231 - protein, 490 aa, Artificial Sequence
  derived and/or modified protein sequence (artificial) from LASV(LASV237-NIG-2010;Clade II)__AIT17638__GPCmut11
MGQIITFFQEVPHVIEEVMNIVLIALSLLAILKGIYNVATCGLFGLVSFLLLCGRSCSTTYKGVYELQTLELDMASLNMTMPLSCTKNNSHHYIMVGNETGLELTLTNTSIINHKFCNLSDAHKKDLYDHALMSIISTFHLSIPNFNQYEAMSCDFNGGKISVQYNLSHTYAVDAANHCGTIANGVLQTFMRMAWGGSYIALDSGKGSWDCIMTSYQYLIIQNTTWEDHCQFSRPSPIGYLGLLSQRTRDIYISRRLLGTFTWTLSDSEGNETPGGYCLTRWMLIEAELKCFGNTAVAKCNEKHDEEFCDMLRLFDFNKQAIRRLKTEAQMSIQLINKAVNALINDQLIMKNHLRDIMGIPYCNYSKYCYLNHTVTGKTSLPRCCLVSNGSYLNETHFSDDIEQQADNMITELLQKEYMDRQGKTPLGLVDLFVFSTSFYLISIFLHLIKIPTHRHITGKPCPKPHRLNHMGICSCGLYKHPGVPVKWKR

SEQ ID NO: 38232 - protein, 490 aa, Artificial Sequence
  derived and/or modified protein sequence (artificial) from LASV(LASV253-NIG-2011;Clade II)__AIT17670__GPCmut11
MGQIITFFQEVPHVIEEVMNIVLIALSLLAILKGIYNVATCGLFGLVSFLLLCGRSCSTTYKGVYELQTLELDMASLNMTMPLSCTKNNSHHYIMVGNETGLELTLTNTSIINHKFCNLSDAHKKNLYDHALMSIISTFHLSIPNFNQYEAMSCDFNGGKISVQYNLSHTYAVDAANHCGTIANGVLQTFMRMAWGGSYIALDSGKGSWDCIMTSYQYLIIQNTTWEDHCQFSRPSPIGYLGLLSQRTRDIYISRRLLGTFTWTLSDSEGNETPGGYCLTRWMLIEAELKCFGNTAVAKCNEKHDEEFCDMLRLFDFNKQAIRRLKAEAQMSIQLINKAVNALINDQLIMKNHLRDIMGIPYCNYSKYCYLNHTVTGRTSLPRCCLVSNGSYLNETHFSDDIEQQADNMITELLQKEYIDRQGKTPLGLVDLFVFSTSFYLISIFLHLVKIPTHRHIIGKPCPKPHRLNHMGICSCGLYKHPGVPVKWKR

SEQ ID NO: 38233 - protein, 490 aa, Artificial Sequence
  derived and/or modified protein sequence (artificial) from LASV(LASV254-NIG-2011;Clade II)__AIT17674__GPCmut11
MGQIITFFQEVPHVIEEVMNIVLIALSLLAILKGIYNVATCGLFGLVSFLLLCGRSCSTTYKGVYELQTLELDMTNLNMTMPLSCTKNNSHHYIMVGNETGLELTLTNTSIINHKFCNLSDAHKKNLYNHALMSIISTFHLSIPNFNQYEAMSCDFNGGKISVQYNLSHSYAVDAANHCGTIANGVLQTFMRMAWGGSYIALDSGKGNWDCIMTSYQYLIIQNTTWEDHCQFSRPSPIGYLGLLSQRTRDIYISRRLLGTFTWTLSDSEGNETPGGYCLTRWMLIEAELKCFGNTAVAKCNEKHDEEFCDMLRLFDFNKQAIRRLKTEAQANIQLINKAVNALINDQLIMKNHLRDIMGIPYCNYSKYCYLNHTVTGKTSLPRCCLVSNGSYLNETHFSDDIEQQADNMITELLQKEYMDRQGKTPLGLVDLFVFSTSFYLISIFLHLVKIPTHRHVIGKPCPKPHRLNHMGICSCGLYKHPGVPVKWKR

SEQ ID NO: 38234 - protein, 490 aa, Artificial Sequence
  derived and/or modified protein sequence (artificial) from LASV(Nig08-A19;Clade III)__ADU56618__GPCmut11
MGQIVTFFQEVPHVIEEVMNIVLIALSILAILKGLYNIATCGLIGLVTFLLLSGRSCSMTYKGVYELQTLELNMNTLNMTMPLSCTKNNSHHYIMVGNETGLELTLTNTSLLHHKFCNLSDAHKKNLYDHTLMSIISTFHLSIPNFNQYEAMSCDFNGGKITVQYNLSHSYAIDAANHCGTVANGVLQTFMRMAWGGSYIALDSGRGKWDCIMTSYQYLIIQNTTWEDHCQFSRPSPIGYLGLLSQRTRDIYISRRLLGTFTWTLSDSEGNETPGGYCLTRWMLIEAELKCFGNTAVAKCNEKHDEEFCDMLRLFDFNKQAIRRLKAEAQMSIQLINKAVNALINDQLIMKNHLRDIMGIPYCNYSKYCYLNHTSTGRTSLPRCCLVSNGSYLNETHFSDDIEQQADNMITEMLQKEYLDRQGKTPLGLVDLFVFSTSFYLISIFLHLVKIPTHRHIVGKPCPKPHRLNHMGICSCGLYKQPGVPVRWKR

SEQ ID NO: 38235 - protein, 491 aa, Artificial Sequence
  derived and/or modified protein sequence (artificial) from LASV(G1180-SLE-2010;Clade IV)__AIT17168__GPCmut11
MGQIVTFFQEVPHVIEEVMNIVLIALSILAVLKGLYNFATCGLVGLLTFLLLCGRSCTASRYKGVYELQTLELNMETLNMTMPLSCTKNNSHHYIMVGNETGLELTLTNTSIINHKFCNLSDAHKKNLYDHALMSIISTFHLSIPNFNQYEAMSCDFNGGKISVQYNLSHSYAGDAANHCGTVANGVLQTFMRMAWGGSYIALDSGHGSWDCIMTSYQYLIIQNTTWEDHCQFSRPSPIGYLGLLSQRTRDIYISRRLLGTFTWTLSDSEGKDTPGGYCLTRWMLIEAELKCFGNTAVAKCNEKHDEEFCDMLRLFDFNKQAIQRLKAEAQMSIQLINKAVNALINDQLIMKNHLRDIMGIPYCNYSKYCYLNHTTTGKTSLPKCCLVSNGSYLNETHFSDDIEQQADNMITEMLQKEYMERQGKTPLGLVDLFVFSTSFYLISIFLHLVKIPTHRHIVGKSCPKPHRLNHMGICSCGLYKQPGVPVKWKR

SEQ ID NO: 38236 - protein, 491 aa, Artificial Sequence
  derived and/or modified protein sequence (artificial) from LASV(G1442-SLE-2011;Clade IV)__AIT17180__GPCmut11
MGQIVTFFQEVPHVIEEVMNIVLIALSILAVLKGLYNVATCGLIGLVTFLLLCGRSCTTTLYKGVYELQTLELNMETLNMTMPLSCTKNNSHHYIRVGNETGLELTLTNTSIINHKFCNLSDAHKKNLYDHALMSIISTFHLSIPNFNQYEAMSCDFNGGKISVQYNLSHSYAGDAANHCGTVANGVLQTFMRMAWGGSYIALDSGRGNWDCIMTSYQYLIIQNTTWDDHCQFSRPSPIGYLGLLSQRTRDVYISRRLLGTFTWTLSDSEGKDTPGGYCLTRWMLIEAELKCFGNTAVAKCNEKHDEEFCDMLRLFDFNKQAIQRLKAEAQMSIQLINKAVNALINDQLIMKNHLRDIMGIPYCNYSKYCYLNNTATGKTSLPKCCLISNGSYLNETHFSDDIEQEADNMITEMLQKEYMERQGKTPLGLVDLFVFSTSFYLISIFLHLVKIPTHRHIVGKSCPKPHRLNHMGICSCGLYKQPGVPVRWKR

SEQ ID NO: 38237 - protein, 491 aa, Artificial Sequence
  derived and/or modified protein sequence (artificial) from LASV(G3010-SLE-2013;Clade IV)__AIT17344__GPCmut11
MGQIVTFFQEVPHVIEEVMNIVLIALSILAVLKGLYNFATCGLVGLVTFLLLCGRSCTTSLYKGVYELQTLELNMETLNMTMPLSCTKNNSHHYIMVGNETGLELTLTNTSIINHKFCNLSDAHKKNLYNHALMSIISTFHLSIPNFNQYEAMSCDFNGGKISVQYNLSHSYAGDAASHCGTVANGVLQTFMRMAWGGSYIALDSGYGKWDCIMTSYQYLIIQNTTWEDHCQFSRPSPIGYLGLLSQRTRDIYISRRLLGTFTWTLSDSEGKDTPGGYCLTRWMLIEAELKCFGNTAVAKCNEKHDEEFCDMLRLFDFNKQAIQRLKTEAQMSIQLINKAVNALINDQLIMKNHLRDIMGIPYCNYSKYCYLNHTTTGKTSLPKCCLVSNGSYLNETHFSDDIEQQADNMITEMLQKEYMERQGKTPLGLVDLFVFSTSFYLISIFLHLVKIPTHRHIVGKSCPKPHRLNHMGICSCGLYKQPGVPVRWKR

SEQ ID NO: 38238 - protein, 491 aa, Artificial Sequence
  derived and/or modified protein sequence (artificial) from LASV(G502-SLE-2009;Clade IV)__AIT17126__GPCmut11
MGQIVTFFQEVPHVIEEVMNIVLIALSILAVLKGLYNFATCGLVGLLTFLLLCGRSCTTGLYKGVYELQTLELNMETLNMTMPLSCTKNNSHHYIMVGNETGLELTLTNTSIINHKFCNLSDAHKKNLYDHALMSIISTFHLSIPNFNQYEAMSCDFNGGKISVQYNLSHSYAGDAADHCGTVANGVLQTFMRMAWGGSYIALDSGRGRWDCIMTSYQYLIIQNTTWEDHCQFSRPSPIGYLGLLSQRTRDIYISRRLLGTFTWTLSDSEGKDTPGGYCLTRWMLIEAELKCFGNTAVAKCNEKHDEEFCDMLRLFDFNKQAIQRLKAEAQMSIQLINKAVNALINDQLVMKNHLRDIMGIPYCNYSRYCYLNHTTTGRTSLPKCCLVSNGSYLNETHFSDDIEQQADNMITEMLQKEYMERQGKTPLGLVDLFVFSTSFYLISIFLHLVKIPTHRHIVGKSCPKPHRLNHMGICSCGLYKQPGVPVKWKR

SEQ ID NO: 38239 - protein, 491 aa, Artificial Sequence
  derived and/or modified protein sequence (artificial) from LASV(G733-SLE-2010;Clade IV)__AIT17154__GPCmut11
MGQIVTFFQEVPHVIEEVMNIVLIALSILAVLKGLYNFATCGIVGLVSFLLLCGRSCTTSLYKGVYELQTLELNMETLNMTMPLSCTKNNSHHYIMVGNETGLELTLTNTSIINHKFCNLSDAHKKNLYDHALMSIISTFHLSIPNFNQYEAMSCDFNGGKISVQYNLSHSYAGDAANHCGTIANGVLQTFMRMAWGGSYIALDSGRDRWDCIMTSYQYLIIQNTTWEDHCQFSRPSPIGYLGLLSQRTRDIYISRRLLGTFTWTLSDSEGKDTPGGYCLTRWMLIEAELKCFGNTAVAKCNEKHDEEFCDMLRLFDFNKQAIQRLKAEAQMSIQLINKAVNALINDQLIMKNHLRDIMGIPYCNYSKYCYLNHTTTGKTSLPKCCLVSNGSYLNETHFSDDIEQQADNMITEMLQKEYMERQGKTPLGLVDLFVFSTSFYLISIFLHLVKIPTHRHVVGKSCPKPHRLNHMGICSCGLYGQPGVPVKWKR

SEQ ID NO: 38240 - protein, 491 aa, Artificial Sequence
  derived and/or modified protein sequence (artificial) from MOPV/LASV reassortant(IGS-1;Clade IV)__AFY05576__GPCmut11
MGQIVTFFQEVPHVIEEVMNIVLIALSVLAVLKGLYNFATCGLVGLVTFLLLCGRSCTTSLYKGVYELQTLELNMETLNMTMPLSCTKNNSHHYIMVGNETGLELTLTNTSIINHKFCNLSDAHKKNLYDHALMSIISTFHLSIPNFNQYEAMSCDFNGGKISVQYNLSHSYAGDAANHCGTVANGVLQTFMRMAWGGSYIALDSGRGNWDCIMTSYQYLIIQNTTWEDHCQFSRPSPIGYLGLLSQRTRDIYISRRLLGTFTWTLSDSEGEDTPGGYCLTRWMLIEAELKCFGNTAVAKCNEKHDEEFCDMLRLFDFNKQAIQRLKAEAQMSIQLINKAVNALINDQLIMKNHLRDIMGIPYCNYSKYCYLNHTTTGRTSLPKCCLVSNGSYLNETHFSDDIEQQADNMITEMLQKEYMERQGKTPLGLVDLFVFSTSFYLISIFLHLVKIPTHRHIVGKSCPKPHRLNHMGICSCGLYKQPGVPVKWKR

SEQ ID NO: 38241 - protein, 491 aa, Artificial Sequence
  derived and/or modified protein sequence (artificial) from LASV(LM765-SLE-2012;Clade IV)__AIT17814__GPCmut11
MGQIVTFFQEVPHVIEEVMNIVLIALSILAVLKGLYNFATCGLVGLVTFLLLCGRSCTTSLYKGVYELQTLELNMETLNMTMPLSCTKNNSHHYIMVGNETGLELTLTNTSIIDHKFCNLSDAHRKNLYDHALMSIISTFHLSIPNFNQYEAMSCDFNGGKISVQYNLSHSYAKDAADHCGTVANGVLQTFMRMAWGGSYIALDSGRGRWDCIMTSYQYLIIQNTTWEDHCQFSRPSPIGYLGLLSQRTRDIYISRRLLGTFTWTLSDSEGKDTPGGYCLTRWMLIEAELKCFGNTAVAKCNEKHDEEFCDMLRLFDFNKQAIQRLKAEAQMSIQLINKAVNALINDQLIMKNHLRDIMGIPYCNYSKYCYLNHTTTGKTSLPKCCLVSNGSYLNETHFSDDIEQQADNMITEMLQKEYMERQGKTPLGLVDLFVFSTSFYLISIFLHLVKIPTHRHIVGKPCPKPHRLNHMGICSCGLYKQPGVPVKWKR

SEQ ID NO: 38242 - protein, 491 aa, Artificial Sequence
  derived and/or modified protein sequence (artificial) from LASV(LM776-SLE-2012;Clade IV)__AIT17824__GPCmut11
MGQIVTFFQEVPHVIEEVMNIVLIALSILAVLKGLYNFATCGLVGLVTFLLLCGRSCTTSVYKGVYELQTLELNMETLNMTMPLSCTKNNSHHYIMVGNETGLELTLTNTSIINHKFCNLSDAHKKNLYDHALMSIISTFHLSIPNFNQYEAMSCDFNGGKISVQYNLSHSYAGDAANHCGTVANGVLQTFMRMAWGGSYIALDSGHGKWDCIMTSYQYLIIQNTTWEDHCQFSRPSPIGYLGLLSQRTRDIYISRRLLGTFTWTLSDSEGKDTPGGYCLTRWMLIEAELKCFGNTAVAKCNEKHDEEFCDMLRLFDFNKQAIQRLKAEAQMSIQLINKAVNALINDQLIMKNHLRDIMGIPYCNYSKYCYLNHTTTGKTSLPKCCLVSNGSYLNETHFSDDIEQQADNMITEMLQKEYMERQGKTPLGLVDLFVFSTSFYLISIFLHLVKIPTHRHIVGKSCPKPHRLNHMGICSCGLYKQPGVPVRWKR

SEQ ID NO: 38243 - protein, 491 aa, Artificial Sequence
  derived and/or modified protein sequence (artificial) from LASV(Mad39;Clade IV)__ANH09722__GPCmut11
MGQIVTFFQEVPHVIEEVMNIVLIALSILAVLKGLYNVATCGLIGLVTFLLLCGRSCTTTLYKGVYELQALELNMETLNMTMPLSCTKNNSHHYIRVGNETGLELTLTNTSLINHKFCNLSDAHKKNLYDHALMSIISTFHLSIPNFNQYEAMSCDFNDGKISVQYNLSHTYAGDTANHCGTVANGVLQTFMRMAWGGSYIALDSGRGGWDCIMTSYQYLIIQNTTWEDHCQFSRPSPIGYLGLLSQRTRDIYISRRLLGTFTWTLSDSEGKDTPGGYCLTRWMLIEAELKCFGNTAVAKCNEKHDEEFCDMLRLFDFNKQAIQRLKAEAQMSIQLINKAVNALINDQLIMKNHLRDIMGIPYCNYSKYCYLNHTVTGKTSLPKCCLVSNGSYLNETHFSDDIEQQADNMITEMLQKEYMERQGKTPLGLVDLFVFSTSFYLISIFLHLVKIPTHRHVVGKPCPKPHRLNHMGICSCGFYKQPGVPVRWKR

SEQ ID NO: 38244 - protein, 491 aa, Artificial Sequence
  derived and/or modified protein sequence (artificial) from LASV(Z0947-SLE-2011;Clade IV)__AIT17840__GPCmut11
MGQIVTFFQEVPHVIEEVMNIVLIALSILAVLKGLYNFATCGLVGLVTFLLLCGRSCTISLYKGVYELQTLELNMETLNMTMPLSCTKNNSHHYIMVGNETGLELTLTNTSIINHKFCNLSDAHKKNLYDHALMSIISTFHLSIPNFNQYEAMSCDFNGGKISVQYNLSHSYAGDAANHCGTVANGVLQTFMRMAWGGSYIALDSGRDRWDCIMTSYQYLIIQNTTWEDHCQFSRPSPIGYLGLLSQRTRDIYISRRLLGTFTWTLSDSEGKDTPGGYCLTRWMLIEAELKCFGNTAVAKCNEKHDEEFCDMLRLFDFNKQAIQRLKAEAQMSIQLINKAVNALINDQLIMKNHLRDIMGIPYCNYSKYCYLNHTTTGKTSLPKCCLVSNGSYLNETHFSDDIEQQADNMITEMLQKEYMERQGKTPLGLVDLFVFSTSFYLISIFLHLVKIPTHRHIVGKPCPKPHRLNHMGICSCGLYKQPGVPVKWKR

SEQ ID NO: 38245 - RNA, 1476 nt, Artificial Sequence
  derived and/or modified CDS sequence (opt1) from LASV(Josiah;Clade IV)__NP_694870__GPCmut11
augggccagaucgugaccuucuuccaggaggucccccacgugaucgaggaggugaugaacaucguccugaucgcccucagcgugcuggccgugcugaaggggcucuacaacuucgcgaccugcggccuggucgggcuggugacguuccuccugcugugcggccgcuccugcaccaccagccucuacaaggggguguacgagcugcagacccuggagcucaacauggagacgcugaacaugaccaugccgcuguccugcaccaagaacaacagccaccacuacaucauggucggcaacgagaccggccucgagcugacgcugaccaacaccuccaucaucaaccacaaguucugcaaccucagcgacgcccacaagaagaaccuguacgaccacgcccugauguccaucaucagcaccuuccaccucuccauccccaacuucaaccaguacgaggccaugagcugcgacuucaacgggggcaagaucuccgugcaguacaaccugagccacuccuacgccggggacgcggccaaccacugcggcacgguggccaacgggguccugcagaccuucaugcggauggccuggggcggcagcuacaucgcgcucgacuccgggcgcggcaacugggacugcaucaugaccagcuaccaguaccugaucauccagaacaccacgugggaggaccacugccaguucucccggcccagccccaucggguaccugggccuccugucccagcgcacccgggacaucuacaucagccgccggcugcucggcaccuucaccuggacgcugagcgacuccgaggggaaggacaccccgggcggguacugccugacccgcuggaugcucaucgaggccgagcugaagugcuucggcaacaccgccguggccaagugcaacgagaagcacgacgaggaguucugcgacaugcugcggcuguucgacuucaacaagcaggccauccagcgccugaaggcggaggcccagaugagcauccagcugaucaacaaggccgugaacgcccucaucaacgaccagcugaucaugaagaaccaccuccgggacaucauggggauccccuacugcaacuacuccaaguacugcuaccucaaccacacgaccaccggccgcaccagccugcccaagugcugccuggucuccaacggcagcuaccucaacgagacgcacuucuccgacgacaucgagcagcaggccgacaacaugaucaccgagaugcugcagaaggaguacauggagcggcaggggaagacgccccugggccucguggaccuguucguguucagcaccuccuucuaccugaucagcaucuuccugcaccucgucaagaucccgacccaccgccacaucguggggaaguccugccccaagccccaccggcugaaccacaugggcaucugcagcugcgggcuguacaagcagcccggcgugccggucaaguggaagcgcuga

SEQ ID NO: 38246 - RNA, 1473 nt, Artificial Sequence
  derived and/or modified CDS sequence (opt1) from LASV(LP;Clade I)__AAF86701__GPCmut11
augggccagaucaucaccuucuuccaggaggugccccacgucaucgaggaggugaugaacaucgugcugaucgcccucagccugcuggccauccucaaggggcuguacaacaucgcgaccugcggcaucaucgggcuggucgccuuccucuuccugugcggcaaguccugcagccugacgcucaagggcggguacgagcugcagacccuggagcucaacauggagacccugaacaugaccaugccgcuguccugcacgaagaacagcucccaccacuacauccgcgugggcaacgagaccgggcucgagcugacccugaccaacacgagcaucaucaaccacaaguucugcaaccucuccgacgcccacaagaagaaccuguacgaccacgcccugaugagcaucaucuccaccuuccaccucagcauccccaacuucaaccaguacgaggccauguccugcgacuucaacggcgggaagaucagcgugcaguacaaccugucccacagcuacgcgggcgacgccgccgagcacugcgggaccgucgccaacggcgugcugcagaccuucaugcggauggcguggggcgggcgcuacaucgcccucgacuccggcaaggggaacugggacugcaucaugacgagcuaccaguaccugaucauccagaacaccaccugggaggaccacugccaguucucccggcccagccccaucggcuaccugggccuccugucccagcgcacccgggacaucuacaucagccgccggcugcucgggacguucaccuggacccugagcgacuccgagggcaacgagacccccgggggcuacugccugacgcgcuggaugcucaucgaggccgagcugaagugcuucgggaacaccgccguggccaagugcaacgagaagcacgacgaggaguucugcgacaugcugcggcuguucgacuucaacaagcaggcgauccgccggcugaaggccgaggcccagaugagcauccagcugaucaacaaggccgucaacgcccucaucaacgaccagcugaucaugaagaaccaccuccgcgacaucaugggcauccccuacugcaacuacuccaaguacugcuaccucaaccacaccagcuccggccggaccagccugcccaagugcugccugaucuccaacgggagcuaccucaacgagacgcaguucuccgacgacaucgagcagcaggcggacaacaugaucaccgagaugcugcagaaggaguacaucgagcgccagggcaagaccccgcuggggcucguggacaucuucaucuucagcaccuccuucuaccugaucagcaucuuccugcaccugaucaagaucccgacgcaccggcacaucgugggcaagcccugccccaagccccaccgccucaaccacaugggggucugcuccugcggccuguacaagcacccgggcgugcccaccaaguggaagcgguga

SEQ ID NO: 38247 - RNA, 1473 nt, Artificial Sequence
  derived and/or modified CDS sequence (opt1) from LASV(803213;Clade II)__AAF86703__GPCmut11
augggccagaucaucaccuucuuccaggaggugccccacgucaucgaggaggugaugaacaucgugcugaucgcccucagccugcuggccauccucaaggggaucuacaacgucgcgaccugcggccuguucgggcugaucuccuuccuccugcugugcggccgcagcugcuccgugacguacaaggggguguacgagcuccagacccuggagcugaacauggccaaccucaacaugaccaugccgcugagcugcaccaagaacaacucccaccacuacaucauggucggcaacgagacgggccuggagcucacccugaccaacaccagcaucaucaaccacaaguucugcaaccuguccgacgcccacaagaagaaccucuacgaccacgcccugaugagcaucaucuccacguuccaccugagcauccccaacuucaaccaguacgaggccauguccugcgacuucaacgggggcaagaucagcgugcaguacaaccucucccacagcuucgcgguggacgccgccaaccacugcgggaccaucgccaacggcguccugcagaccuucaugcggauggcguggggcggguccuacaucgcccuggacagcggcaaggggaacugggacugcaucaugaccuccuaccaguaccucaucauccagaacacgaccugggaggaccacugccaguucagccgccccucccccaucggcuaccuggggcugcucagccagcggacccgcgacaucuacaucagccggcgccugcugggcaccuucacguggacccucuccgacagcgagggcaacgaggcccccgggggcuacugccugacccgguggaugcugaucgaggccgagcucaagugcuucgggaacaccgccguggcgaagugcaacgagaagcacgacgaggaguucugcgacaugcugcgccuguucgacuucaacaagcaggccaucaagcggcucaagacggaggcccagauguccauccagcugaucaacaaggccgugaacgcccugaucaacgaccagcucaucaugaagaaccaccuccgcgacaucaugggcauccccuacugcaacuacagccgguacugcuaccugaaccacaccgucaccgggaagaccucccugccccgcugcugccuggugagcaacggcuccuaccugaacgagacgcacuucagcgacgacaucgagcagcaggcggacaacaugaucaccgagaugcuccagaaggaguacauggaccggcagggcaagaccccgcuggggcugguggaccucuucgucuucuccaccagcuucuaccugaucuccaucuuccugcaccuggugaagaucccgacgcaccgccacaucgugggcaagcccugccccaagccccaccggcucaaccacauggggaucugcagcugcggccuguacaagcacccggggguccccgugaaguggaagcgcuga

SEQ ID NO: 38248 - RNA, 1473 nt, Artificial Sequence
  derived and/or modified CDS sequence (opt1) from LASV(GA391;Clade III)__CAA36645__GPCmut11
augggccagaucgugaccuucuuccaggaggucccccacgugaucgaggaggugaugaacaucguccugaucgcccucagcauccuggccauccugaaggggcucuacaacguggcgaccugcggccugaucgggcuggugacguuccuccugcuguccggccgcagcugcucccucaucuacaaggggaccuacgagcugcagacccuggagcucaacauggagacccugaacaugacgaugccgcugagcugcaccaagaacaacucccaccacuacauccgggucggcaacgagaccggccucgagcugacccugacgaacaccagcauccucaaccacaaguucugcaaccuguccgacgcccacaagcgcaaccuguacgaccacagccucauguccaucaucagcaccuuccaccuguccauccccaacuucaaccaguacgaggccaugagcugcgacuucaacgggggcaagaucaccgugcaguacaaccugucccacagcuucgccguggacgccgcggggcacugcggcacgcucgccaacgggguccugcagaccuucaugcggauggccuggggcggcuccuacaucgcccuggacagcgggcgcggcaacugggacugcaucaugaccuccuaccaguaccucaucauccagaacaccacgugggacgaccacugccaguucagccggcccucccccaucggguaccugggccugcucagccagcgcacccgggacaucuacaucagccgccggcugcugggcaccuucaccuggacgcucuccgacagcgaggggaacgagaccccgggcggguacugccugacccgcuggaugcugaucgaggcggagcucaagugcuucggcaacaccgccguggccaagugcaacgagaagcacgacgaggaguucugcgacaugcugcggcuguucgacuucaacaagcaggccauccgccggcucaagacggaggcccagauguccauccagcugaucaacaaggcggugaacgcccugaucaacgaccagcucaucaugaagaaccaccuccgcgacaucauggggauccccuacugcaacuacagccgguacugcuaccugaaccacaccuccaccggcaagaccagccugccccgcugcugccugaucuccaacggcagcuaccugaacgagacgaaguucuccgacgacaucgagcagcaggccgacaacaugaucaccgagaugcuccagaaggaguacaucgaccggcaggggaagacgccccugggccuggucgaccuguucguguucagcaccuccuucuaccucaucagcaucuuccugcaccuggugaagaucccgacccaccgccacaucgucgggaagcccugccccaagccccaccggcucaaccacaugggcaucugcuccugcgggcuguacaagcagccgggcgugcccgugcgcuggaagcgguga

SEQ ID NO: 38249 - RNA, 1476 nt, Artificial Sequence
  derived and/or modified CDS sequence (opt1) from LASV(AV;Clade V)__CCA30314__GPCmut11
augggccagaucgugaccuucuuccaggaggucccccacgugaucgaggaggugaugaacaucguccugaucgcccucagcauccuggccgugcugaaggggcucuacaacaucgcgaccugcggccugaucgggcugaucacguuccuccugcugugcggccgcuccugcagcuccaaccucuacaaggggguguacgagcugcagagccuggaccucaacauggagacccugaacaugaccaugccgcuguccugcaccaagaacaacagccaccacuacauccgggucggcaacgacacgggccucgagcugacccugaccaacaccuccauccucaaccacaaguucugcaaccugagcgacgcccacaagaaggaccuguacgaccacgcccucauguccaucaucagcacguuccaccuguccauccccaacuucaaccaguacgaggccaugagcugcgacuucaacgggggcaagaucuccgugcaguacaaccugagccacuccuacgccaucgacgcggccaaccacugcgggaccguggccaacggcauccuccagaccuucaugcgcauggccuggggcgggagcuacaucgcgcuggacuccggccgggggaacugggacugcaucaugaccagcuaccaguaccugaucauccagaacacgaccugggagaaccacugccaguucucccgccccagccccaucggcuaccucgggcugcugagccagcggacccgcgacaucuacaucucccggcgccuccugggcaccuucacguggacccugagcgacuccgagggcaacgccacccccgggggcuacugccucacccgguggaugcugaucgaggccgagcugaagugcuucgggaacacggccgucgccaagugcaacgagaagcacgacgaggaguucugcgacaugcuccgccuguucgacuucaacaagcaggcgaucagccggcugaaguccgaggcccagaugagcauccagcucaucaacaaggccgugaacgcccugaucaacgaccagcugaucaugaagaaccaccuccgcgacaucaugggcauccccuacugcaacuacuccaaguacugcuaccugaaccacaccaucaccgggaagaccagccugcccaagugcugccucguguccaacggcagcuaccugaacgagacgcacuucuccgacgacaucgagcagcaggccgacaacaugaucaccgagaugcugcagaaggaguacauggagcggcagggcaagaccccgcucgggcuggucgaccuguucguguucagcaccuccuucuaccugaucagcaucuuccuccgccuggugaagaucccgacgcaccggcacaucgucggcaagcccugccccaagccccaccgccugaaccacauggggaucugcuccugcggccucuacaagcagccgggggugcccgugcgguggaagcgcuga

SEQ ID NO: 38250 - RNA, 1473 nt, Artificial Sequence
  derived and/or modified CDS sequence (opt1) from LASV(Togo/2016/7082;Clade VI)__AMR44577__GPCmut11
augggccagaucaucaccuucuuccaggaggugccccacgucaucgaggaggugaugaacaucgugcugaucgcccucagccugcuggccauccucaagggggucuacaacguggcgaccugcggcaucaucgggcuggugacguuccuguuccucugcggccgcuccugcagccugaucuacaagggguccuacgagcugcagacccucgagcugaacauggagacccugaacaugaccaugccgcucagcugcacgaagaacuccagccaccacuacauccgggucggcaacgagaccggccuggagcugacccucaccaacacguccaucaucaaccacaaguucugcaaccugagcgacgcccacaagcgcaaccuguacgaccacgcccucauguccauccugagcaccuuccaccuguccauccccaacuucaaccaguacgaggccaugagcugcgacuucaacgggggcaagaucuccgugcaguacaaccucagccacgccuacgcgguggacgccgccgagcacugcgggaccgucgccaacggcgugcugcagaccuucaugcggauggcguggggcggguccuacaucgcccuggacagcggccgcgggaacugggacugcaucaugacguccuaccaguaccucaucauccagaacaccaccugggaggaccacugccaguucagccggcccucccccaucggcuaccuggggcugcucagccagcgcacccgggacaucuacaucagccgccggcugcugggcacguucaccuggacccucuccgacagcgagggcaacgagacccccgggggcuacugccugacgcgcuggaugcugaucgaggccgagcucaagugcuucgggaacaccgccguggccaagugcaacgagaagcacgacgaggaguucugcgacaugcugcggcuguucgacuucaacaagcaggcgauccagcgccucaaguccgaggcccagaugagcauccagcugaucaacaaggccgucaacgcccugaucaacgaccagcucaucaugaagaaccaccuccgggacaugaugggcauccccuacugcaacuacuccaaguacugcuaccugaaccacaccagcuccgggcgcaccagccugcccaagugcugccugguguccaacggcagcuaccugaacgagacgcacuucuccgacgacaucgagcagcaggccgacaacaugaucaccgagaugcuccagaaggaguacaucgaccggcagggcaagaccccgcuggggcugguggaccucuucgucuucagcaccuccuucuaccugaucagcaucuuccugcaccugaucaagaucccgacgcaccgccacaucgugggcaagcccugccccaagccccaccggcucaaccacauggggaucugcuccugcggccuguacaagcagccgggggugcccacccgcuggaagcgguga

SEQ ID NO: 38251 - RNA, 1473 nt, Artificial Sequence
  derived and/or modified CDS sequence (opt1) from LASV(KAK-428;Clade n.d. (VII))__ANH09740__GPCmut11
augggccagaucgugaccuucuuccaggaggucccccacgugaucgaggaggugaugaacaucguccugaucgcccucagccugcuggccauccucaaggggcuguacaacuucgcgaccugcggcgugaucgggcugaucacguuccuccugcugugcggccgcuccugcagcgccaccuacaaggggcaguacgagcuccagacccuggagcugaacauggagucccucaacaugaccaugccgcugagcugcacgaagaacaacucccaccacuacauccgggccggcaacaacaccggccuggagcucacccugaccaacacgagcaucaucucccacaaguucugcaaccugagcgacgcccacaagaagaaccucuacgaccacacccugauguccaucaucaccaccuuccaccugagcauccccaacuucaaccaguacgaggccauguccugcgacuucaacgggggcaagaucagcauccaguacaaccucucccacagcuacgcgggggacgccgcccagcacugcggcacgguggccaacgggguccugcagaccuucaugcgcauggcguggggcggcuccuaccuggcccucgacagcgggcggcgcggcugggacugcaucaucuccagcuaccaguaccugaucauccagaacaccaccugggacgaccacugccaguucucccggcccagccccaucggguaccugggcuucgugagccagaagacgcgcgacaucuacaucucccggcgccuccugggcaccuucaccuggacccugagcgacuccgaggggcacgacaugccgggcggguacugccucacgcgguggaugcugaucgaggccgaccugaagugcuucggcaacaccgccguggccaagugcaacgagaagcacgacgaggaguucugcgacauguggcgccucuucgacuucaacaagcaggcgauccagcggcugaaggccgaggcccagaugaacauccagcugaucaacaaggccgucaacgcccucaucaacgaccagcugaugaugaagaaccaccuccgcgacaucauggggauccccuacugcaacuacagcaaguucugcuaccugaacaacaccaccacgggccggaccucccugccccgcugcugccugaucagcaacggcuccuaccucaacgagacccacuucagcgacgacaucgagcagcaggcggacaacaugaucaccgagaugcugcagaaggaguacauggaccggcaggggaagacgccccugggccucguggaccuguucguguucuccaccagcuucuaccugaucaccaucuuccuccaccuggucaagaucccgacccaccgccacaucguggggaagcccugccccaagccccaccggcugaaccacaugggcaucugcuccugcgggcuguacaagcagccgggcgugcccguccgcuggaagcgguga

SEQ ID NO: 38252 - RNA, 1473 nt, Artificial Sequence; identical to SEQ ID NO: 38246
  derived and/or modified CDS sequence (opt1) from LASV(Pinneo-NIG-1969;Clade I)__AIT17836__GPCmut11

SEQ ID NO: 38253 - RNA, 1473 nt, Artificial Sequence
  derived and/or modified CDS sequence (opt1) from LASV(ISTH0009-NIG-2011;Clade II)__AIT17404__GPCmut11
augggccagaucaucaccuucuuccaggaggugccccacgucaucgaggaggugaugaacaucgugcugaucgcccucagccugcuggccauccucaaggggaucuacaacgucgcgaccugcggccuguucgggcugguguccuuccuccugcugugcggccgcagcugcuccacgaccuacaaggggguguacgagcuccagacccuggagcuggacauggccagccucaacaugaccaugccgcuguccugcacgaagaacaacagccaccacuacaucauggucggcaacgagaccggccuggagcucacccugaccaacacguccaucaucaaccacaaguucugcaaccugagcgacgcccacaagaagaaccucuacgaccacgcccugauguccaucaucagcaccuuccaccuguccauccccaacuucaaccaguacgaggccaugagcugcgacuucaacgggggcaagaucuccgugcaguacaaccucagccacgcguacgccguggacgccgccaaccacugcgggaccaucgcgaacggcguccugcagaccuucaugcggauggccuggggcggguccuacaucgcccuggacagcggcaagggguccugggacugcaucaugacgagcuaccaguaccucaucauccagaacaccaccugggaggaccacugccaguucucccgccccagccccaucggcuaccuggggcugcucagccagcggacccgcgacaucuacaucucccggcgccugcugggcacguucaccuggacccucagcgacuccgagggcaacgagacccccgggggcuacugccugacgcgguggaugcugaucgaggccgagcucaagugcuucgggaacaccgccguggcgaagugcaacgagaagcacgacgaggaguucugcgacaugcugcgccuguucgacuucaacaagcaggccauccggcgccucaagaccgaggcccagaugagcauccagcugaucaacaaggccgugaacgcccugaucaacgaccagcucaucaugaagaaccaccuccgggacaucaugggcaucccguacugcaacuacuccaaguacugcuaccugaaccacaccgucacggggaagaccagccugccccgcugcugccugguguccaacggcagcuaccugaacgagacccacuucuccgacgacaucgagcagcaggcggacaacaugaucaccgagcuccugcagaaggaguacauggaccggcagggcaagacgccccuggggcucguggaccuguucgucuucagcaccuccuucuaccugaucagcaucuuccugcaccucaucaagaucccgacccaccgccacaucaccggcaagcccugccccaagccccaccggcugaaccacauggggaucugcuccugcggccuguacaagcacccgggggugcccgugaaguggaagcgcuga

SEQ ID NO: 38254 - RNA, 1473 nt, Artificial Sequence
  derived and/or modified CDS sequence (opt1) from LASV(ISTH2010-NIG-2012;Clade II)__AIT17482__GPCmut11
augggccagaucaucaccuucuuccaggaggugccccacgucaucgaggaggugaugaacaucgugcugaucgcccucagccugcuggccauccucaaggggaucuacaacgucgcgaccugcggccuguucgggcugguguccuuccuccugcugugcggccgcagcugcuccacgaccuacaaggggguguacgagcuccagacccuggagcuggacauggccagccucaacaugaccaugccgcuguccugcacgaagaacaacagccaccacuacaucauggucggcaacgagaccggccuggagcucacccugaccaacacguccaucaucaaccacaaguucugcaaccugagcgacgcccacaagaagaaccucuacgaccacgcccugauguccaucaucagcaccuuccaccuguccauccccaacuucaaccaguacgaggccaugagcugcgacuucaacgggggcaagaucuccgugcaguacaaccucagccacgcguacgccguggacgccgccaaccacugcgggaccaucgcgaacggcguccugcagaccuucaugcggauggccuggggcggguccuacaucgcccuggacagcggcaagggguccugggacugcaucaugacgagcuaccaguaccucaucauccagaacaucaccugggaggaccacugccaguucucccgccccagccccaucggcuaccuggggcugcucagccagcggacccgcgacaucuacaucucccggcgccugcugggcaccuucacguggacccucagcgacuccgagggcaacgagacccccgggggcuacugccugacccgguggaugcugaucgaggccgagcucaagugcuucgggaacacggccguggcgaagugcaacgagaagcacgacgaggaguucugcgacaugcugcgccuguucgacuucaacaagcaggccauccggcgccucaagaccgaggcccagaugagcauccagcugaucaacaaggccgugaacgcccugaucaacgaccagcucaucaugaagaaccaccuccgggacaucaugggcauccccuacugcaacuacuccaaguacugcuaccugaaccacaccgucaccgggaagacgagccugccccgcugcugccugguguccaacggcagcuaccugaacgagacccacuucuccgacgacaucgagcagcaggcggacaacaugaucaccgagcuccugcagaaggaguacaucgaccggcagggcaagaccccgcuggggcucguggaccuguucgucuucagcacguccuucuaccugaucagcaucuuccugcaccucgugaagaucccgacccaccgccacguggucggcaagcccugccccaagccccaccggcugaaccacauggggaucugcuccugcggccuguacaagcacccgggggugcccgugaaguggaagcgcuga

SEQ ID NO: 38255 - RNA, 1473 nt, Artificial Sequence
  derived and/or modified CDS sequence (opt1) from LASV(Lassa virus/H.sapiens-wt/NGA/2015/ISTH_0543;Clade II)__AVO03639__GPCmut11
augggccagaucaucaccuucuuccaggaggugccccacgucaucgaggaggugaugaacaucgugcugaucgcccucagccugcuggccauccucaaggggaucuacaacgucgcgaccugcggccuguucgggcugguguccuuccuccugcugugcggccgcagcugcuccacgaccuacaaggggguguacgagcuccagacccuggagcuggacauggccaaccucaacaugaccaugccgcugagcugcacgaagaacaacucccaccacuacaucauggucggcaacgagaccggccuggagcucacccugaccaacacgagcaucaucaaccacaaguucugcaaccuguccgacgcccacaagaagaaccucuacgaccacgcccugaugagcaucaucuccaccuuccaccugagcauccccaacuucaaccaguacgaggccauguccugcgacuucaacgggggcaagaucagcgugcaguacaaccucucccacaccuacgcgguggacgccgccaaccacugcgggaccaucgccaacggcguccugcagacguucaugcggauggcguggggcgggagcuacaucgcccuggacuccggcaaggggagcugggacugcaucaugaccuccuaccaguaccucgugauccagaacaccaccugggaggaccacugccaguucagccgccccucccccaucggcuaccuggggcugcucagccagcggacgcgcgacaucuacaucagccggcgccugcugggcaccuucaccuggacccucuccgacagcgagggcaacgagacgcccgggggcuacugccugacccgguggaugcugaucgaggccgagcucaagugcuucgggaacaccgccguggccaagugcaacgagaagcacgacgaggaguucugcgacaugcugcgccuguucgacuucaacaagcaggcgauccggcgccucaagaccgaggcccagauguccauccagcugaucaacaaggccgucaacgcccugaucaacgaccagcucaucaugaagaaccaccuccgggacaucaugggcauccccuacugcaacuacagcaaguacugcuaccugaaccacacggugaccgggaagaccucccugccccgcugcugccuggugagcaacggcuccuaccugaacgagacccacuucagcgacgacaucgagcagcaggccgacaacaugaucacggagcuccugcagaaggaguacaucgaccggcagggcaagaccccgcuggggcucgucgaccuguucguguucuccaccagcuucuaccugaucuccaucuuccugcaccucgugaagaucccgacccaccgccacaucacgggcaagcccugccccaagccccaccggcugaaccacauggggaucugcagcugcggccuguacaagcacccggggguccccgugaaguggaagcgcuga

SEQ ID NO: 38256 - RNA, 1473 nt, Artificial Sequence
  derived and/or modified CDS sequence (opt1) from LASV(Lassa virus/H.sapiens-wt/NGA/2016/ISTH_0009;Clade II)__AVO03571__GPCmut11
augggccagaucaucaccuucuuccaggaggugccccacgucaucgaggaggugaugaacaucgugcugaucgcccucagccugcuggccauccucaaggggaucuacaacgucgcgaccugcggccugcuggggcucguguccuuccugcugcucugcggccgcagcugcuccacgaccuacaaggggguguacgagcugcagacccuggagcucgacauggccagccugaacaugaccaugccgcuguccugcacgaagaacaacagccaccacuacaucauggucggcaacgagaccggccucgagcugacccugaccaacacguccaucaucaaccacaaguucugcaaccucagcgacgcccacaagaagaaccuguacgaccacgcccugauguccaucaucagcaccuuccaccucuccauccccaacuucaaccaguacgaggccaugagcugcgacuucaacgggggccggaucuccgugcaguacaaccugagccacuccuacgcgguggacgccgccaaccacugcgggaccaucgccaacggcguccugcagaccuucaugcgcauggcguggggcgggagcuacaucgcccucgacuccggcaaggggagcugggacugcaucaugacguccuaccaguaccugaucauccagaacaccaccugggaggaccacugccaguucagccggcccagccccaucggcuaccuggggcuccugucccagcgcacccgggacaucuacaucagccgccggcugcucggcacguucaccuggacccuguccgacagcgagggcaacgagacccccgggggcuacugccugacgcgcuggaugcucaucgaggccgagcugaagugcuucgggaacaccgccguggccaagugcaacgagaagcacgacgaggaguucugcgacaugcugcggcuguucgacuucaacaagcaggcgauccgccggcugaagaccgaggcccagauguccauccagcugaucaacaaggccgugaacgcccucaucaacgaccagcugaucaugaagaaccaccuccgcgacaucaugggcaucccguacugcaacuacagcaaguacugcuaccucaaccacaccgucacggggaagaccucccugccccggugcugccuggugagcaacggcuccuaccucaacgagacccacuucagcgacgacaucgagcagcaggccgacaacaugaucaccgagcugcugcagaaggaguacaucgaccgccagggcaagacgccccucgggcugguggaccuguucgucuucuccaccagcuucuaccugaucuccaucuuccuccaccuggugaagaucccgacccaccggcacaucaccggcaagcccugccccaagccccaccgccugaaccacauggggaucugcagcugcggccucuacaaccacccgggggugcccgucaaguggaagcgguga

SEQ ID NO: 38257 - RNA, 1473 nt, Artificial Sequence
  derived and/or modified CDS sequence (opt1) from LASV(Lassa virus/H.sapiens-wt/NGA/2016/ISTH_0017;Clade II)__AVO03567__GPCmut11
augggccagaucaucaccuucuuccaggaggugccccacgucaucgaggaggugaugaacaucgugcugaucgcccucagccugcuggccauccucaaggggaucuacaacgucgcgaccugcggccuguucgggcugguguccuuccuccugcugugcggccgcagcugcuccacgaccuacaaggggguguacgagcuccagacccuggagcuggacauggccagccucaacaugaccaugccgcuguccugcacgaagaacaacagccaccacuacaucauggucggcaacgagaccggccuggagcucacccugaccaacacguccaucaucaaccacaaguucugcaaccugagcgacgcccacaagaagaaccucuacgaccacgcccugauguccaucaucagcaccuuccaccuguccauccccaacuucaaccaguacgaggccaugagcugcgacuucaacgggggcaagaucuccgugcaguacaaccucagccacaccuacgcgaucgacgccgccaaccacugcgggaccaucgccaacggcgugcugcagacguucaugcggauggcguggggcggguccuacaucgcccuggacagcggcaagggguccugggacugcaucaugaccagcuaccaguaccucaucauccagaacaccaccugggaggaccacugccaguucucccgccccagccccaucggcuaccuggggcugcucagccagcggacgcgcgacaucuacaucucccggcgccugcugggcaccuucaccuggacccucagcgacuccgagggcaacgagacgcccgggggcuacugccugacccgguggaugcugaucgaggccgagcucaagugcuucgggaacaccgccgucgccaagugcaacgagaagcacgacgaggaguucugcgacaugcugcgccuguucgacuucaacaagcaggcgauccggcgccucaagaccgaggcccagaugagcauccagcugaucaacaaggccgugaacgcccugaucaacgaccagcucaucaugaagaaccaccuccgggacaucaugggcauccccuacugcaacuacuccaaguacugcuaccugaaccacacggugaccgggaagaccagccugccccgcugcugccuggucuccaacggcagcuaccugaacgagacccacuucuccgacgacaucgagcagcaggccgacaacaugaucacggagcuccugcagaaggaguacauggaccggcagggcaagaccccgcuggggcucguggaccuguucguguucagcaccuccuucuaccugaucagcaucuuccugcaccucguccgcaucccgacccaccggcacgugaucggcaagcccugccccaagccccaccgccugaaccacauggggaucugcuccugcggccuguacaagcacccgggggugcccgucaaguggaagcgguga

SEQ ID NO: 38258 - RNA, 1473 nt, Artificial Sequence
  derived and/or modified CDS sequence (opt1) from LASV(Lassa virus/H.sapiens-wt/NGA/2018/ISTH_0959;Clade II)__AVV65099__GPCmut11
augggccagaucaucaccuucuuccaggaggugccccacgucaucgaggaggugaugaacaucgugcugaucgcccucagccugcuggccauccucaaggggaucuacaacgucgugaccugcggccuguucgggcugguguccuuccuccugcugugcggccgcagcugcuccacgaccuacaagggggucuacgagcuccagacccuggagcuggacauggcgagccucaacaugaccaugccgcuguccugcacgaagaacaacagccaccacuacaucauggugggcaacgagaccggccuggagcucacccugaccaacacguccaucaucaaccacaaguucugcaaccugagcgacgcccacaagaagaaccucuacgaccacgcccugauguccaucaucagcaccuuccaccuguccauccccaacuucaaccaguacgaggccaugagcugcgacuucaacgggggcaagaucuccgugcaguacaaccucagccacgccuacgcgaucgacgccgccaaccacugcgggaccaucgccaacggcguccugcagaccuucaugcggauggcguggggcggguccuacaucgcccuggacagcggcaagggguccugggacugcaucaugacgagcuaccaguaccucaucauccagaacaccaccugggaggaccacugccaguucucccgccccagccccaucggcuaccuggggcugcucagccagcggacccgcgacaucuacaucucccggcgccugcugggcacguucaccuggacccucagcgacuccgagggcaacgagacccccgggggcuacugccugacgcgguggaugcugaucgaggccgagcucaagugcuucgggaacaccgccguggccaagugcaacgagaagcacgacgaggaguucugcgacaugcugcgccuguucgacuucaacaagcaggcgauccggcgccucaagaccgaggcccagaugagcauccagcugaucaacaaggccgugaacgcccugaucaacgaccagcucaucaugaagaaccaccuccgggacaucaugggcaucccguacugcaacuacuccaaguacugcuaccugaaccacaccgucacggggaagaccagccugccccgcugcugccugguguccaacggcagcuaccugaacgagacccacuucuccgacgacaucgagcagcaggccgacaacaugaucaccgagcuccugcagaaggaguacaucgaccggcagggcaagacgccccuggggcucguggaccuguucgucuucagcaccuccuucuaccugaucagcaucuuccugcaccucgugaagaucccgacccaccgccacgugaucggcaagcccugccccaagccccaccggcugaaccacauggggaucugcuccugcggccuguacaagcacccggggguccccgugaaguggaagcgcuga

SEQ ID NO: 38259 - RNA, 1473 nt, Artificial Sequence
  derived and/or modified CDS sequence (opt1) from LASV(LASV003-NIG-2008;Clade II)__AIT17580__GPCmut11
augggccagaucaucaccuucuuccaggaggugccccacgucaucgaggaggugaugaacaucgugcugaucgcccucagccugcuggccauccucaaggggaucuacaacgucgcgaccugcggccuguucgggcugguguccuuccuccugcugugcggccgcagcugcuccacgaccuacaaggggguguacgagcuccagacccuggagcuggacauggccagccucaacaugaccaugccgcuguccugcacgaagaacaacagccaccacuacaucauggucggcaacgagaccggccuggagcucacccugaccaacacguccaucaucaaccacaaguucugcaaccugagcgacgcccacaagaagaaccucuacgaccacgcccugauguccaucaucagcaccuuccaccuguccauccccaacuucaaccaguacgaggccaugagcugcgacuucaacgggggcaagaucuccgugcaguacaaccucagccacaccuacgcgguggacgccgccaaccacugcgggaccaucgccaacggcguccugcagacguucaugcggauggcguggggcggguccuacaucgcccuggacagcggcaagggguccugggacugcaucaugaccagcuaccaguaccucaucauccagaacaccaccugggaggaccacugccaguucucccgccccagccccaucggcuaccuggggcugcucagccagcggacgcgcgacaucuacaucucccggcgccugcugggcaccuucaccuggacccucagcgacuccgagagcaacgagacgccgggcggguacugccugacccgguggaugcugaucgaggccgagcucaagugcuucggcaacaccgccguggccaagugcaacgagaagcacgacgaggaguucugcgacaugcugcgccuguucgacuucaacaagcaggcgauccggcgccucaaggccgaggcccagauguccauccagcugaucaacaaggccgugaacgcccugaucaacgaccagcucaucaugaagaaccaccuccgggacaucauggggauccccuacugcaacuacagcaaguacugcuaccugaaccacaccgucacgggccgcaccucccugccccggugcugccuggugagcaacggguccuaccugaacgagacccacuucagcgacgacaucgagcagcaggcggacaacaugaucaccgagcuccugcagaaggaguacauggaccgccagggcaagacgccccugggccucguggaccuguucgucuucuccaccagcuucuaccugaucuccaucuuccugcaccucgugaagaucccgacccaccggcacgugaucgggaagcccugccccaagccccaccgccugaaccacaugggcaucugcagcugcgggcuguacaagcacccgggcguccccgugaaguggaagcgguga

SEQ ID NO: 38260 - RNA, 1473 nt, Artificial Sequence
  derived and/or modified CDS sequence (opt1) from LASV(LASV035-NIG-2009;Clade II)__AIT17588__GPCmut11
augggccagaucaucaccuucuuccaggaggugccccacgucaucgaggaggugaugaacaucgugcugaucgcccucagccugcuggccauccucaaggggaucuacaacgucgcgaccugcggccuguucgggcugguguccuuccuccugcugugcggccgcagcugcuccacgaccuacaaggggguguacgagcuccagacccuggagcuggacauggccagccucaacaugaccaugccgcuguccugcacgaagaacaacagccaccacuacaucauggucggcaacgagaccggccuggagcucacccugaccaacacguccaucaucaaccacaaguucugcaaccugagcgacgcccacaagaagaaccucuacgaccacgcccugauguccaucaucagcaccuuccaccuguccauccccaacuucaaccaguacgaggccaugagcugcgacuucaacgggggcaagaucuccgugcaguacaaccucagccacgcguacgccguggacgccgccaaccacugcgggaccaucgcgaacggcguccugcagaccuucaugcggauggccuggggcggguccuacaucgcccuggacagcggcaagggguccugggacugcaucaugacgagcuaccaguaccucaucauccagaacaccaccugggaggaccacugccaguucucccgccccagccccaucggcuaccuggggcugcucagccagcggacccgcgacaucuacaucucccggcgccugcugggcacguucaccuggacccucagcgacuccgagggcaacgagacccccgggggcuacugccugacgcgguggaugcugaucgaggccgagcucaagugcuucgggaacaccgccguggcgaagugcaacgagaagcacgacgaggaguucugcgacaugcugcgccuguucgacuucaacaagcaggccauccggcgccucaaggccgaggcccagaugagcauccagcugaucaacaaggccgugaacgcgcugaucaacgaccagcucaucaugaagaaccaccuccgggacaucaugggcauccccuacugcaacuacuccaaguacugcuaccugaaccacaccgucaccgggaagacgagccugccccgcugcugccugguguccaacggcagcuaccugaacgagacccacuucuccgacgacaucgagcagcaggccgacaacaugaucaccgagcuccugcagaaggaguacaucgaccggcagggcaagaccccgcuggggcucguggaccuguucgucuucagcacguccuucuaccugaucagcaucuuccugcaccucgugaagaucccgacccaccgccacgugaucggcaagcccugccccaagccccaccggcugaaccacauggggaucugcuccugcggccuguacaagcacccggggguccccgugaaguggaagcgcuga

SEQ ID NO: 38261 - RNA, 1473 nt, Artificial Sequence
  derived and/or modified CDS sequence (opt1) from LASV(LASV1000-NIG-2009;Clade II)__AIT17782__GPCmut11
augggccagaucaucaccuucuuccaggaggugccccacgucaucgaggaggugaugaacaucgugcugaucgcccucagccugcuggccauccucaaggggaucuacaacgucgcgaccugcggccuguucgggcugguguccuuccuccugcugugcggccgcagcugcuccacgaccuacaaggggguguacgagcuccagacccuggagcuggacauggccagccucaacaugaccaugccgcuguccugcacgaagaacaacagccaccacuacaucauggucggcaacgagaccggccuggagcucacccugaccaacacguccaucaucaaccacaaguucugcaaccugagcgacgcccacaagaagaaccucuacgaccacgcccugauguccaucaucagcaccuuccaccuguccauccccaacuucaaccaguacgaggccaugagcugcgacuucaacgggggcaagaucuccgugcaguacaaccucagccacaccuacgcgguggacgccgccaaccacugcgggaccaucgccaacggcguccugcagacguucaugcggauggcguggggcggguccuacaucgcccuggacagcggcaagggguccugggacugcaucaugaccagcuaccaguaccucaucauccagaacaccaccugggaggaccacugccaguucucccgccccagccccaucggcuaccuggggcugcucagccagcggacgcgcgacaucuacaucucccggcgccugcugggcaccuucaccuggacccucagcgacuccgagggcaacgagacgcccgggggcuacugccugacccgguggaugcugaucgaggccgagcucaagugcuucgggaacaccgccguggccaagugcaacgagaagcacgacgaggaguucugcgacaugcugcgccuguucgacuucaacaagcaggcgaucaagcggcucaagaccgaggcccagaugagcauccagcugaucaacaaggccgugaacgcccugaucaacgaccagcucaucaugaagaaccaccuccgcgacaucaugggcauccccuacugcaacuacuccaaguacugcuaccugaaccacacggucaccgggaagaccagccugccccggugcugccugguguccaacggcagcuaccugaacgagacccacuucuccgacgacaucgagcagcaggccgacaacaugaucacggagcuccugcagaaggaguacaucgaccgccagggcaagaccccgcuggggcucguggaccuguucgucuucagcaccuccuucuaccugaucagcaucuuccugcaccucgugaagaucccgacccaccggcacguggucggcaagcccugccccaagccccaccgccugaaccacauggggaucugcuccugcggccuguacaagcacccgggggugcccgugaaguggaagcgguga

SEQ ID NO: 38262 - RNA, 1473 nt, Artificial Sequence
  derived and/or modified CDS sequence (opt1) from LASV(LASV221-NIG-2010;Clade II)__AIT17624__GPCmut11
augggccagaucaucaccuucuuccaggaggugccccacgucaucgaggaggugaugaacaucgugcugaucgcccucagccugcuggccauccucaaggggaucuacaacgucgcgaccugcggccuguucgggcugguguccuuccuccugcugugcggccgcagcugcuccacgaccuacaaggggguguacgagcuccagacccuggagcuggacauggccagccucaacaugaccaugccgcuguccugcacgaagaacaacagccaccacuacaucauggucggcaacgagaccggccuggagcucacccugaccaacacguccaucaucaaccacaaguucugcaaccugagcgacgcccacaagaagaaccucuacgaccacgcccugauguccaucaucagcaccuuccaccuguccauccccaacuucaaccaguacgaggccaugagcugcgacuucaacgggggcaagaucuccgugcaguacaaccucagccacaccuacgcgaucgacgccgccaaccacugcgggaccaucgccaacggcgugcugcagacguucaugcggauggcguggggcggguccuacaucgcccuggacagcggcaagggguccugggacugcaucaugaccagcuaccaguaccucaucauccagaacaccaccugggaggaccacugccaguucucccgccccagccccaucggcuaccuggggcugcucagccagcggacgcgcgacaucuacaucucccggcgccugcugggcaccuucaccuggacccucagcgacuccgagggcaacgagacgcccgggggcuacugccugacccgguggaugcugaucgaggccgagcucaagugcuucgggaacaccgccgucgccaagugcaacgagaagcacgacgaggaguucugcgacaugcugcgccuguucgacuucaacaagcaggcgauccggcgccucaagaccgaggcccagaugagcauccagcugaucaacaaggccgugaacgcccugaucaacgaccagcucaucaugaagaaccaccuccgggacaucaugggcauccccuacugcaacuacuccaaguacugcuaccugaaccacacggugaccgggaagaccagccugccccgcugcugccuggucuccaacggcagcuaccugaacgagacccacuucuccgacgacaucgagcagcaggccgacaacaugaucacggagaugcuccagaaggaguacauggaccggcagggcaagaccccgcuggggcugguggaccucuucguguucagcaccuccuucuaccugaucagcaucuuccugcaccuggucaagaucccgacccaccgccacgugaucggcaagcccugccccaagccccaccggcucaaccacauggggaucugcuccugcggccuguacaagcacccgggggugcccgucaaguggaagcgcuga

SEQ ID NO: 38263 - RNA, 1473 nt, Artificial Sequence
  derived and/or modified CDS sequence (opt1) from LASV(LASV237-NIG-2010;Clade II)__AIT17638__GPCmut11
augggccagaucaucaccuucuuccaggaggugccccacgucaucgaggaggugaugaacaucgugcugaucgcccucagccugcuggccauccucaaggggaucuacaacgucgcgaccugcggccuguucgggcugguguccuuccuccugcugugcggccgcagcugcuccacgaccuacaaggggguguacgagcuccagacccuggagcuggacauggccagccucaacaugaccaugccgcuguccugcacgaagaacaacagccaccacuacaucauggucggcaacgagaccggccuggagcucacccugaccaacacguccaucaucaaccacaaguucugcaaccugagcgacgcccacaagaaggaccucuacgaccacgcccugauguccaucaucagcaccuuccaccuguccauccccaacuucaaccaguacgaggccaugagcugcgacuucaacgggggcaagaucuccgugcaguacaaccucagccacaccuacgcgguggacgccgccaaccacugcgggaccaucgccaacggcguccugcagacguucaugcggauggcguggggcggguccuacaucgcccuggacagcggcaagggguccugggacugcaucaugaccagcuaccaguaccucaucauccagaacaccaccugggaggaccacugccaguucucccgccccagccccaucggcuaccuggggcugcucagccagcggacgcgcgacaucuacaucucccggcgccugcugggcaccuucaccuggacccucagcgacuccgagggcaacgagacgcccgggggcuacugccugacccgguggaugcugaucgaggccgagcucaagugcuucgggaacaccgccguggccaagugcaacgagaagcacgacgaggaguucugcgacaugcugcgccuguucgacuucaacaagcaggcgauccggcgccucaagaccgaggcccagaugagcauccagcugaucaacaaggccgugaacgcccugaucaacgaccagcucaucaugaagaaccaccuccgggacaucaugggcauccccuacugcaacuacuccaaguacugcuaccugaaccacacggucaccgggaagaccagccugccccgcugcugccugguguccaacggcagcuaccugaacgagacccacuucuccgacgacaucgagcagcaggccgacaacaugaucacggagcuccugcagaaggaguacauggaccggcagggcaagaccccgcuggggcucguggaccuguucgucuucagcaccuccuucuaccugaucagcaucuuccugcaccucaucaagaucccgacccaccgccacaucacgggcaagcccugccccaagccccaccggcugaaccacauggggaucugcuccugcggccuguacaagcacccgggggugcccgugaaguggaagcgcuga

SEQ ID NO: 38264 - RNA, 1473 nt, Artificial Sequence
  derived and/or modified CDS sequence (opt1) from LASV(LASV253-NIG-2011;Clade II)__AIT17670__GPCmut11
augggccagaucaucaccuucuuccaggaggugccccacgucaucgaggaggugaugaacaucgugcugaucgcccucagccugcuggccauccucaaggggaucuacaacgucgcgaccugcggccuguucgggcugguguccuuccuccugcugugcggccgcagcugcuccacgaccuacaaggggguguacgagcuccagacccuggagcuggacauggccagccucaacaugaccaugccgcuguccugcacgaagaacaacagccaccacuacaucauggucggcaacgagaccggccuggagcucacccugaccaacacguccaucaucaaccacaaguucugcaaccugagcgacgcccacaagaagaaccucuacgaccacgcccugauguccaucaucagcaccuuccaccuguccauccccaacuucaaccaguacgaggccaugagcugcgacuucaacgggggcaagaucuccgugcaguacaaccucagccacaccuacgcgguggacgccgccaaccacugcgggaccaucgccaacggcguccugcagacguucaugcggauggcguggggcggguccuacaucgcccuggacagcggcaagggguccugggacugcaucaugaccagcuaccaguaccucaucauccagaacaccaccugggaggaccacugccaguucucccgccccagccccaucggcuaccuggggcugcucagccagcggacgcgcgacaucuacaucucccggcgccugcugggcaccuucaccuggacccucagcgacuccgagggcaacgagacgcccgggggcuacugccugacccgguggaugcugaucgaggccgagcucaagugcuucgggaacaccgccguggccaagugcaacgagaagcacgacgaggaguucugcgacaugcugcgccuguucgacuucaacaagcaggcgauccggcgccucaaggccgaggcccagaugagcauccagcugaucaacaaggccgugaacgcccugaucaacgaccagcucaucaugaagaaccaccuccgggacaucaugggcaucccguacugcaacuacuccaaguacugcuaccugaaccacaccgucacggggcgcaccagccugccccggugcugccugguguccaacggcagcuaccugaacgagacccacuucuccgacgacaucgagcagcaggcggacaacaugaucaccgagcuccugcagaaggaguacaucgaccgccagggcaagacgccccuggggcucguggaccuguucgucuucagcaccuccuucuaccugaucagcaucuuccugcaccucgugaagaucccgacccaccggcacaucaucggcaagcccugccccaagccccaccgccugaaccacauggggaucugcuccugcggccuguacaagcacccgggggugcccgucaaguggaagcgguga

SEQ ID NO: 38265 - RNA, 1473 nt, Artificial Sequence
  derived and/or modified CDS sequence (opt1) from LASV(LASV254-NIG-2011;Clade II)__AIT17674__GPCmut11
augggccagaucaucaccuucuuccaggaggugccccacgucaucgaggaggugaugaacaucgugcugaucgcccucagccugcuggccauccucaaggggaucuacaacgucgcgaccugcggccuguucgggcugguguccuuccuccugcugugcggccgcagcugcuccacgaccuacaaggggguguacgagcuccagacccuggagcuggacaugaccaaccucaacaugacgaugccgcugagcugcaccaagaacaacucccaccacuacaucauggucggcaacgagaccggccuggagcucacccugacgaacaccagcaucaucaaccacaaguucugcaaccuguccgacgcccacaagaagaaccucuacaaccacgcccugaugagcaucaucuccaccuuccaccugagcauccccaacuucaaccaguacgaggccauguccugcgacuucaacgggggcaagaucagcgugcaguacaaccucucccacagcuacgccguggacgcggccaaccacugcgggaccaucgccaacggcguccugcagacguucaugcggauggccuggggcggguccuacaucgcgcuggacagcggcaaggggaacugggacugcaucaugaccuccuaccaguaccucaucauccagaacaccaccugggaggaccacugccaguucagccgccccucccccaucggcuaccuggggcugcucagccagcggacgcgcgacaucuacaucagccggcgccugcugggcaccuucaccuggacccucuccgacagcgagggcaacgagacgcccgggggcuacugccugacccgguggaugcugaucgaggccgagcucaagugcuucgggaacaccgccguggccaagugcaacgagaagcacgacgaggaguucugcgacaugcugcgccuguucgacuucaacaagcaggccauccggcgccucaagaccgaggcgcaggccaacauccagcugaucaacaaggccgugaacgcccugaucaacgaccagcucaucaugaagaaccaccuccgggacaucaugggcauccccuacugcaacuacuccaaguacugcuaccugaaccacacggucaccgggaagaccagccugccccgcugcugccugguguccaacggcagcuaccugaacgagacccacuucuccgacgacaucgagcagcaggccgacaacaugaucacggagcuccugcagaaggaguacauggaccggcagggcaagaccccgcuggggcucguggaccuguucgucuucagcaccuccuucuaccugaucagcaucuuccugcaccucgugaagaucccgacccaccgccacgugaucggcaagcccugccccaagccccaccggcugaaccacauggggaucugcuccugcggccuguacaagcacccggggguccccgugaaguggaagcgcuga

SEQ ID NO: 38266 - RNA, 1473 nt, Artificial Sequence
  derived and/or modified CDS sequence (opt1) from LASV(Nig08-A19;Clade III)__ADU56618__GPCmut11
augggccagaucgugaccuucuuccaggaggucccccacgugaucgaggaggugaugaacaucguccugaucgcccucagcauccuggccauccugaaggggcucuacaacaucgcgaccugcggccugaucgggcuggugacguuccuccugcuguccggccgcagcugcuccaugaccuacaaggggguguacgagcuccagacccuggagcugaacaugaacacccucaacaugacgaugccgcugagcugcaccaagaacaacucccaccacuacaucauggucggcaacgagaccggccuggagcucacccugacgaacaccagccugcuccaccacaaguucugcaaccuguccgacgcccacaagaagaaccuguacgaccacacccucaugagcaucaucuccaccuuccaccugagcauccccaacuucaaccaguacgaggccauguccugcgacuucaacgggggcaagaucacggugcaguacaaccugagccacuccuacgccaucgacgccgcgaaccacugcgggaccguggccaacggcguccuccagaccuucaugcggauggccuggggcgggagcuacaucgcccuggacuccggccgcgggaagugggacugcaucaugaccagcuaccaguaccugaucauccagaacacgaccugggaggaccacugccaguucucccggcccagccccaucggcuaccucgggcugcugucccagcgcacccgggacaucuacaucagccgccggcuccugggcaccuucacguggacccugagcgacuccgagggcaacgagacccccgggggcuacugccucacccgcuggaugcugaucgaggcggagcugaagugcuucgggaacacggccguggccaagugcaacgagaagcacgacgaggaguucugcgacaugcuccggcuguucgacuucaacaagcaggccauccgccggcugaaggccgaggcgcagaugagcauccagcucaucaacaaggccgugaacgcccugaucaacgaccagcugaucaugaagaaccaccuccgcgacaucaugggcauccccuacugcaacuacuccaaguacugcuaccugaaccacaccagcaccgggcggaccucccugccccgcugcugccucgucagcaacggcuccuaccugaacgagacgcacuucagcgacgacaucgagcagcaggccgacaacaugaucaccgagaugcugcagaaggaguaccucgaccggcagggcaagaccccgcuggggcugguggaccuguucguguucuccaccagcuucuaccucaucuccaucuuccugcaccuggucaagaucccgacgcaccgccacaucgugggcaagcccugccccaagccccaccggcucaaccacauggggaucugcagcugcggccuguacaagcagccgggggugcccguccgcuggaagcgguga

SEQ ID NO: 38267 - RNA, 1476 nt, Artificial Sequence
  derived and/or modified CDS sequence (opt1) from LASV(G1180-SLE-2010;Clade IV)__AIT17168__GPCmut11
augggccagaucgugaccuucuuccaggaggucccccacgugaucgaggaggugaugaacaucguccugaucgcccucagcauccuggccgugcugaaggggcucuacaacuucgcgaccugcggccugguggggcugcucaccuuccugcugcucugcggccgcuccugcaccgccagccgguacaagggggucuacgagcugcagacccuggagcucaacauggagacccugaacaugacgaugccgcuguccugcaccaagaacaacagccaccacuacaucauggugggcaacgagaccggccucgagcugacccugacgaacaccuccaucaucaaccacaaguucugcaaccucagcgacgcccacaagaagaaccuguacgaccacgcccugauguccaucaucagcaccuuccaccucuccauccccaacuucaaccaguacgaggccaugagcugcgacuucaacgggggcaagaucuccgugcaguacaaccugagccacuccuacgcgggggacgccgccaaccacugcggcaccgucgccaacggggugcugcagacguucaugcgcauggcguggggcggcagcuacaucgcccucgacuccgggcacggcagcugggacugcaucaugaccuccuaccaguaccugaucauccagaacaccaccugggaggaccacugccaguucagccggcccucccccaucggguaccugggccuccugagccagcgcacgcgggacaucuacaucagccgccggcugcucggcaccuucaccuggacccuguccgacagcgaggggaaggacacgccgggcggguacugccugacccgcuggaugcucaucgaggccgagcugaagugcuucggcaacaccgccguggccaagugcaacgagaagcacgacgaggaguucugcgacaugcugcggcuguucgacuucaacaagcaggcgauccagcgccugaaggccgaggcccagauguccauccagcugaucaacaaggccgucaacgcccucaucaacgaccagcugaucaugaagaaccaccuccgggacaucauggggauccccuacugcaacuacagcaaguacugcuaccucaaccacaccacgaccggcaagaccucccugcccaagugcugccuggugagcaacggcuccuaccucaacgagacccacuucagcgacgacaucgagcagcaggcggacaacaugaucacggagaugcugcagaaggaguacauggagcgccaggggaagacgccccugggccucguggaccuguucgucuucuccaccagcuucuaccugaucuccaucuuccugcaccucgugaagaucccgacccaccggcacaucgugggcaagagcugccccaagccccaccgccugaaccacauggggaucugcuccugcgggcuguacaagcagcccggcgucccggugaaguggaagcgguga

SEQ ID NO: 38268 - RNA, 1476 nt, Artificial Sequence
  derived and/or modified CDS sequence (opt1) from LASV(G1442-SLE-2011;Clade IV)__AIT17180__GPCmut11
augggccagaucgugaccuucuuccaggaggucccccacgugaucgaggaggugaugaacaucguccugaucgcccucagcauccuggccgugcugaaggggcucuacaacguggcgaccugcggccugaucgggcuggucacguuccuccugcugugcggccgcuccugcaccaccacccucuacaaggggguguacgagcugcagacgcuggagcucaacauggagacccugaacaugaccaugccgcugagcugcaccaagaacaacucccaccacuacauccgggugggcaacgagacgggccucgagcugacccugaccaacaccagcaucaucaaccacaaguucugcaaccucuccgacgcccacaagaagaaccuguacgaccacgcccugaugagcaucaucuccacguuccaccucagcauccccaacuucaaccaguacgaggccauguccugcgacuucaacgggggcaagaucagcguccaguacaaccugucccacagcuacgccggggacgcggccaaccacugcggcaccguggccaacggggugcugcagaccuucaugcgcauggccuggggcggcuccuacaucgcgcucgacagcgggcggggcaacugggacugcaucaugaccuccuaccaguaccugaucauccagaacacgaccugggacgaccacugccaguucagccgccccucccccaucggguaccugggccuccugagccagcggacccgcgacgucuacaucucccggcgccugcucggcaccuucacguggacccugagcgacagcgaggggaaggacaccccgggcggguacugccugacccgguggaugcucaucgaggccgagcugaagugcuucggcaacacggccguggccaagugcaacgagaagcacgacgaggaguucugcgacaugcugcgccucuucgacuucaacaagcaggccauccagcggcugaaggcggaggcccagauguccauccagcugaucaacaaggccgugaacgcccucaucaacgaccagcugaucaugaagaaccaccuccgcgacaucauggggauccccuacugcaacuacagcaaguacugcuaccugaacaacaccgccaccggcaagaccucccugcccaagugcugccugaucagcaacggcuccuaccucaacgagacgcacuucagcgacgacaucgagcaggaggcggacaacaugaucaccgagaugcugcagaaggaguacauggagcggcaggggaagacgccccugggccucgucgaccuguucguguucuccaccagcuucuaccugaucuccaucuuccugcaccucgugaagaucccgacccaccgccacaucgucggcaagagcugccccaagccccaccggcugaaccacauggggaucugcuccugcgggcuguacaagcagcccggcgugccggugcgcuggaagcgguga

SEQ ID NO: 38269 - RNA, 1476 nt, Artificial Sequence
  derived and/or modified CDS sequence (opt1) from LASV(G3010-SLE-2013;Clade IV)__AIT17344__GPCmut11
augggccagaucgugaccuucuuccaggaggucccccacgugaucgaggaggugaugaacaucguccugaucgcccucagcauccuggccgugcugaaggggcucuacaacuucgcgaccugcggccugguggggcuggucacguuccuccugcugugcggccgcuccugcaccaccagccucuacaaggggguguacgagcugcagacccuggagcucaacauggagacgcugaacaugaccaugccgcuguccugcaccaagaacaacagccaccacuacaucauggugggcaacgagaccggccucgagcugacgcugaccaacaccuccaucaucaaccacaaguucugcaaccucagcgacgcccacaagaagaaccuguacaaccacgcccugauguccaucaucagcaccuuccaccucuccauccccaacuucaaccaguacgaggccaugagcugcgacuucaacgggggcaagaucuccguccaguacaaccugagccacuccuacgccggggacgcggccagccacugcggcacgguggccaacggggugcugcagaccuucaugcggauggccuggggcggcuccuacaucgcgcucgacagcggguacggcaagugggacugcaucaugaccuccuaccaguaccugaucauccagaacaccacgugggaggaccacugccaguucagccgccccucccccaucggguaccugggccuccugagccagcggacccgcgacaucuacaucagccggcgccugcucggcaccuucaccuggacgcuguccgacagcgaggggaaggacaccccgggcggguacugccugacccgguggaugcucaucgaggccgagcugaagugcuucggcaacaccgccgucgccaagugcaacgagaagcacgacgaggaguucugcgacaugcugcgccucuucgacuucaacaagcaggccauccagcggcugaagacggaggcgcagauguccauccagcugaucaacaaggccgugaacgcccucaucaacgaccagcugaucaugaagaaccaccuccgcgacaucauggggauccccuacugcaacuacagcaaguacugcuaccugaaccacaccaccaccggcaagacgucccugcccaagugcugccuggugagcaacggcuccuaccucaacgagacccacuucagcgacgacaucgagcagcaggccgacaacaugaucaccgagaugcugcagaaggaguacauggagcggcaggggaagacgccccugggccucgucgaccuguucguguucuccaccagcuucuaccugaucuccaucuuccugcaccucgugaagaucccgacccaccgccacaucgucggcaagagcugccccaagccccaccggcugaaccacauggggaucugcuccugcgggcuguacaagcagcccggcgugccggugcgcuggaagcgguga

SEQ ID NO: 38270 - RNA, 1476 nt, Artificial Sequence
  derived and/or modified CDS sequence (opt1) from LASV(G502-SLE-2009;Clade IV)__AIT17126__GPCmut11
augggccagaucgugaccuucuuccaggaggucccccacgugaucgaggaggugaugaacaucguccugaucgcccucagcauccuggccgugcugaaggggcucuacaacuucgcgaccugcggccugguggggcugcucacguuccugcugcucugcggccgcuccugcaccaccgggcuguacaagggcgucuacgagcugcagacccucgagcugaacauggagacgcugaacaugaccaugccgcucagcugcaccaagaacaacucccaccacuacaucauggugggcaacgagaccgggcuggagcugacgcucaccaacaccagcaucaucaaccacaaguucugcaaccuguccgacgcccacaagaagaaccuguacgaccacgcccucaugagcaucaucuccaccuuccaccugagcauccccaacuucaaccaguacgaggccauguccugcgacuucaacggcgggaagaucagcgugcaguacaaccugucccacagcuacgccggcgacgcggccgaccacugcgggacggucgccaacggcgugcuccagaccuucaugcggauggccuggggcggguccuacaucgcgcuggacagcggccgcgggcggugggacugcaucaugaccuccuaccaguaccugaucauccagaacaccacgugggaggaccacugccaguucagccgccccucccccaucggcuaccucggccugcugagccagcggacccgcgacaucuacaucucccggcgccuccuggggaccuucaccuggacgcugagcgacagcgagggcaaggacacccccgggggcuacugccucacccgguggaugcugaucgaggccgagcugaagugcuucgggaacaccgccguggccaagugcaacgagaagcacgacgaggaguucugcgacaugcuccgccuguucgacuucaacaagcaggccauccagcggcugaaggcggaggcccagauguccauccagcucaucaacaaggccgucaacgcccugaucaacgaccagcuggugaugaagaaccaccuccgcgacaucaugggcauccccuacugcaacuacagccgguacugcuaccugaaccacacgaccaccggccgcaccucccugcccaagugcugccucgugagcaacggguccuaccugaacgagacgcacuucagcgacgacaucgagcagcaggccgacaacaugaucaccgagaugcugcagaaggaguacauggagcggcagggcaagaccccgcucgggcuggucgaccuguucguguucuccaccagcuucuaccugaucuccaucuuccuccaccuggugaagaucccgacgcaccgccacaucgucggcaagagcugccccaagccccaccggcugaaccacauggggaucugcuccugcggccucuacaagcagcccggcgugccggugaaguggaagcgcuga

SEQ ID NO: 38271 - RNA, 1476 nt, Artificial Sequence
  derived and/or modified CDS sequence (opt1) from LASV(G733-SLE-2010;Clade IV)__AIT17154__GPCmut11
augggccagaucgugaccuucuuccaggaggucccccacgugaucgaggaggugaugaacaucguccugaucgcccucagcauccuggccgugcugaaggggcucuacaacuucgcgaccugcggcaucguggggcuggucuccuuccugcuccugugcggccgcagcugcacgaccucccuguacaaggggguguacgagcuccagacccuggagcugaacauggagacccucaacaugacgaugccgcugagcugcaccaagaacaacucccaccacuacaucauggugggcaacgagaccggccuggagcucacccugacgaacaccagcaucaucaaccacaaguucugcaaccuguccgacgcccacaagaagaaccucuacgaccacgcccugaugagcaucaucuccaccuuccaccugagcauccccaacuucaaccaguacgaggccauguccugcgacuucaacgggggcaagaucagcguccaguacaaccucucccacagcuacgccggggacgcggccaaccacugcggcaccaucgccaacggggugcugcagacguucaugcggauggccuggggcggcuccuacaucgcgcuggacagcgggcgcgaccggugggacugcaucaugaccuccuaccaguaccucaucauccagaacaccaccugggaggaccacugccaguucagccgccccucccccaucggcuaccuggggcugcucagccagcggacgcgcgacaucuacaucagccggcgccugcugggcaccuucaccuggacccucuccgacagcgagggcaaggacacgcccgggggcuacugccugacccgguggaugcugaucgaggccgagcucaagugcuucgggaacaccgccguggccaagugcaacgagaagcacgacgaggaguucugcgacaugcugcgccuguucgacuucaacaagcaggccauccagcggcucaaggcggaggcccagauguccauccagcugaucaacaaggccgucaacgcccugaucaacgaccagcucaucaugaagaaccaccuccgcgacaucaugggcauccccuacugcaacuacagcaaguacugcuaccugaaccacaccacgaccgggaagaccucccugcccaagugcugccuggugagcaacggcuccuaccugaacgagacccacuucagcgacgacaucgagcagcaggccgacaacaugaucacggagaugcuccagaaggaguacauggagcggcagggcaagaccccgcuggggcugguggaccucuucgucuucuccaccagcuucuaccugaucuccaucuuccugcaccuggugaagaucccgacccaccgccacguggucggcaagagcugccccaagccccaccggcucaaccacauggggaucugcuccugcggccuguacgggcagcccggcgugccggugaaguggaagcgcuga

SEQ ID NO: 38272 - RNA, 1476 nt, Artificial Sequence
  derived and/or modified CDS sequence (opt1) from MOPV/LASV reassortant(IGS-1;Clade IV)__AFY05576__GPCmut11
augggccagaucgugaccuucuuccaggaggucccccacgugaucgaggaggugaugaacaucguccugaucgcccucagcgugcuggccgugcugaaggggcucuacaacuucgcgaccugcggccuggucgggcuggugacguuccuccugcugugcggccgcuccugcaccaccagccucuacaaggggguguacgagcugcagacccuggagcucaacauggagacgcugaacaugaccaugccgcuguccugcaccaagaacaacagccaccacuacaucauggucggcaacgagaccggccucgagcugacgcugaccaacaccuccaucaucaaccacaaguucugcaaccucagcgacgcccacaagaagaaccuguacgaccacgcccugauguccaucaucagcaccuuccaccucuccauccccaacuucaaccaguacgaggccaugagcugcgacuucaacgggggcaagaucuccgugcaguacaaccugagccacuccuacgccggggacgcggccaaccacugcggcacgguggccaacgggguccugcagaccuucaugcggauggccuggggcggcagcuacaucgcgcucgacuccgggcgcggcaacugggacugcaucaugaccagcuaccaguaccugaucauccagaacaccacgugggaggaccacugccaguucucccggcccagccccaucggguaccugggccuccugucccagcgcacccgggacaucuacaucagccgccggcugcucggcaccuucaccuggacgcugagcgacuccgagggggaggacaccccgggcggguacugccugacccgcuggaugcucaucgaggccgagcugaagugcuucggcaacaccgccguggccaagugcaacgagaagcacgacgaggaguucugcgacaugcugcggcuguucgacuucaacaagcaggccauccagcgccugaaggcggaggcccagaugagcauccagcugaucaacaaggccgugaacgcccucaucaacgaccagcugaucaugaagaaccaccuccgggacaucauggggauccccuacugcaacuacuccaaguacugcuaccucaaccacacgaccaccggccgcaccagccugcccaagugcugccuggucuccaacggcagcuaccucaacgagacgcacuucuccgacgacaucgagcagcaggccgacaacaugaucaccgagaugcugcagaaggaguacauggagcggcaggggaagacgccccugggccucguggaccuguucguguucagcaccuccuucuaccugaucagcaucuuccugcaccucgucaagaucccgacccaccgccacaucguggggaaguccugccccaagccccaccggcugaaccacaugggcaucugcagcugcgggcuguacaagcagcccggcgugccggucaaguggaagcgcuga

SEQ ID NO: 38273 - RNA, 1476 nt, Artificial Sequence
  derived and/or modified CDS sequence (opt1) from LASV(LM765-SLE-2012;Clade IV)__AIT17814__GPCmut11
augggccagaucgugaccuucuuccaggaggucccccacgugaucgaggaggugaugaacaucguccugaucgcccucagcauccuggccgugcugaaggggcucuacaacuucgcgaccugcggccugguggggcuggucacguuccuccugcugugcggccgcuccugcaccaccagccucuacaaggggguguacgagcugcagacccuggagcucaacauggagacgcugaacaugaccaugccgcuguccugcaccaagaacaacagccaccacuacaucauggugggcaacgagaccggccucgagcugacgcugaccaacaccuccaucaucgaccacaaguucugcaaccucagcgacgcccaccggaagaaccuguacgaccacgcccugauguccaucaucagcaccuuccaccucuccauccccaacuucaaccaguacgaggccaugagcugcgacuucaacgggggcaagaucuccguccaguacaaccugagccacuccuacgccaaggacgcggccgaccacugcgggacgguggccaacggcgugcugcagaccuucaugcgcauggccuggggcgggagcuacaucgcgcucgacuccggccgggggcgcugggacugcaucaugaccagcuaccaguaccugaucauccagaacaccacgugggaggaccacugccaguucucccggcccagccccaucggcuaccuggggcuccugucccagcgcacccgggacaucuacaucagccgccggcugcucggcaccuucaccuggacgcugagcgacuccgagggcaaggacacccccgggggcuacugccugacccgcuggaugcucaucgaggccgagcugaagugcuucgggaacaccgccgucgccaagugcaacgagaagcacgacgaggaguucugcgacaugcugcggcuguucgacuucaacaagcaggccauccagcgccugaaggcggaggcccagaugagcauccagcugaucaacaaggccgugaacgcccucaucaacgaccagcugaucaugaagaaccaccuccgggacaucaugggcauccccuacugcaacuacuccaaguacugcuaccucaaccacacgaccaccgggaagaccagccugcccaagugcugccugguguccaacggcagcuaccucaacgagacgcacuucuccgacgacaucgagcagcaggccgacaacaugaucaccgagaugcugcagaaggaguacauggagcgccagggcaagaccccgcuggggcucgucgaccuguucguguucagcaccuccuucuaccugaucagcaucuuccugcaccucgugaagaucccgacgcaccggcacaucgucggcaagcccugccccaagccccaccgccugaaccacauggggaucugcuccugcggccuguacaagcagccgggggugcccgugaaguggaagcgguga

SEQ ID NO: 38274 - RNA, 1476 nt, Artificial Sequence
  derived and/or modified CDS sequence (opt1) from LASV(LM776-SLE-2012;Clade IV)__AIT17824__GPCmut11
augggccagaucgugaccuucuuccaggaggucccccacgugaucgaggaggugaugaacaucguccugaucgcccucagcauccuggccgugcugaaggggcucuacaacuucgcgaccugcggccugguggggcuggucacguuccuccugcugugcggccgcuccugcaccaccagcguguacaaggggguguacgagcuccagacccuggagcugaacauggagacgcucaacaugaccaugccgcuguccugcaccaagaacaacagccaccacuacaucauggucggcaacgagaccggccuggagcucacgcugaccaacaccuccaucaucaaccacaaguucugcaaccugagcgacgcccacaagaagaaccucuacgaccacgcccugauguccaucaucagcaccuuccaccuguccauccccaacuucaaccaguacgaggccaugagcugcgacuucaacgggggcaagaucuccgugcaguacaaccucagccacuccuacgccggggacgcggccaaccacugcggcacgguggccaacgggguccugcagaccuucaugcggauggccuggggcggcagcuacaucgcgcuggacuccgggcacggcaagugggacugcaucaugaccagcuaccaguaccucaucauccagaacaccacgugggaggaccacugccaguucucccgccccagccccaucggguaccugggccugcucucccagcggacccgcgacaucuacaucagccggcgccugcugggcaccuucaccuggacgcucagcgacuccgaggggaaggacaccccgggcggguacugccugacccgguggaugcugaucgaggccgagcucaagugcuucggcaacaccgccguggccaagugcaacgagaagcacgacgaggaguucugcgacaugcugcgccuguucgacuucaacaagcaggccauccagcggcucaaggcggaggcccagaugagcauccagcugaucaacaaggccgugaacgcccugaucaacgaccagcucaucaugaagaaccaccuccgcgacaucauggggauccccuacugcaacuacuccaaguacugcuaccugaaccacacgaccaccggcaagaccagccugcccaagugcugccuggucuccaacggcagcuaccugaacgagacgcacuucuccgacgacaucgagcagcaggccgacaacaugaucaccgagaugcuccagaaggaguacauggagcggcaggggaagacgccccugggccugguggaccucuucguguucagcaccuccuucuaccugaucagcaucuuccugcaccuggucaagaucccgacccaccgccacaucguggggaaguccugccccaagccccaccggcucaaccacaugggcaucugcagcugcgggcuguacaagcagcccggcgugccgguccgcuggaagcgguga

SEQ ID NO: 38275 - RNA, 1476 nt, Artificial Sequence
  derived and/or modified CDS sequence (opt1) from LASV(Mad39;Clade IV)__ANH09722__GPCmut11
augggccagaucgugaccuucuuccaggaggucccccacgugaucgaggaggugaugaacaucguccugaucgcccucagcauccuggccgugcugaaggggcucuacaacguggcgaccugcggccugaucgggcuggucacguuccuccugcugugcggccgcuccugcaccaccacccucuacaaggggguguacgagcugcaggcccuggagcucaacauggagacgcugaacaugaccaugccgcugagcugcaccaagaacaacucccaccacuacauccgggugggcaacgagaccggccucgagcugacgcugaccaacaccagccucaucaaccacaaguucugcaaccuguccgacgcccacaagaagaaccuguacgaccacgcccucaugagcaucaucuccaccuuccaccugagcauccccaacuucaaccaguacgaggccauguccugcgacuucaacgacgggaagaucagcguccaguacaaccugucccacacguacgcgggcgacaccgccaaccacugcgggaccguggccaacggcgugcuccagaccuucaugcgcauggccuggggcgggagcuacaucgcgcuggacuccggccgcgggggcugggacugcaucaugacgagcuaccaguaccugaucauccagaacaccaccugggaggaccacugccaguucucccggcccagccccaucggguaccucggccugcugucccagcggacccgcgacaucuacaucagccggcgccuccugggcacguucaccuggacccuguccgacagcgaggggaaggacaccccgggcggguacugccucacgcgguggaugcugaucgaggccgagcugaagugcuucggcaacaccgccgucgccaagugcaacgagaagcacgacgaggaguucugcgacaugcuccgccuguucgacuucaacaagcaggccauccagcggcugaaggcggaggcccagaugagcauccagcucaucaacaaggccgugaacgcccugaucaacgaccagcugaucaugaagaaccaccuccgcgacaucauggggauccccuacugcaacuacuccaaguacugcuaccugaaccacaccgugaccggcaagacgagccugcccaagugcugccucgucuccaacggcagcuaccugaacgagacccacuucuccgacgacaucgagcagcaggccgacaacaugaucaccgagaugcugcagaaggaguacauggagcggcaggggaagacgccccucggccugguggaccuguucguguucagcaccuccuucuaccugaucagcaucuuccuccaccuggucaagaucccgacccaccgccacgugguggggaagcccugccccaagccccaccggcugaaccacaugggcaucugcuccugcggguucuacaagcagccgggcguccccgugcgcuggaagcgguga

SEQ ID NO: 38276 - RNA, 1476 nt, Artificial Sequence
  derived and/or modified CDS sequence (opt1) from LASV(Z0947-SLE-2011;Clade IV)__AIT17840__GPCmut11
augggccagaucgugaccuucuuccaggaggucccccacgugaucgaggaggugaugaacaucguccugaucgcccucagcauccuggccgugcugaaggggcucuacaacuucgcgaccugcggccugguggggcuggucacguuccuccugcugugcggccgcuccugcaccaucagccucuacaaggggguguacgagcugcagacccuggagcucaacauggagacccugaacaugacgaugccgcuguccugcaccaagaacaacagccaccacuacaucauggugggcaacgagaccggccucgagcugacccugacgaacaccuccaucaucaaccacaaguucugcaaccucagcgacgcccacaagaagaaccuguacgaccacgcccugauguccaucaucagcaccuuccaccucuccauccccaacuucaaccaguacgaggccaugagcugcgacuucaacgggggcaagaucuccguccaguacaaccugagccacuccuacgccggggacgcggccaaccacugcggcaccguggccaacggggugcugcagacguucaugcggauggccuggggcggcagcuacaucgcgcucgacuccgggcgcgaccggugggacugcaucaugaccagcuaccaguaccugaucauccagaacaccaccugggaggaccacugccaguucucccgccccagccccaucggcuaccuggggcuccugucccagcggacgcgcgacaucuacaucagccggcgccugcucggcaccuucaccuggacccugagcgacuccgagggcaaggacacgcccgggggcuacugccugacccgguggaugcucaucgaggccgagcugaagugcuucgggaacaccgccgucgccaagugcaacgagaagcacgacgaggaguucugcgacaugcugcgccucuucgacuucaacaagcaggccauccagcggcugaaggcggaggcccagaugagcauccagcugaucaacaaggccgugaacgcccucaucaacgaccagcugaucaugaagaaccaccuccgcgacaucaugggcauccccuacugcaacuacuccaaguacugcuaccugaaccacaccacgaccgggaagaccagccugcccaagugcugccugguguccaacggcagcuaccucaacgagacccacuucuccgacgacaucgagcagcaggccgacaacaugaucacggagaugcugcagaaggaguacauggagcggcagggcaagaccccgcuggggcucgucgaccuguucguguucagcaccuccuucuaccugaucagcaucuuccugcaccucgugaagaucccgacccaccgccacaucgucggcaagcccugccccaagccccaccggcugaaccacauggggaucugcuccugcggccuguacaagcagccgggggugcccgugaaguggaagcgcuga

SEQ ID NO: 38277 - RNA, 1476 nt, Artificial Sequence
  derived and/or modified CDS sequence (opt1) from LASV(Josiah;Clade IV)__NP_694870__GPCmut11
augggccagaucgugaccuucuuccaggaggucccccacgugaucgaggaggugaugaacaucguccugaucgcccucagcgugcuggccgugcugaaggggcucuacaacuucgcgaccugcggccuggucgggcuggugacguuccuccugcugugcggccgcuccugcaccaccagccucuacaaggggguguacgagcugcagacccuggagcucaacauggagacgcugaacaugaccaugccgcuguccugcaccaagaacaacagccaccacuacaucauggucggcaacgagaccggccucgagcugacgcugaccaacaccuccaucaucaaccacaaguucugcaaccucagcgacgcccacaagaagaaccuguacgaccacgcccugauguccaucaucagcaccuuccaccucuccauccccaacuucaaccaguacgaggccaugagcugcgacuucaacgggggcaagaucuccgugcaguacaaccugagccacuccuacgccggggacgcggccaaccacugcggcacgguggccaacgggguccugcagaccuucaugcggauggccuggggcggcagcuacaucgcgcucgacuccgggcgcggcaacugggacugcaucaugaccagcuaccaguaccugaucauccagaacaccacgugggaggaccacugccaguucucccggcccagccccaucggguaccugggccuccugucccagcgcacccgggacaucuacaucagccgccggcugcucggcaccuucaccuggacgcugagcgacuccgaggggaaggacaccccgggcggguacugccugacccgcuggaugcucaucgaggccgagcugaagugcuucggcaacaccgccguggccaagugcaacgagaagcacgacgaggaguucugcgacaugcugcggcuguucgacuucaacaagcaggccauccagcgccugaaggcggaggcccagaugagcauccagcugaucaacaaggccgugaacgcccucaucaacgaccagcugaucaugaagaaccaccuccgggacaucauggggauccccuacugcaacuacuccaaguacugcuaccucaaccacacgaccaccggccgcaccagccugcccaagugcugccuggucuccaacggcagcuaccucaacgagacgcacuucuccgacgacaucgagcagcaggccgacaacaugaucaccgagaugcugcagaaggaguacauggagcggcaggggaagacgccccugggccugguggaccucuucguguucagcaccuccuucuaccugaucagcaucuuccugcaccucgucaagaucccgacccaccgccacaucguggggaaguccugccccaagccccaccggcugaaccacaugggcaucugcagcugcgggcuguacaagcagcccggcgugccggucaaguggaagcgcuga

SEQ ID NO: 38278 - RNA, 1473 nt, Artificial Sequence
  derived and/or modified CDS sequence (opt1) from LASV(LP;Clade I)__AAF86701__GPCmut11
augggccagaucaucaccuucuuccaggaggugccccacgucaucgaggaggugaugaacaucgugcugaucgcccucagccugcuggccauccucaaggggcuguacaacaucgcgaccugcggcaucaucgggcuggucgccuuccucuuccugugcggcaaguccugcagccugacgcucaagggcggguacgagcugcagacccuggagcucaacauggagacccugaacaugaccaugccgcuguccugcacgaagaacagcucccaccacuacauccgcgugggcaacgagaccgggcucgagcugacccugaccaacacgagcaucaucaaccacaaguucugcaaccucuccgacgcccacaagaagaaccuguacgaccacgcccugaugagcaucaucuccaccuuccaccucagcauccccaacuucaaccaguacgaggccauguccugcgacuucaacggcgggaagaucagcgugcaguacaaccugucccacagcuacgcgggcgacgccgccgagcacugcgggaccgucgccaacggcgugcugcagaccuucaugcggauggcguggggcgggcgcuacaucgcccucgacuccggcaaggggaacugggacugcaucaugacgagcuaccaguaccugaucauccagaacaccaccugggaggaccacugccaguucucccggcccagccccaucggcuaccugggccuccugucccagcgcacccgggacaucuacaucagccgccggcugcucgggacguucaccuggacccugagcgacuccgagggcaacgagacccccgggggcuacugccugacgcgcuggaugcucaucgaggccgagcugaagugcuucgggaacaccgccguggccaagugcaacgagaagcacgacgaggaguucugcgacaugcugcggcuguucgacuucaacaagcaggcgauccgccggcugaaggccgaggcccagaugagcauccagcugaucaacaaggccgucaacgcccucaucaacgaccagcugaucaugaagaaccaccuccgcgacaucaugggcauccccuacugcaacuacuccaaguacugcuaccucaaccacaccagcuccggccggaccagccugcccaagugcugccugaucuccaacgggagcuaccucaacgagacgcaguucuccgacgacaucgagcagcaggcggacaacaugaucaccgagaugcugcagaaggaguacaucgagcgccagggcaagaccccgcuggggcugguggacaucuucaucuucagcaccuccuucuaccucaucagcaucuuccugcaccugaucaagaucccgacgcaccggcacaucgugggcaagcccugccccaagccccaccgccucaaccacaugggggucugcuccugcggccuguacaagcacccgggcgugcccaccaaguggaagcgguga

SEQ ID NO: 38279 - RNA, 1473 nt, Artificial Sequence
  derived and/or modified CDS sequence (opt1) from LASV(803213;Clade II)__AAF86703__GPCmut11
augggccagaucaucaccuucuuccaggaggugccccacgucaucgaggaggugaugaacaucgugcugaucgcccucagccugcuggccauccucaaggggaucuacaacgucgcgaccugcggccuguucgggcugaucuccuuccuccugcugugcggccgcagcugcuccgugacguacaaggggguguacgagcuccagacccuggagcugaacauggccaaccucaacaugaccaugccgcugagcugcaccaagaacaacucccaccacuacaucauggucggcaacgagacgggccuggagcucacccugaccaacaccagcaucaucaaccacaaguucugcaaccuguccgacgcccacaagaagaaccucuacgaccacgcccugaugagcaucaucuccacguuccaccugagcauccccaacuucaaccaguacgaggccauguccugcgacuucaacgggggcaagaucagcgugcaguacaaccucucccacagcuucgcgguggacgccgccaaccacugcgggaccaucgccaacggcguccugcagaccuucaugcggauggcguggggcggguccuacaucgcccuggacagcggcaaggggaacugggacugcaucaugaccuccuaccaguaccucaucauccagaacacgaccugggaggaccacugccaguucagccgccccucccccaucggcuaccuggggcugcucagccagcggacccgcgacaucuacaucagccggcgccugcugggcaccuucacguggacccucuccgacagcgagggcaacgaggcccccgggggcuacugccugacccgguggaugcugaucgaggccgagcucaagugcuucgggaacaccgccguggcgaagugcaacgagaagcacgacgaggaguucugcgacaugcugcgccuguucgacuucaacaagcaggccaucaagcggcucaagacggaggcccagauguccauccagcugaucaacaaggccgugaacgcccugaucaacgaccagcucaucaugaagaaccaccuccgcgacaucaugggcauccccuacugcaacuacagccgguacugcuaccugaaccacaccgucaccgggaagaccucccugccccgcugcugccuggugagcaacggcuccuaccugaacgagacgcacuucagcgacgacaucgagcagcaggcggacaacaugaucaccgagaugcuccagaaggaguacauggaccggcagggcaagaccccgcuggggcugguggaccuguucgucuucuccaccagcuucuaccucaucuccaucuuccugcaccuggugaagaucccgacgcaccgccacaucgugggcaagcccugccccaagccccaccggcucaaccacauggggaucugcagcugcggccuguacaagcacccggggguccccgugaaguggaagcgcuga

SEQ ID NO: 38280 - RNA, 1473 nt, Artificial Sequence
  derived and/or modified CDS sequence (opt1) from LASV(GA391;Clade III)__CAA36645__GPCmut11
augggccagaucgugaccuucuuccaggaggucccccacgugaucgaggaggugaugaacaucguccugaucgcccucagcauccuggccauccugaaggggcucuacaacguggcgaccugcggccugaucgggcuggugacguuccuccugcuguccggccgcagcugcucccucaucuacaaggggaccuacgagcugcagacccuggagcucaacauggagacccugaacaugacgaugccgcugagcugcaccaagaacaacucccaccacuacauccgggucggcaacgagaccggccucgagcugacccugacgaacaccagcauccucaaccacaaguucugcaaccuguccgacgcccacaagcgcaaccuguacgaccacagccucauguccaucaucagcaccuuccaccuguccauccccaacuucaaccaguacgaggccaugagcugcgacuucaacgggggcaagaucaccgugcaguacaaccugucccacagcuucgccguggacgccgcggggcacugcggcacgcucgccaacgggguccugcagaccuucaugcggauggccuggggcggcuccuacaucgcccuggacagcgggcgcggcaacugggacugcaucaugaccuccuaccaguaccucaucauccagaacaccacgugggacgaccacugccaguucagccggcccucccccaucggguaccugggccugcucagccagcgcacccgggacaucuacaucagccgccggcugcugggcaccuucaccuggacgcucuccgacagcgaggggaacgagaccccgggcggguacugccugacccgcuggaugcugaucgaggcggagcucaagugcuucggcaacaccgccguggccaagugcaacgagaagcacgacgaggaguucugcgacaugcugcggcuguucgacuucaacaagcaggccauccgccggcucaagacggaggcccagauguccauccagcugaucaacaaggcggugaacgcccugaucaacgaccagcucaucaugaagaaccaccuccgcgacaucauggggauccccuacugcaacuacagccgguacugcuaccugaaccacaccuccaccggcaagaccagccugccccgcugcugccugaucuccaacggcagcuaccugaacgagacgaaguucuccgacgacaucgagcagcaggccgacaacaugaucaccgagaugcugcagaaggaguacaucgaccggcaggggaagacgccccucggccuggucgaccuguucguguucagcaccuccuucuaccucaucagcaucuuccugcaccuggugaagaucccgacccaccgccacaucgucgggaagcccugccccaagccccaccggcucaaccacaugggcaucugcuccugcgggcuguacaagcagccgggcgugcccgugcgcuggaagcgguga

SEQ ID NO: 38281 - RNA, 1476 nt, Artificial Sequence
  derived and/or modified CDS sequence (opt1) from LASV(AV;Clade V)__CCA30314__GPCmut11
augggccagaucgugaccuucuuccaggaggucccccacgugaucgaggaggugaugaacaucguccugaucgcccucagcauccuggccgugcugaaggggcucuacaacaucgcgaccugcggccugaucgggcugaucacguuccuccugcugugcggccgcuccugcagcuccaaccucuacaaggggguguacgagcugcagagccuggaccucaacauggagacccugaacaugaccaugccgcuguccugcaccaagaacaacagccaccacuacauccgggucggcaacgacacgggccucgagcugacccugaccaacaccuccauccucaaccacaaguucugcaaccugagcgacgcccacaagaaggaccuguacgaccacgcccucauguccaucaucagcacguuccaccuguccauccccaacuucaaccaguacgaggccaugagcugcgacuucaacgggggcaagaucuccgugcaguacaaccugagccacuccuacgccaucgacgcggccaaccacugcgggaccguggccaacggcauccuccagaccuucaugcgcauggccuggggcgggagcuacaucgcgcuggacuccggccgggggaacugggacugcaucaugaccagcuaccaguaccugaucauccagaacacgaccugggagaaccacugccaguucucccgccccagccccaucggcuaccucgggcugcugagccagcggacccgcgacaucuacaucucccggcgccuccugggcaccuucacguggacccugagcgacuccgagggcaacgccacccccgggggcuacugccucacccgguggaugcugaucgaggccgagcugaagugcuucgggaacacggccgucgccaagugcaacgagaagcacgacgaggaguucugcgacaugcuccgccuguucgacuucaacaagcaggcgaucagccggcugaaguccgaggcccagaugagcauccagcucaucaacaaggccgugaacgcccugaucaacgaccagcugaucaugaagaaccaccuccgcgacaucaugggcauccccuacugcaacuacuccaaguacugcuaccugaaccacaccaucaccgggaagaccagccugcccaagugcugccucguguccaacggcagcuaccugaacgagacgcacuucuccgacgacaucgagcagcaggccgacaacaugaucaccgagaugcugcagaaggaguacauggagcggcagggcaagaccccgcuggggcucgucgaccuguucguguucagcaccuccuucuaccugaucagcaucuuccuccgccuggugaagaucccgacgcaccggcacaucgucggcaagcccugccccaagccccaccgccugaaccacauggggaucugcuccugcggccucuacaagcagccgggggugcccgugcgguggaagcgcuga

SEQ ID NO: 38282 - RNA, 1473 nt, Artificial Sequence
  derived and/or modified CDS sequence (opt1) from LASV(Togo/2016/7082;Clade VI)__AMR44577__GPCmut11
augggccagaucaucaccuucuuccaggaggugccccacgucaucgaggaggugaugaacaucgugcugaucgcccucagccugcuggccauccucaagggggucuacaacguggcgaccugcggcaucaucgggcuggugacguuccuguuccucugcggccgcuccugcagccugaucuacaagggguccuacgagcugcagacccucgagcugaacauggagacccugaacaugaccaugccgcucagcugcacgaagaacuccagccaccacuacauccgggucggcaacgagaccggccuggagcugacccucaccaacacguccaucaucaaccacaaguucugcaaccugagcgacgcccacaagcgcaaccuguacgaccacgcccucauguccauccugagcaccuuccaccuguccauccccaacuucaaccaguacgaggccaugagcugcgacuucaacgggggcaagaucuccgugcaguacaaccucagccacgccuacgcgguggacgccgccgagcacugcgggaccgucgccaacggcgugcugcagaccuucaugcggauggcguggggcggguccuacaucgcccuggacagcggccgcgggaacugggacugcaucaugacguccuaccaguaccucaucauccagaacaccaccugggaggaccacugccaguucagccggcccucccccaucggcuaccuggggcugcucagccagcgcacccgggacaucuacaucagccgccggcugcugggcacguucaccuggacccucuccgacagcgagggcaacgagacccccgggggcuacugccugacgcgcuggaugcugaucgaggccgagcucaagugcuucgggaacaccgccguggccaagugcaacgagaagcacgacgaggaguucugcgacaugcugcggcuguucgacuucaacaagcaggcgauccagcgccucaaguccgaggcccagaugagcauccagcugaucaacaaggccgucaacgcccugaucaacgaccagcucaucaugaagaaccaccuccgggacaugaugggcauccccuacugcaacuacuccaaguacugcuaccugaaccacaccagcuccgggcgcaccagccugcccaagugcugccugguguccaacggcagcuaccugaacgagacgcacuucuccgacgacaucgagcagcaggccgacaacaugaucaccgagaugcuccagaaggaguacaucgaccggcagggcaagaccccgcuggggcugguggaccuguucgucuucagcaccuccuucuaccucaucagcaucuuccugcaccugaucaagaucccgacgcaccgccacaucgugggcaagcccugccccaagccccaccggcucaaccacauggggaucugcuccugcggccuguacaagcagccgggggugcccacccgcuggaagcgguga

SEQ ID NO: 38283 - RNA, 1473 nt, Artificial Sequence
  derived and/or modified CDS sequence (opt1) from LASV(KAK-428;Clade n.d. (VII))__ANH09740__GPCmut11
augggccagaucgugaccuucuuccaggaggucccccacgugaucgaggaggugaugaacaucguccugaucgcccucagccugcuggccauccucaaggggcuguacaacuucgcgaccugcggcgugaucgggcugaucacguuccuccugcugugcggccgcuccugcagcgccaccuacaaggggcaguacgagcuccagacccuggagcugaacauggagucccucaacaugaccaugccgcugagcugcacgaagaacaacucccaccacuacauccgggccggcaacaacaccggccuggagcucacccugaccaacacgagcaucaucucccacaaguucugcaaccugagcgacgcccacaagaagaaccucuacgaccacacccugauguccaucaucaccaccuuccaccugagcauccccaacuucaaccaguacgaggccauguccugcgacuucaacgggggcaagaucagcauccaguacaaccucucccacagcuacgcgggggacgccgcccagcacugcggcacgguggccaacgggguccugcagaccuucaugcgcauggcguggggcggcuccuaccuggcccucgacagcgggcggcgcggcugggacugcaucaucuccagcuaccaguaccugaucauccagaacaccaccugggacgaccacugccaguucucccggcccagccccaucggguaccugggcuucgugagccagaagacgcgcgacaucuacaucucccggcgccuccugggcaccuucaccuggacccugagcgacuccgaggggcacgacaugccgggcggguacugccucacgcgguggaugcugaucgaggccgaccugaagugcuucggcaacaccgccguggccaagugcaacgagaagcacgacgaggaguucugcgacauguggcgccucuucgacuucaacaagcaggcgauccagcggcugaaggccgaggcccagaugaacauccagcugaucaacaaggccgucaacgcccucaucaacgaccagcugaugaugaagaaccaccuccgcgacaucauggggauccccuacugcaacuacagcaaguucugcuaccugaacaacaccaccacgggccggaccucccugccccgcugcugccugaucagcaacggcuccuaccucaacgagacccacuucagcgacgacaucgagcagcaggcggacaacaugaucaccgagaugcugcagaaggaguacauggaccggcaggggaagacgccccugggccucguggaccuguucguguucuccaccagcuucuaccugaucaccaucuuccugcaccucgucaagaucccgacccaccgccacaucguggggaagcccugccccaagccccaccggcugaaccacaugggcaucugcuccugcgggcuguacaagcagccgggcgugcccguccgcuggaagcgguga

SEQ ID NO: 38284 - RNA, 1473 nt, Artificial Sequence; identical to SEQ ID NO: 38278
  derived and/or modified CDS sequence (opt1) from LASV(Pinneo-NIG-1969;Clade I)__AIT17836__GPCmut11

SEQ ID NO: 38285 - RNA, 1473 nt, Artificial Sequence
  derived and/or modified CDS sequence (opt1) from LASV(ISTH0009-NIG-2011;Clade II)__AIT17404__GPCmut11
augggccagaucaucaccuucuuccaggaggugccccacgucaucgaggaggugaugaacaucgugcugaucgcccucagccugcuggccauccucaaggggaucuacaacgucgcgaccugcggccuguucgggcugguguccuuccuccugcugugcggccgcagcugcuccacgaccuacaaggggguguacgagcuccagacccuggagcuggacauggccagccucaacaugaccaugccgcuguccugcacgaagaacaacagccaccacuacaucauggucggcaacgagaccggccuggagcucacccugaccaacacguccaucaucaaccacaaguucugcaaccugagcgacgcccacaagaagaaccucuacgaccacgcccugauguccaucaucagcaccuuccaccuguccauccccaacuucaaccaguacgaggccaugagcugcgacuucaacgggggcaagaucuccgugcaguacaaccucagccacgcguacgccguggacgccgccaaccacugcgggaccaucgcgaacggcguccugcagaccuucaugcggauggccuggggcggguccuacaucgcccuggacagcggcaagggguccugggacugcaucaugacgagcuaccaguaccucaucauccagaacaccaccugggaggaccacugccaguucucccgccccagccccaucggcuaccuggggcugcucagccagcggacccgcgacaucuacaucucccggcgccugcugggcacguucaccuggacccucagcgacuccgagggcaacgagacccccgggggcuacugccugacgcgguggaugcugaucgaggccgagcucaagugcuucgggaacaccgccguggcgaagugcaacgagaagcacgacgaggaguucugcgacaugcugcgccuguucgacuucaacaagcaggccauccggcgccucaagaccgaggcccagaugagcauccagcugaucaacaaggccgugaacgcccugaucaacgaccagcucaucaugaagaaccaccuccgggacaucaugggcaucccguacugcaacuacuccaaguacugcuaccugaaccacaccgucacggggaagaccagccugccccgcugcugccugguguccaacggcagcuaccugaacgagacccacuucuccgacgacaucgagcagcaggcggacaacaugaucaccgagcuccugcagaaggaguacauggaccggcagggcaagacgccccuggggcugguggaccucuucgucuucagcaccuccuucuaccugaucagcaucuuccugcaccucaucaagaucccgacccaccgccacaucaccggcaagcccugccccaagccccaccggcugaaccacauggggaucugcuccugcggccuguacaagcacccgggggugcccgugaaguggaagcgcuga

SEQ ID NO: 38286 - RNA, 1473 nt, Artificial Sequence
  derived and/or modified CDS sequence (opt1) from LASV(ISTH2010-NIG-2012;Clade II)__AIT17482__GPCmut11
augggccagaucaucaccuucuuccaggaggugccccacgucaucgaggaggugaugaacaucgugcugaucgcccucagccugcuggccauccucaaggggaucuacaacgucgcgaccugcggccuguucgggcugguguccuuccuccugcugugcggccgcagcugcuccacgaccuacaaggggguguacgagcuccagacccuggagcuggacauggccagccucaacaugaccaugccgcuguccugcacgaagaacaacagccaccacuacaucauggucggcaacgagaccggccuggagcucacccugaccaacacguccaucaucaaccacaaguucugcaaccugagcgacgcccacaagaagaaccucuacgaccacgcccugauguccaucaucagcaccuuccaccuguccauccccaacuucaaccaguacgaggccaugagcugcgacuucaacgggggcaagaucuccgugcaguacaaccucagccacgcguacgccguggacgccgccaaccacugcgggaccaucgcgaacggcguccugcagaccuucaugcggauggccuggggcggguccuacaucgcccuggacagcggcaagggguccugggacugcaucaugacgagcuaccaguaccucaucauccagaacaucaccugggaggaccacugccaguucucccgccccagccccaucggcuaccuggggcugcucagccagcggacccgcgacaucuacaucucccggcgccugcugggcaccuucacguggacccucagcgacuccgagggcaacgagacccccgggggcuacugccugacccgguggaugcugaucgaggccgagcucaagugcuucgggaacacggccguggcgaagugcaacgagaagcacgacgaggaguucugcgacaugcugcgccuguucgacuucaacaagcaggccauccggcgccucaagaccgaggcccagaugagcauccagcugaucaacaaggccgugaacgcccugaucaacgaccagcucaucaugaagaaccaccuccgggacaucaugggcauccccuacugcaacuacuccaaguacugcuaccugaaccacaccgucaccgggaagacgagccugccccgcugcugccugguguccaacggcagcuaccugaacgagacccacuucuccgacgacaucgagcagcaggcggacaacaugaucaccgagcuccugcagaaggaguacaucgaccggcagggcaagaccccgcuggggcugguggaccucuucgucuucagcacguccuucuaccugaucagcaucuuccugcaccucgugaagaucccgacccaccgccacguggucggcaagcccugccccaagccccaccggcugaaccacauggggaucugcuccugcggccuguacaagcacccgggggugcccgugaaguggaagcgcuga

SEQ ID NO: 38287 - RNA, 1473 nt, Artificial Sequence
  derived and/or modified CDS sequence (opt1) from LASV(Lassa virus/H.sapiens-wt/NGA/2015/ISTH_0543;Clade II)__AVO03639__GPCmut11
augggccagaucaucaccuucuuccaggaggugccccacgucaucgaggaggugaugaacaucgugcugaucgcccucagccugcuggccauccucaaggggaucuacaacgucgcgaccugcggccuguucgggcugguguccuuccuccugcugugcggccgcagcugcuccacgaccuacaaggggguguacgagcuccagacccuggagcuggacauggccaaccucaacaugaccaugccgcugagcugcacgaagaacaacucccaccacuacaucauggucggcaacgagaccggccuggagcucacccugaccaacacgagcaucaucaaccacaaguucugcaaccuguccgacgcccacaagaagaaccucuacgaccacgcccugaugagcaucaucuccaccuuccaccugagcauccccaacuucaaccaguacgaggccauguccugcgacuucaacgggggcaagaucagcgugcaguacaaccucucccacaccuacgcgguggacgccgccaaccacugcgggaccaucgccaacggcguccugcagacguucaugcggauggcguggggcgggagcuacaucgcccuggacuccggcaaggggagcugggacugcaucaugaccuccuaccaguaccucgugauccagaacaccaccugggaggaccacugccaguucagccgccccucccccaucggcuaccuggggcugcucagccagcggacgcgcgacaucuacaucagccggcgccugcugggcaccuucaccuggacccucuccgacagcgagggcaacgagacgcccgggggcuacugccugacccgguggaugcugaucgaggccgagcucaagugcuucgggaacaccgccguggccaagugcaacgagaagcacgacgaggaguucugcgacaugcugcgccuguucgacuucaacaagcaggcgauccggcgccucaagaccgaggcccagauguccauccagcugaucaacaaggccgucaacgcccugaucaacgaccagcucaucaugaagaaccaccuccgggacaucaugggcauccccuacugcaacuacagcaaguacugcuaccugaaccacacggugaccgggaagaccucccugccccgcugcugccuggugagcaacggcuccuaccugaacgagacccacuucagcgacgacaucgagcagcaggccgacaacaugaucacggagcuccugcagaaggaguacaucgaccggcagggcaagaccccgcuggggcuggucgaccucuucguguucuccaccagcuucuaccugaucuccaucuuccugcaccucgugaagaucccgacccaccgccacaucacgggcaagcccugccccaagccccaccggcugaaccacauggggaucugcagcugcggccuguacaagcacccggggguccccgugaaguggaagcgcuga

SEQ ID NO: 38288 - RNA, 1473 nt, Artificial Sequence
  derived and/or modified CDS sequence (opt1) from LASV(Lassa virus/H.sapiens-wt/NGA/2016/ISTH_0009;Clade II)__AVO03571__GPCmut11
augggccagaucaucaccuucuuccaggaggugccccacgucaucgaggaggugaugaacaucgugcugaucgcccucagccugcuggccauccucaaggggaucuacaacgucgcgaccugcggccugcuggggcucguguccuuccugcugcucugcggccgcagcugcuccacgaccuacaaggggguguacgagcugcagacccuggagcucgacauggccagccugaacaugaccaugccgcuguccugcacgaagaacaacagccaccacuacaucauggucggcaacgagaccggccucgagcugacccugaccaacacguccaucaucaaccacaaguucugcaaccucagcgacgcccacaagaagaaccuguacgaccacgcccugauguccaucaucagcaccuuccaccucuccauccccaacuucaaccaguacgaggccaugagcugcgacuucaacgggggccggaucuccgugcaguacaaccugagccacuccuacgcgguggacgccgccaaccacugcgggaccaucgccaacggcguccugcagaccuucaugcgcauggcguggggcgggagcuacaucgcccucgacuccggcaaggggagcugggacugcaucaugacguccuaccaguaccugaucauccagaacaccaccugggaggaccacugccaguucagccggcccagccccaucggcuaccuggggcuccugucccagcgcacccgggacaucuacaucagccgccggcugcucggcacguucaccuggacccuguccgacagcgagggcaacgagacccccgggggcuacugccugacgcgcuggaugcucaucgaggccgagcugaagugcuucgggaacaccgccguggccaagugcaacgagaagcacgacgaggaguucugcgacaugcugcggcuguucgacuucaacaagcaggcgauccgccggcugaagaccgaggcccagauguccauccagcugaucaacaaggccgugaacgcccucaucaacgaccagcugaucaugaagaaccaccuccgcgacaucaugggcaucccguacugcaacuacagcaaguacugcuaccucaaccacaccgucacggggaagaccucccugccccggugcugccuggugagcaacggcuccuaccucaacgagacccacuucagcgacgacaucgagcagcaggccgacaacaugaucaccgagcugcugcagaaggaguacaucgaccgccagggcaagacgccccuggggcucguggaccuguucgucuucuccaccagcuucuaccugaucuccaucuuccuccaccuggugaagaucccgacccaccggcacaucaccggcaagcccugccccaagccccaccgccugaaccacauggggaucugcagcugcggccucuacaaccacccgggggugcccgucaaguggaagcgguga

SEQ ID NO: 38289 - RNA, 1473 nt, Artificial Sequence
  derived and/or modified CDS sequence (opt1) from LASV(Lassa virus/H.sapiens-wt/NGA/2016/ISTH_0017;Clade II)__AVO03567__GPCmut11
augggccagaucaucaccuucuuccaggaggugccccacgucaucgaggaggugaugaacaucgugcugaucgcccucagccugcuggccauccucaaggggaucuacaacgucgcgaccugcggccuguucgggcugguguccuuccuccugcugugcggccgcagcugcuccacgaccuacaaggggguguacgagcuccagacccuggagcuggacauggccagccucaacaugaccaugccgcuguccugcacgaagaacaacagccaccacuacaucauggucggcaacgagaccggccuggagcucacccugaccaacacguccaucaucaaccacaaguucugcaaccugagcgacgcccacaagaagaaccucuacgaccacgcccugauguccaucaucagcaccuuccaccuguccauccccaacuucaaccaguacgaggccaugagcugcgacuucaacgggggcaagaucuccgugcaguacaaccucagccacaccuacgcgaucgacgccgccaaccacugcgggaccaucgccaacggcgugcugcagacguucaugcggauggcguggggcggguccuacaucgcccuggacagcggcaagggguccugggacugcaucaugaccagcuaccaguaccucaucauccagaacaccaccugggaggaccacugccaguucucccgccccagccccaucggcuaccuggggcugcucagccagcggacgcgcgacaucuacaucucccggcgccugcugggcaccuucaccuggacccucagcgacuccgagggcaacgagacgcccgggggcuacugccugacccgguggaugcugaucgaggccgagcucaagugcuucgggaacaccgccgucgccaagugcaacgagaagcacgacgaggaguucugcgacaugcugcgccuguucgacuucaacaagcaggcgauccggcgccucaagaccgaggcccagaugagcauccagcugaucaacaaggccgugaacgcccugaucaacgaccagcucaucaugaagaaccaccuccgggacaucaugggcauccccuacugcaacuacuccaaguacugcuaccugaaccacacggugaccgggaagaccagccugccccgcugcugccuggucuccaacggcagcuaccugaacgagacccacuucuccgacgacaucgagcagcaggccgacaacaugaucacggagcuccugcagaaggaguacauggaccggcagggcaagaccccgcuggggcugguggaccucuucguguucagcaccuccuucuaccugaucagcaucuuccugcaccucguccgcaucccgacccaccggcacgugaucggcaagcccugccccaagccccaccgccugaaccacauggggaucugcuccugcggccuguacaagcacccgggggugcccgucaaguggaagcgguga

SEQ ID NO: 38290 - RNA, 1473 nt, Artificial Sequence
  derived and/or modified CDS sequence (opt1) from LASV(Lassa virus/H.sapiens-wt/NGA/2018/ISTH_0959;Clade II)__AVV65099__GPCmut11
augggccagaucaucaccuucuuccaggaggugccccacgucaucgaggaggugaugaacaucgugcugaucgcccucagccugcuggccauccucaaggggaucuacaacgucgugaccugcggccuguucgggcugguguccuuccuccugcugugcggccgcagcugcuccacgaccuacaagggggucuacgagcuccagacccuggagcuggacauggcgagccucaacaugaccaugccgcuguccugcacgaagaacaacagccaccacuacaucauggugggcaacgagaccggccuggagcucacccugaccaacacguccaucaucaaccacaaguucugcaaccugagcgacgcccacaagaagaaccucuacgaccacgcccugauguccaucaucagcaccuuccaccuguccauccccaacuucaaccaguacgaggccaugagcugcgacuucaacgggggcaagaucuccgugcaguacaaccucagccacgccuacgcgaucgacgccgccaaccacugcgggaccaucgccaacggcguccugcagaccuucaugcggauggcguggggcggguccuacaucgcccuggacagcggcaagggguccugggacugcaucaugacgagcuaccaguaccucaucauccagaacaccaccugggaggaccacugccaguucucccgccccagccccaucggcuaccuggggcugcucagccagcggacccgcgacaucuacaucucccggcgccugcugggcacguucaccuggacccucagcgacuccgagggcaacgagacccccgggggcuacugccugacgcgguggaugcugaucgaggccgagcucaagugcuucgggaacaccgccguggccaagugcaacgagaagcacgacgaggaguucugcgacaugcugcgccuguucgacuucaacaagcaggcgauccggcgccucaagaccgaggcccagaugagcauccagcugaucaacaaggccgugaacgcccugaucaacgaccagcucaucaugaagaaccaccuccgggacaucaugggcaucccguacugcaacuacuccaaguacugcuaccugaaccacaccgucacggggaagaccagccugccccgcugcugccugguguccaacggcagcuaccugaacgagacccacuucuccgacgacaucgagcagcaggccgacaacaugaucaccgagcuccugcagaaggaguacaucgaccggcagggcaagacgccccuggggcugguggaccucuucgucuucagcaccuccuucuaccugaucagcaucuuccugcaccucgugaagaucccgacccaccgccacgugaucggcaagcccugccccaagccccaccggcugaaccacauggggaucugcuccugcggccuguacaagcacccggggguccccgugaaguggaagcgcuga

SEQ ID NO: 38291 - RNA, 1473 nt, Artificial Sequence
  derived and/or modified CDS sequence (opt1) from LASV(LASV003-NIG-2008;Clade II)__AIT17580__GPCmut11
augggccagaucaucaccuucuuccaggaggugccccacgucaucgaggaggugaugaacaucgugcugaucgcccucagccugcuggccauccucaaggggaucuacaacgucgcgaccugcggccuguucgggcugguguccuuccuccugcugugcggccgcagcugcuccacgaccuacaaggggguguacgagcuccagacccuggagcuggacauggccagccucaacaugaccaugccgcuguccugcacgaagaacaacagccaccacuacaucauggucggcaacgagaccggccuggagcucacccugaccaacacguccaucaucaaccacaaguucugcaaccugagcgacgcccacaagaagaaccucuacgaccacgcccugauguccaucaucagcaccuuccaccuguccauccccaacuucaaccaguacgaggccaugagcugcgacuucaacgggggcaagaucuccgugcaguacaaccucagccacaccuacgcgguggacgccgccaaccacugcgggaccaucgccaacggcguccugcagacguucaugcggauggcguggggcggguccuacaucgcccuggacagcggcaagggguccugggacugcaucaugaccagcuaccaguaccucaucauccagaacaccaccugggaggaccacugccaguucucccgccccagccccaucggcuaccuggggcugcucagccagcggacgcgcgacaucuacaucucccggcgccugcugggcaccuucaccuggacccucagcgacuccgagagcaacgagacgccgggcggguacugccugacccgguggaugcugaucgaggccgagcucaagugcuucggcaacaccgccguggccaagugcaacgagaagcacgacgaggaguucugcgacaugcugcgccuguucgacuucaacaagcaggcgauccggcgccucaaggccgaggcccagauguccauccagcugaucaacaaggccgugaacgcccugaucaacgaccagcucaucaugaagaaccaccuccgggacaucauggggauccccuacugcaacuacagcaaguacugcuaccugaaccacaccgucacgggccgcaccucccugccccggugcugccuggugagcaacggguccuaccugaacgagacccacuucagcgacgacaucgagcagcaggcggacaacaugaucaccgagcuccugcagaaggaguacauggaccgccagggcaagacgccccugggccugguggaccucuucgucuucuccaccagcuucuaccugaucuccaucuuccugcaccucgugaagaucccgacccaccggcacgugaucgggaagcccugccccaagccccaccgccugaaccacaugggcaucugcagcugcgggcuguacaagcacccgggcguccccgugaaguggaagcgguga

SEQ ID NO: 38292 - RNA, 1473 nt, Artificial Sequence
  derived and/or modified CDS sequence (opt1) from LASV(LASV035-NIG-2009;Clade II)__AIT17588__GPCmut11
augggccagaucaucaccuucuuccaggaggugccccacgucaucgaggaggugaugaacaucgugcugaucgcccucagccugcuggccauccucaaggggaucuacaacgucgcgaccugcggccuguucgggcugguguccuuccuccugcugugcggccgcagcugcuccacgaccuacaaggggguguacgagcuccagacccuggagcuggacauggccagccucaacaugaccaugccgcuguccugcacgaagaacaacagccaccacuacaucauggucggcaacgagaccggccuggagcucacccugaccaacacguccaucaucaaccacaaguucugcaaccugagcgacgcccacaagaagaaccucuacgaccacgcccugauguccaucaucagcaccuuccaccuguccauccccaacuucaaccaguacgaggccaugagcugcgacuucaacgggggcaagaucuccgugcaguacaaccucagccacgcguacgccguggacgccgccaaccacugcgggaccaucgcgaacggcguccugcagaccuucaugcggauggccuggggcggguccuacaucgcccuggacagcggcaagggguccugggacugcaucaugacgagcuaccaguaccucaucauccagaacaccaccugggaggaccacugccaguucucccgccccagccccaucggcuaccuggggcugcucagccagcggacccgcgacaucuacaucucccggcgccugcugggcacguucaccuggacccucagcgacuccgagggcaacgagacccccgggggcuacugccugacgcgguggaugcugaucgaggccgagcucaagugcuucgggaacaccgccguggcgaagugcaacgagaagcacgacgaggaguucugcgacaugcugcgccuguucgacuucaacaagcaggccauccggcgccucaaggccgaggcccagaugagcauccagcugaucaacaaggccgugaacgcgcugaucaacgaccagcucaucaugaagaaccaccuccgggacaucaugggcauccccuacugcaacuacuccaaguacugcuaccugaaccacaccgucaccgggaagacgagccugccccgcugcugccugguguccaacggcagcuaccugaacgagacccacuucuccgacgacaucgagcagcaggccgacaacaugaucaccgagcuccugcagaaggaguacaucgaccggcagggcaagaccccgcuggggcugguggaccucuucgucuucagcacguccuucuaccugaucagcaucuuccugcaccucgugaagaucccgacccaccgccacgugaucggcaagcccugccccaagccccaccggcugaaccacauggggaucugcuccugcggccuguacaagcacccggggguccccgugaaguggaagcgcuga

SEQ ID NO: 38293 - RNA, 1473 nt, Artificial Sequence
  derived and/or modified CDS sequence (opt1) from LASV(LASV1000-NIG-2009;Clade II)__AIT17782__GPCmut11
augggccagaucaucaccuucuuccaggaggugccccacgucaucgaggaggugaugaacaucgugcugaucgcccucagccugcuggccauccucaaggggaucuacaacgucgcgaccugcggccuguucgggcugguguccuuccuccugcugugcggccgcagcugcuccacgaccuacaaggggguguacgagcuccagacccuggagcuggacauggccagccucaacaugaccaugccgcuguccugcacgaagaacaacagccaccacuacaucauggucggcaacgagaccggccuggagcucacccugaccaacacguccaucaucaaccacaaguucugcaaccugagcgacgcccacaagaagaaccucuacgaccacgcccugauguccaucaucagcaccuuccaccuguccauccccaacuucaaccaguacgaggccaugagcugcgacuucaacgggggcaagaucuccgugcaguacaaccucagccacaccuacgcgguggacgccgccaaccacugcgggaccaucgccaacggcguccugcagacguucaugcggauggcguggggcggguccuacaucgcccuggacagcggcaagggguccugggacugcaucaugaccagcuaccaguaccucaucauccagaacaccaccugggaggaccacugccaguucucccgccccagccccaucggcuaccuggggcugcucagccagcggacgcgcgacaucuacaucucccggcgccugcugggcaccuucaccuggacccucagcgacuccgagggcaacgagacgcccgggggcuacugccugacccgguggaugcugaucgaggccgagcucaagugcuucgggaacaccgccguggccaagugcaacgagaagcacgacgaggaguucugcgacaugcugcgccuguucgacuucaacaagcaggcgaucaagcggcucaagaccgaggcccagaugagcauccagcugaucaacaaggccgugaacgcccugaucaacgaccagcucaucaugaagaaccaccuccgcgacaucaugggcauccccuacugcaacuacuccaaguacugcuaccugaaccacacggucaccgggaagaccagccugccccggugcugccugguguccaacggcagcuaccugaacgagacccacuucuccgacgacaucgagcagcaggccgacaacaugaucacggagcuccugcagaaggaguacaucgaccgccagggcaagaccccgcuggggcugguggaccucuucgucuucagcaccuccuucuaccugaucagcaucuuccugcaccucgugaagaucccgacccaccggcacguggucggcaagcccugccccaagccccaccgccugaaccacauggggaucugcuccugcggccuguacaagcacccgggggugcccgugaaguggaagcgguga

SEQ ID NO: 38294 - RNA, 1473 nt, Artificial Sequence
  derived and/or modified CDS sequence (opt1) from LASV(LASV221-NIG-2010;Clade II)__AIT17624__GPCmut11
augggccagaucaucaccuucuuccaggaggugccccacgucaucgaggaggugaugaacaucgugcugaucgcccucagccugcuggccauccucaaggggaucuacaacgucgcgaccugcggccuguucgggcugguguccuuccuccugcugugcggccgcagcugcuccacgaccuacaaggggguguacgagcuccagacccuggagcuggacauggccagccucaacaugaccaugccgcuguccugcacgaagaacaacagccaccacuacaucauggucggcaacgagaccggccuggagcucacccugaccaacacguccaucaucaaccacaaguucugcaaccugagcgacgcccacaagaagaaccucuacgaccacgcccugauguccaucaucagcaccuuccaccuguccauccccaacuucaaccaguacgaggccaugagcugcgacuucaacgggggcaagaucuccgugcaguacaaccucagccacaccuacgcgaucgacgccgccaaccacugcgggaccaucgccaacggcgugcugcagacguucaugcggauggcguggggcggguccuacaucgcccuggacagcggcaagggguccugggacugcaucaugaccagcuaccaguaccucaucauccagaacaccaccugggaggaccacugccaguucucccgccccagccccaucggcuaccuggggcugcucagccagcggacgcgcgacaucuacaucucccggcgccugcugggcaccuucaccuggacccucagcgacuccgagggcaacgagacgcccgggggcuacugccugacccgguggaugcugaucgaggccgagcucaagugcuucgggaacaccgccgucgccaagugcaacgagaagcacgacgaggaguucugcgacaugcugcgccuguucgacuucaacaagcaggcgauccggcgccucaagaccgaggcccagaugagcauccagcugaucaacaaggccgugaacgcccugaucaacgaccagcucaucaugaagaaccaccuccgggacaucaugggcauccccuacugcaacuacuccaaguacugcuaccugaaccacacggugaccgggaagaccagccugccccgcugcugccuggucuccaacggcagcuaccugaacgagacccacuucuccgacgacaucgagcagcaggccgacaacaugaucacggagaugcuccagaaggaguacauggaccggcagggcaagaccccgcuggggcugguggaccuguucguguucagcaccuccuucuaccucaucagcaucuuccugcaccuggucaagaucccgacccaccgccacgugaucggcaagcccugccccaagccccaccggcucaaccacauggggaucugcuccugcggccuguacaagcacccgggggugcccgucaaguggaagcgcuga

SEQ ID NO: 38295 - RNA, 1473 nt, Artificial Sequence
  derived and/or modified CDS sequence (opt1) from LASV(LASV237-NIG-2010;Clade II)__AIT17638__GPCmut11
augggccagaucaucaccuucuuccaggaggugccccacgucaucgaggaggugaugaacaucgugcugaucgcccucagccugcuggccauccucaaggggaucuacaacgucgcgaccugcggccuguucgggcugguguccuuccuccugcugugcggccgcagcugcuccacgaccuacaaggggguguacgagcuccagacccuggagcuggacauggccagccucaacaugaccaugccgcuguccugcacgaagaacaacagccaccacuacaucauggucggcaacgagaccggccuggagcucacccugaccaacacguccaucaucaaccacaaguucugcaaccugagcgacgcccacaagaaggaccucuacgaccacgcccugauguccaucaucagcaccuuccaccuguccauccccaacuucaaccaguacgaggccaugagcugcgacuucaacgggggcaagaucuccgugcaguacaaccucagccacaccuacgcgguggacgccgccaaccacugcgggaccaucgccaacggcguccugcagacguucaugcggauggcguggggcggguccuacaucgcccuggacagcggcaagggguccugggacugcaucaugaccagcuaccaguaccucaucauccagaacaccaccugggaggaccacugccaguucucccgccccagccccaucggcuaccuggggcugcucagccagcggacgcgcgacaucuacaucucccggcgccugcugggcaccuucaccuggacccucagcgacuccgagggcaacgagacgcccgggggcuacugccugacccgguggaugcugaucgaggccgagcucaagugcuucgggaacaccgccguggccaagugcaacgagaagcacgacgaggaguucugcgacaugcugcgccuguucgacuucaacaagcaggcgauccggcgccucaagaccgaggcccagaugagcauccagcugaucaacaaggccgugaacgcccugaucaacgaccagcucaucaugaagaaccaccuccgggacaucaugggcauccccuacugcaacuacuccaaguacugcuaccugaaccacacggucaccgggaagaccagccugccccgcugcugccugguguccaacggcagcuaccugaacgagacccacuucuccgacgacaucgagcagcaggccgacaacaugaucacggagcuccugcagaaggaguacauggaccggcagggcaagaccccgcuggggcugguggaccucuucgucuucagcaccuccuucuaccugaucagcaucuuccugcaccucaucaagaucccgacccaccgccacaucacgggcaagcccugccccaagccccaccggcugaaccacauggggaucugcuccugcggccuguacaagcacccgggggugcccgugaaguggaagcgcuga

SEQ ID NO: 38296 - RNA, 1473 nt, Artificial Sequence
  derived and/or modified CDS sequence (opt1) from LASV(LASV253-NIG-2011;Clade II)__AIT17670__GPCmut11
augggccagaucaucaccuucuuccaggaggugccccacgucaucgaggaggugaugaacaucgugcugaucgcccucagccugcuggccauccucaaggggaucuacaacgucgcgaccugcggccuguucgggcugguguccuuccuccugcugugcggccgcagcugcuccacgaccuacaaggggguguacgagcuccagacccuggagcuggacauggccagccucaacaugaccaugccgcuguccugcacgaagaacaacagccaccacuacaucauggucggcaacgagaccggccuggagcucacccugaccaacacguccaucaucaaccacaaguucugcaaccugagcgacgcccacaagaagaaccucuacgaccacgcccugauguccaucaucagcaccuuccaccuguccauccccaacuucaaccaguacgaggccaugagcugcgacuucaacgggggcaagaucuccgugcaguacaaccucagccacaccuacgcgguggacgccgccaaccacugcgggaccaucgccaacggcguccugcagacguucaugcggauggcguggggcggguccuacaucgcccuggacagcggcaagggguccugggacugcaucaugaccagcuaccaguaccucaucauccagaacaccaccugggaggaccacugccaguucucccgccccagccccaucggcuaccuggggcugcucagccagcggacgcgcgacaucuacaucucccggcgccugcugggcaccuucaccuggacccucagcgacuccgagggcaacgagacgcccgggggcuacugccugacccgguggaugcugaucgaggccgagcucaagugcuucgggaacaccgccguggccaagugcaacgagaagcacgacgaggaguucugcgacaugcugcgccuguucgacuucaacaagcaggcgauccggcgccucaaggccgaggcccagaugagcauccagcugaucaacaaggccgugaacgcccugaucaacgaccagcucaucaugaagaaccaccuccgggacaucaugggcaucccguacugcaacuacuccaaguacugcuaccugaaccacaccgucacggggcgcaccagccugccccggugcugccugguguccaacggcagcuaccugaacgagacccacuucuccgacgacaucgagcagcaggcggacaacaugaucaccgagcuccugcagaaggaguacaucgaccgccagggcaagacgccccuggggcugguggaccucuucgucuucagcaccuccuucuaccugaucagcaucuuccugcaccucgugaagaucccgacccaccggcacaucaucggcaagcccugccccaagccccaccgccugaaccacauggggaucugcuccugcggccuguacaagcacccgggggugcccgucaaguggaagcgguga

SEQ ID NO: 38297 - RNA, 1473 nt, Artificial Sequence
  derived and/or modified CDS sequence (opt1) from LASV(LASV254-NIG-2011;Clade II)__AIT17674__GPCmut11
augggccagaucaucaccuucuuccaggaggugccccacgucaucgaggaggugaugaacaucgugcugaucgcccucagccugcuggccauccucaaggggaucuacaacgucgcgaccugcggccuguucgggcugguguccuuccuccugcugugcggccgcagcugcuccacgaccuacaaggggguguacgagcuccagacccuggagcuggacaugaccaaccucaacaugacgaugccgcugagcugcaccaagaacaacucccaccacuacaucauggucggcaacgagaccggccuggagcucacccugacgaacaccagcaucaucaaccacaaguucugcaaccuguccgacgcccacaagaagaaccucuacaaccacgcccugaugagcaucaucuccaccuuccaccugagcauccccaacuucaaccaguacgaggccauguccugcgacuucaacgggggcaagaucagcgugcaguacaaccucucccacagcuacgccguggacgcggccaaccacugcgggaccaucgccaacggcguccugcagacguucaugcggauggccuggggcggguccuacaucgcgcuggacagcggcaaggggaacugggacugcaucaugaccuccuaccaguaccucaucauccagaacaccaccugggaggaccacugccaguucagccgccccucccccaucggcuaccuggggcugcucagccagcggacgcgcgacaucuacaucagccggcgccugcugggcaccuucaccuggacccucuccgacagcgagggcaacgagacgcccgggggcuacugccugacccgguggaugcugaucgaggccgagcucaagugcuucgggaacaccgccguggccaagugcaacgagaagcacgacgaggaguucugcgacaugcugcgccuguucgacuucaacaagcaggccauccggcgccucaagaccgaggcgcaggccaacauccagcugaucaacaaggccgugaacgcccugaucaacgaccagcucaucaugaagaaccaccuccgggacaucaugggcauccccuacugcaacuacuccaaguacugcuaccugaaccacacggucaccgggaagaccagccugccccgcugcugccugguguccaacggcagcuaccugaacgagacccacuucuccgacgacaucgagcagcaggccgacaacaugaucacggagcuccugcagaaggaguacauggaccggcagggcaagaccccgcuggggcugguggaccucuucgucuucagcaccuccuucuaccugaucagcaucuuccugcaccucgugaagaucccgacccaccgccacgugaucggcaagcccugccccaagccccaccggcugaaccacauggggaucugcuccugcggccuguacaagcacccggggguccccgugaaguggaagcgcuga

SEQ ID NO: 38298 - RNA, 1473 nt, Artificial Sequence
  derived and/or modified CDS sequence (opt1) from LASV(Nig08-A19;Clade III)__ADU56618__GPCmut11
augggccagaucgugaccuucuuccaggaggucccccacgugaucgaggaggugaugaacaucguccugaucgcccucagcauccuggccauccugaaggggcucuacaacaucgcgaccugcggccugaucgggcuggugacguuccuccugcuguccggccgcagcugcuccaugaccuacaaggggguguacgagcuccagacccuggagcugaacaugaacacccucaacaugacgaugccgcugagcugcaccaagaacaacucccaccacuacaucauggucggcaacgagaccggccuggagcucacccugacgaacaccagccugcuccaccacaaguucugcaaccuguccgacgcccacaagaagaaccuguacgaccacacccucaugagcaucaucuccaccuuccaccugagcauccccaacuucaaccaguacgaggccauguccugcgacuucaacgggggcaagaucacggugcaguacaaccugagccacuccuacgccaucgacgccgcgaaccacugcgggaccguggccaacggcguccuccagaccuucaugcggauggccuggggcgggagcuacaucgcccuggacuccggccgcgggaagugggacugcaucaugaccagcuaccaguaccugaucauccagaacacgaccugggaggaccacugccaguucucccggcccagccccaucggcuaccucgggcugcugucccagcgcacccgggacaucuacaucagccgccggcuccugggcaccuucacguggacccugagcgacuccgagggcaacgagacccccgggggcuacugccucacccgcuggaugcugaucgaggcggagcugaagugcuucgggaacacggccguggccaagugcaacgagaagcacgacgaggaguucugcgacaugcuccggcuguucgacuucaacaagcaggccauccgccggcugaaggccgaggcgcagaugagcauccagcucaucaacaaggccgugaacgcccugaucaacgaccagcugaucaugaagaaccaccuccgcgacaucaugggcauccccuacugcaacuacuccaaguacugcuaccugaaccacaccagcaccgggcggaccucccugccccgcugcugccucgucagcaacggcuccuaccugaacgagacgcacuucagcgacgacaucgagcagcaggccgacaacaugaucaccgagaugcugcagaaggaguaccuggaccggcagggcaagaccccgcucgggcugguggaccuguucguguucuccaccagcuucuaccucaucuccaucuuccugcaccuggucaagaucccgacgcaccgccacaucgugggcaagcccugccccaagccccaccggcucaaccacauggggaucugcagcugcggccuguacaagcagccgggggugcccguccgcuggaagcgguga

SEQ ID NO: 38299 - RNA, 1476 nt, Artificial Sequence
  derived and/or modified CDS sequence (opt1) from LASV(G1180-SLE-2010;Clade IV)__AIT17168__GPCmut11
augggccagaucgugaccuucuuccaggaggucccccacgugaucgaggaggugaugaacaucguccugaucgcccucagcauccuggccgugcugaaggggcucuacaacuucgcgaccugcggccugguggggcugcucaccuuccugcugcucugcggccgcuccugcaccgccagccgguacaagggggucuacgagcugcagacccuggagcucaacauggagacccugaacaugacgaugccgcuguccugcaccaagaacaacagccaccacuacaucauggugggcaacgagaccggccucgagcugacccugacgaacaccuccaucaucaaccacaaguucugcaaccucagcgacgcccacaagaagaaccuguacgaccacgcccugauguccaucaucagcaccuuccaccucuccauccccaacuucaaccaguacgaggccaugagcugcgacuucaacgggggcaagaucuccgugcaguacaaccugagccacuccuacgcgggggacgccgccaaccacugcggcaccgucgccaacggggugcugcagacguucaugcgcauggcguggggcggcagcuacaucgcccucgacuccgggcacggcagcugggacugcaucaugaccuccuaccaguaccugaucauccagaacaccaccugggaggaccacugccaguucagccggcccucccccaucggguaccugggccuccugagccagcgcacgcgggacaucuacaucagccgccggcugcucggcaccuucaccuggacccuguccgacagcgaggggaaggacacgccgggcggguacugccugacccgcuggaugcucaucgaggccgagcugaagugcuucggcaacaccgccguggccaagugcaacgagaagcacgacgaggaguucugcgacaugcugcggcuguucgacuucaacaagcaggcgauccagcgccugaaggccgaggcccagauguccauccagcugaucaacaaggccgucaacgcccucaucaacgaccagcugaucaugaagaaccaccuccgggacaucauggggauccccuacugcaacuacagcaaguacugcuaccucaaccacaccacgaccggcaagaccucccugcccaagugcugccuggugagcaacggcuccuaccucaacgagacccacuucagcgacgacaucgagcagcaggcggacaacaugaucacggagaugcugcagaaggaguacauggagcgccaggggaagacgccccugggccugguggaccucuucgucuucuccaccagcuucuaccugaucuccaucuuccugcaccucgugaagaucccgacccaccggcacaucgugggcaagagcugccccaagccccaccgccugaaccacauggggaucugcuccugcgggcuguacaagcagcccggcgucccggugaaguggaagcgguga

SEQ ID NO: 38300 - RNA, 1476 nt, Artificial Sequence
  derived and/or modified CDS sequence (opt1) from LASV(G1442-SLE-2011;Clade IV)__AIT17180__GPCmut11
augggccagaucgugaccuucuuccaggaggucccccacgugaucgaggaggugaugaacaucguccugaucgcccucagcauccuggccgugcugaaggggcucuacaacguggcgaccugcggccugaucgggcuggucacguuccuccugcugugcggccgcuccugcaccaccacccucuacaaggggguguacgagcugcagacgcuggagcucaacauggagacccugaacaugaccaugccgcugagcugcaccaagaacaacucccaccacuacauccgggugggcaacgagacgggccucgagcugacccugaccaacaccagcaucaucaaccacaaguucugcaaccucuccgacgcccacaagaagaaccuguacgaccacgcccugaugagcaucaucuccacguuccaccucagcauccccaacuucaaccaguacgaggccauguccugcgacuucaacgggggcaagaucagcguccaguacaaccugucccacagcuacgccggggacgcggccaaccacugcggcaccguggccaacggggugcugcagaccuucaugcgcauggccuggggcggcuccuacaucgcgcucgacagcgggcggggcaacugggacugcaucaugaccuccuaccaguaccugaucauccagaacacgaccugggacgaccacugccaguucagccgccccucccccaucggguaccugggccuccugagccagcggacccgcgacgucuacaucucccggcgccugcucggcaccuucacguggacccugagcgacagcgaggggaaggacaccccgggcggguacugccugacccgguggaugcucaucgaggccgagcugaagugcuucggcaacacggccguggccaagugcaacgagaagcacgacgaggaguucugcgacaugcugcgccucuucgacuucaacaagcaggccauccagcggcugaaggcggaggcccagauguccauccagcugaucaacaaggccgugaacgcccucaucaacgaccagcugaucaugaagaaccaccuccgcgacaucauggggauccccuacugcaacuacagcaaguacugcuaccugaacaacaccgccaccggcaagaccucccugcccaagugcugccugaucagcaacggcuccuaccucaacgagacgcacuucagcgacgacaucgagcaggaggcggacaacaugaucaccgagaugcugcagaaggaguacauggagcggcaggggaagacgccccugggccuggucgaccucuucguguucuccaccagcuucuaccugaucuccaucuuccugcaccucgugaagaucccgacccaccgccacaucgucggcaagagcugccccaagccccaccggcugaaccacauggggaucugcuccugcgggcuguacaagcagcccggcgugccggugcgcuggaagcgguga

SEQ ID NO: 38301 - RNA, 1476 nt, Artificial Sequence
  derived and/or modified CDS sequence (opt1) from LASV(G3010-SLE-2013;Clade IV)__AIT17344__GPCmut11
augggccagaucgugaccuucuuccaggaggucccccacgugaucgaggaggugaugaacaucguccugaucgcccucagcauccuggccgugcugaaggggcucuacaacuucgcgaccugcggccugguggggcuggucacguuccuccugcugugcggccgcuccugcaccaccagccucuacaaggggguguacgagcugcagacccuggagcucaacauggagacgcugaacaugaccaugccgcuguccugcaccaagaacaacagccaccacuacaucauggugggcaacgagaccggccucgagcugacgcugaccaacaccuccaucaucaaccacaaguucugcaaccucagcgacgcccacaagaagaaccuguacaaccacgcccugauguccaucaucagcaccuuccaccucuccauccccaacuucaaccaguacgaggccaugagcugcgacuucaacgggggcaagaucuccguccaguacaaccugagccacuccuacgccggggacgcggccagccacugcggcacgguggccaacggggugcugcagaccuucaugcggauggccuggggcggcuccuacaucgcgcucgacagcggguacggcaagugggacugcaucaugaccuccuaccaguaccugaucauccagaacaccacgugggaggaccacugccaguucagccgccccucccccaucggguaccugggccuccugagccagcggacccgcgacaucuacaucagccggcgccugcucggcaccuucaccuggacgcuguccgacagcgaggggaaggacaccccgggcggguacugccugacccgguggaugcucaucgaggccgagcugaagugcuucggcaacaccgccgucgccaagugcaacgagaagcacgacgaggaguucugcgacaugcugcgccucuucgacuucaacaagcaggccauccagcggcugaagacggaggcgcagauguccauccagcugaucaacaaggccgugaacgcccucaucaacgaccagcugaucaugaagaaccaccuccgcgacaucauggggauccccuacugcaacuacagcaaguacugcuaccugaaccacaccaccaccggcaagacgucccugcccaagugcugccuggugagcaacggcuccuaccucaacgagacccacuucagcgacgacaucgagcagcaggccgacaacaugaucaccgagaugcugcagaaggaguacauggagcggcaggggaagacgccccugggccuggucgaccucuucguguucuccaccagcuucuaccugaucuccaucuuccugcaccucgugaagaucccgacccaccgccacaucgucggcaagagcugccccaagccccaccggcugaaccacauggggaucugcuccugcgggcuguacaagcagcccggcgugccggugcgcuggaagcgguga

SEQ ID NO: 38302 - RNA, 1476 nt, Artificial Sequence
  derived and/or modified CDS sequence (opt1) from LASV(G502-SLE-2009;Clade IV)__AIT17126__GPCmut11
augggccagaucgugaccuucuuccaggaggucccccacgugaucgaggaggugaugaacaucguccugaucgcccucagcauccuggccgugcugaaggggcucuacaacuucgcgaccugcggccugguggggcugcucacguuccugcugcucugcggccgcuccugcaccaccgggcuguacaagggcgucuacgagcugcagacccucgagcugaacauggagacgcugaacaugaccaugccgcucagcugcaccaagaacaacucccaccacuacaucauggugggcaacgagaccgggcuggagcugacgcucaccaacaccagcaucaucaaccacaaguucugcaaccuguccgacgcccacaagaagaaccuguacgaccacgcccucaugagcaucaucuccaccuuccaccugagcauccccaacuucaaccaguacgaggccauguccugcgacuucaacggcgggaagaucagcgugcaguacaaccugucccacagcuacgccggcgacgcggccgaccacugcgggacggucgccaacggcgugcuccagaccuucaugcggauggccuggggcggguccuacaucgcgcuggacagcggccgcgggcggugggacugcaucaugaccuccuaccaguaccugaucauccagaacaccacgugggaggaccacugccaguucagccgccccucccccaucggcuaccucggccugcugagccagcggacccgcgacaucuacaucucccggcgccuccuggggaccuucaccuggacgcugagcgacagcgagggcaaggacacccccgggggcuacugccucacccgguggaugcugaucgaggccgagcugaagugcuucgggaacaccgccguggccaagugcaacgagaagcacgacgaggaguucugcgacaugcuccgccuguucgacuucaacaagcaggccauccagcggcugaaggcggaggcccagauguccauccagcucaucaacaaggccgucaacgcccugaucaacgaccagcuggugaugaagaaccaccuccgcgacaucaugggcauccccuacugcaacuacagccgguacugcuaccugaaccacacgaccaccggccgcaccucccugcccaagugcugccucgugagcaacggguccuaccugaacgagacgcacuucagcgacgacaucgagcagcaggccgacaacaugaucaccgagaugcugcagaaggaguacauggagcggcagggcaagaccccgcuggggcucgucgaccuguucguguucuccaccagcuucuaccugaucuccaucuuccuccaccuggugaagaucccgacgcaccgccacaucgucggcaagagcugccccaagccccaccggcugaaccacauggggaucugcuccugcggccucuacaagcagcccggcgugccggugaaguggaagcgcuga

SEQ ID NO: 38303 - RNA, 1476 nt, Artificial Sequence
  derived and/or modified CDS sequence (opt1) from LASV(G733-SLE-2010;Clade IV)__AIT17154__GPCmut11
augggccagaucgugaccuucuuccaggaggucccccacgugaucgaggaggugaugaacaucguccugaucgcccucagcauccuggccgugcugaaggggcucuacaacuucgcgaccugcggcaucguggggcuggucuccuuccugcuccugugcggccgcagcugcacgaccucccuguacaaggggguguacgagcuccagacccuggagcugaacauggagacccucaacaugacgaugccgcugagcugcaccaagaacaacucccaccacuacaucauggugggcaacgagaccggccuggagcucacccugacgaacaccagcaucaucaaccacaaguucugcaaccuguccgacgcccacaagaagaaccucuacgaccacgcccugaugagcaucaucuccaccuuccaccugagcauccccaacuucaaccaguacgaggccauguccugcgacuucaacgggggcaagaucagcguccaguacaaccucucccacagcuacgccggggacgcggccaaccacugcggcaccaucgccaacggggugcugcagacguucaugcggauggccuggggcggcuccuacaucgcgcuggacagcgggcgcgaccggugggacugcaucaugaccuccuaccaguaccucaucauccagaacaccaccugggaggaccacugccaguucagccgccccucccccaucggcuaccuggggcugcucagccagcggacgcgcgacaucuacaucagccggcgccugcugggcaccuucaccuggacccucuccgacagcgagggcaaggacacgcccgggggcuacugccugacccgguggaugcugaucgaggccgagcucaagugcuucgggaacaccgccguggccaagugcaacgagaagcacgacgaggaguucugcgacaugcugcgccuguucgacuucaacaagcaggccauccagcggcucaaggcggaggcccagauguccauccagcugaucaacaaggccgucaacgcccugaucaacgaccagcucaucaugaagaaccaccuccgcgacaucaugggcauccccuacugcaacuacagcaaguacugcuaccugaaccacaccacgaccgggaagaccucccugcccaagugcugccuggugagcaacggcuccuaccugaacgagacccacuucagcgacgacaucgagcagcaggccgacaacaugaucacggagaugcuccagaaggaguacauggagcggcagggcaagaccccgcuggggcugguggaccuguucgucuucuccaccagcuucuaccucaucuccaucuuccugcaccuggugaagaucccgacccaccgccacguggucggcaagagcugccccaagccccaccggcucaaccacauggggaucugcuccugcggccuguacgggcagcccggcgugccggugaaguggaagcgcuga

SEQ ID NO: 38304 - RNA, 1476 nt, Artificial Sequence
  derived and/or modified CDS sequence (opt1) from MOPV/LASV reassortant(IGS-1;Clade IV)__AFY05576__GPCmut11
augggccagaucgugaccuucuuccaggaggucccccacgugaucgaggaggugaugaacaucguccugaucgcccucagcgugcuggccgugcugaaggggcucuacaacuucgcgaccugcggccuggucgggcuggugacguuccuccugcugugcggccgcuccugcaccaccagccucuacaaggggguguacgagcugcagacccuggagcucaacauggagacgcugaacaugaccaugccgcuguccugcaccaagaacaacagccaccacuacaucauggucggcaacgagaccggccucgagcugacgcugaccaacaccuccaucaucaaccacaaguucugcaaccucagcgacgcccacaagaagaaccuguacgaccacgcccugauguccaucaucagcaccuuccaccucuccauccccaacuucaaccaguacgaggccaugagcugcgacuucaacgggggcaagaucuccgugcaguacaaccugagccacuccuacgccggggacgcggccaaccacugcggcacgguggccaacgggguccugcagaccuucaugcggauggccuggggcggcagcuacaucgcgcucgacuccgggcgcggcaacugggacugcaucaugaccagcuaccaguaccugaucauccagaacaccacgugggaggaccacugccaguucucccggcccagccccaucggguaccugggccuccugucccagcgcacccgggacaucuacaucagccgccggcugcucggcaccuucaccuggacgcugagcgacuccgagggggaggacaccccgggcggguacugccugacccgcuggaugcucaucgaggccgagcugaagugcuucggcaacaccgccguggccaagugcaacgagaagcacgacgaggaguucugcgacaugcugcggcuguucgacuucaacaagcaggccauccagcgccugaaggcggaggcccagaugagcauccagcugaucaacaaggccgugaacgcccucaucaacgaccagcugaucaugaagaaccaccuccgggacaucauggggauccccuacugcaacuacuccaaguacugcuaccucaaccacacgaccaccggccgcaccagccugcccaagugcugccuggucuccaacggcagcuaccucaacgagacgcacuucuccgacgacaucgagcagcaggccgacaacaugaucaccgagaugcugcagaaggaguacauggagcggcaggggaagacgccccugggccugguggaccucuucguguucagcaccuccuucuaccugaucagcaucuuccugcaccucgucaagaucccgacccaccgccacaucguggggaaguccugccccaagccccaccggcugaaccacaugggcaucugcagcugcgggcuguacaagcagcccggcgugccggucaaguggaagcgcuga

SEQ ID NO: 38305 - RNA, 1476 nt, Artificial Sequence
  derived and/or modified CDS sequence (opt1) from LASV(LM765-SLE-2012;Clade IV)__AIT17814__GPCmut11
augggccagaucgugaccuucuuccaggaggucccccacgugaucgaggaggugaugaacaucguccugaucgcccucagcauccuggccgugcugaaggggcucuacaacuucgcgaccugcggccugguggggcuggucacguuccuccugcugugcggccgcuccugcaccaccagccucuacaaggggguguacgagcugcagacccuggagcucaacauggagacgcugaacaugaccaugccgcuguccugcaccaagaacaacagccaccacuacaucauggugggcaacgagaccggccucgagcugacgcugaccaacaccuccaucaucgaccacaaguucugcaaccucagcgacgcccaccggaagaaccuguacgaccacgcccugauguccaucaucagcaccuuccaccucuccauccccaacuucaaccaguacgaggccaugagcugcgacuucaacgggggcaagaucuccguccaguacaaccugagccacuccuacgccaaggacgcggccgaccacugcgggacgguggccaacggcgugcugcagaccuucaugcgcauggccuggggcgggagcuacaucgcgcucgacuccggccgggggcgcugggacugcaucaugaccagcuaccaguaccugaucauccagaacaccacgugggaggaccacugccaguucucccggcccagccccaucggcuaccuggggcuccugucccagcgcacccgggacaucuacaucagccgccggcugcucggcaccuucaccuggacgcugagcgacuccgagggcaaggacacccccgggggcuacugccugacccgcuggaugcucaucgaggccgagcugaagugcuucgggaacaccgccgucgccaagugcaacgagaagcacgacgaggaguucugcgacaugcugcggcuguucgacuucaacaagcaggccauccagcgccugaaggcggaggcccagaugagcauccagcugaucaacaaggccgugaacgcccucaucaacgaccagcugaucaugaagaaccaccuccgggacaucaugggcauccccuacugcaacuacuccaaguacugcuaccucaaccacacgaccaccgggaagaccagccugcccaagugcugccugguguccaacggcagcuaccucaacgagacgcacuucuccgacgacaucgagcagcaggccgacaacaugaucaccgagaugcugcagaaggaguacauggagcgccagggcaagaccccgcuggggcuggucgaccucuucguguucagcaccuccuucuaccugaucagcaucuuccugcaccucgugaagaucccgacgcaccggcacaucgucggcaagcccugccccaagccccaccgccugaaccacauggggaucugcuccugcggccuguacaagcagccgggggugcccgugaaguggaagcgguga

SEQ ID NO: 38306 - RNA, 1476 nt, Artificial Sequence
  derived and/or modified CDS sequence (opt1) from LASV(LM776-SLE-2012;Clade IV)__AIT17824__GPCmut11
augggccagaucgugaccuucuuccaggaggucccccacgugaucgaggaggugaugaacaucguccugaucgcccucagcauccuggccgugcugaaggggcucuacaacuucgcgaccugcggccugguggggcuggucacguuccuccugcugugcggccgcuccugcaccaccagcguguacaaggggguguacgagcuccagacccuggagcugaacauggagacgcucaacaugaccaugccgcuguccugcaccaagaacaacagccaccacuacaucauggucggcaacgagaccggccuggagcucacgcugaccaacaccuccaucaucaaccacaaguucugcaaccugagcgacgcccacaagaagaaccucuacgaccacgcccugauguccaucaucagcaccuuccaccuguccauccccaacuucaaccaguacgaggccaugagcugcgacuucaacgggggcaagaucuccgugcaguacaaccucagccacuccuacgccggggacgcggccaaccacugcggcacgguggccaacgggguccugcagaccuucaugcggauggccuggggcggcagcuacaucgcgcuggacuccgggcacggcaagugggacugcaucaugaccagcuaccaguaccucaucauccagaacaccacgugggaggaccacugccaguucucccgccccagccccaucggguaccugggccugcucucccagcggacccgcgacaucuacaucagccggcgccugcugggcaccuucaccuggacgcucagcgacuccgaggggaaggacaccccgggcggguacugccugacccgguggaugcugaucgaggccgagcucaagugcuucggcaacaccgccguggccaagugcaacgagaagcacgacgaggaguucugcgacaugcugcgccuguucgacuucaacaagcaggccauccagcggcucaaggcggaggcccagaugagcauccagcugaucaacaaggccgugaacgcccugaucaacgaccagcucaucaugaagaaccaccuccgcgacaucauggggauccccuacugcaacuacuccaaguacugcuaccugaaccacacgaccaccggcaagaccagccugcccaagugcugccuggucuccaacggcagcuaccugaacgagacgcacuucuccgacgacaucgagcagcaggccgacaacaugaucaccgagaugcuccagaaggaguacauggagcggcaggggaagacgccccugggccugguggaccuguucguguucagcaccuccuucuaccucaucagcaucuuccugcaccuggucaagaucccgacccaccgccacaucguggggaaguccugccccaagccccaccggcucaaccacaugggcaucugcagcugcgggcuguacaagcagcccggcgugccgguccgcuggaagcgguga

SEQ ID NO: 38307 - RNA, 1476 nt, Artificial Sequence
  derived and/or modified CDS sequence (opt1) from LASV(Mad39;Clade IV)__ANH09722__GPCmut11
augggccagaucgugaccuucuuccaggaggucccccacgugaucgaggaggugaugaacaucguccugaucgcccucagcauccuggccgugcugaaggggcucuacaacguggcgaccugcggccugaucgggcuggucacguuccuccugcugugcggccgcuccugcaccaccacccucuacaaggggguguacgagcugcaggcccuggagcucaacauggagacgcugaacaugaccaugccgcugagcugcaccaagaacaacucccaccacuacauccgggugggcaacgagaccggccucgagcugacgcugaccaacaccagccucaucaaccacaaguucugcaaccuguccgacgcccacaagaagaaccuguacgaccacgcccucaugagcaucaucuccaccuuccaccugagcauccccaacuucaaccaguacgaggccauguccugcgacuucaacgacgggaagaucagcguccaguacaaccugucccacacguacgcgggcgacaccgccaaccacugcgggaccguggccaacggcgugcuccagaccuucaugcgcauggccuggggcgggagcuacaucgcgcuggacuccggccgcgggggcugggacugcaucaugacgagcuaccaguaccugaucauccagaacaccaccugggaggaccacugccaguucucccggcccagccccaucggguaccucggccugcugucccagcggacccgcgacaucuacaucagccggcgccuccugggcacguucaccuggacccuguccgacagcgaggggaaggacaccccgggcggguacugccucacgcgguggaugcugaucgaggccgagcugaagugcuucggcaacaccgccgucgccaagugcaacgagaagcacgacgaggaguucugcgacaugcuccgccuguucgacuucaacaagcaggccauccagcggcugaaggcggaggcccagaugagcauccagcucaucaacaaggccgugaacgcccugaucaacgaccagcugaucaugaagaaccaccuccgcgacaucauggggauccccuacugcaacuacuccaaguacugcuaccugaaccacaccgugaccggcaagacgagccugcccaagugcugccucgucuccaacggcagcuaccugaacgagacccacuucuccgacgacaucgagcagcaggccgacaacaugaucaccgagaugcugcagaaggaguacauggagcggcaggggaagacgccccugggccucguggaccuguucguguucagcaccuccuucuaccugaucagcaucuuccuccaccuggucaagaucccgacccaccgccacgugguggggaagcccugccccaagccccaccggcugaaccacaugggcaucugcuccugcggguucuacaagcagccgggcguccccgugcgcuggaagcgguga

SEQ ID NO: 38308 - RNA, 1476 nt, Artificial Sequence
  derived and/or modified CDS sequence (opt1) from LASV(Z0947-SLE-2011;Clade IV)__AIT17840__GPCmut11
augggccagaucgugaccuucuuccaggaggucccccacgugaucgaggaggugaugaacaucguccugaucgcccucagcauccuggccgugcugaaggggcucuacaacuucgcgaccugcggccugguggggcuggucacguuccuccugcugugcggccgcuccugcaccaucagccucuacaaggggguguacgagcugcagacccuggagcucaacauggagacccugaacaugacgaugccgcuguccugcaccaagaacaacagccaccacuacaucauggugggcaacgagaccggccucgagcugacccugacgaacaccuccaucaucaaccacaaguucugcaaccucagcgacgcccacaagaagaaccuguacgaccacgcccugauguccaucaucagcaccuuccaccucuccauccccaacuucaaccaguacgaggccaugagcugcgacuucaacgggggcaagaucuccguccaguacaaccugagccacuccuacgccggggacgcggccaaccacugcggcaccguggccaacggggugcugcagacguucaugcggauggccuggggcggcagcuacaucgcgcucgacuccgggcgcgaccggugggacugcaucaugaccagcuaccaguaccugaucauccagaacaccaccugggaggaccacugccaguucucccgccccagccccaucggcuaccuggggcuccugucccagcggacgcgcgacaucuacaucagccggcgccugcucggcaccuucaccuggacccugagcgacuccgagggcaaggacacgcccgggggcuacugccugacccgguggaugcucaucgaggccgagcugaagugcuucgggaacaccgccgucgccaagugcaacgagaagcacgacgaggaguucugcgacaugcugcgccucuucgacuucaacaagcaggccauccagcggcugaaggcggaggcccagaugagcauccagcugaucaacaaggccgugaacgcccucaucaacgaccagcugaucaugaagaaccaccuccgcgacaucaugggcauccccuacugcaacuacuccaaguacugcuaccugaaccacaccacgaccgggaagaccagccugcccaagugcugccugguguccaacggcagcuaccucaacgagacccacuucuccgacgacaucgagcagcaggccgacaacaugaucacggagaugcugcagaaggaguacauggagcggcagggcaagaccccgcuggggcuggucgaccucuucguguucagcaccuccuucuaccugaucagcaucuuccugcaccucgugaagaucccgacccaccgccacaucgucggcaagcccugccccaagccccaccggcugaaccacauggggaucugcuccugcggccuguacaagcagccgggggugcccgugaaguggaagcgcuga

SEQ ID NO: 38309 - RNA, 1476 nt, Artificial Sequence
  derived and/or modified CDS sequence (opt4) from LASV(Josiah;Clade IV)__NP_694870__GPCmut11
augggccagaucgugaccuucuuccaggaggugccccacgugaucgaggaggugaugaacaucgugcugaucgcccugagcgugcuggccgugcugaagggccuguacaacuucgccaccugcggccuggugggccuggugaccuuccugcugcugugcggcagaagcugcaccaccagccuguacaagggcguguacgagcugcagacccuggagcugaacauggagacccugaacaugaccaugccccugagcugcaccaagaacaacagccaccacuacaucauggugggcaacgagaccggccuggagcugacccugaccaacaccagcaucaucaaccacaaguucugcaaccugagcgacgcccacaagaagaaccuguacgaccacgcccugaugagcaucaucagcaccuuccaccugagcauccccaacuucaaccaguacgaggccaugagcugcgacuucaacggcggcaagaucagcgugcaguacaaccugagccacagcuacgccggcgacgccgccaaccacugcggcaccguggccaacggcgugcugcagaccuucaugagaauggccuggggcggcagcuacaucgcccuggacagcggcagaggcaacugggacugcaucaugaccagcuaccaguaccugaucauccagaacaccaccugggaggaccacugccaguucagcagacccagccccaucggcuaccugggccugcugagccagagaaccagagacaucuacaucagcagaagacugcugggcaccuucaccuggacccugagcgacagcgagggcaaggacacccccggcggcuacugccugaccagauggaugcugaucgaggccgagcugaagugcuucggcaacaccgccguggccaagugcaacgagaagcacgacgaggaguucugcgacaugcugagacuguucgacuucaacaagcaggccauccagagacugaaggccgaggcccagaugagcauccagcugaucaacaaggccgugaacgcccugaucaacgaccagcugaucaugaagaaccaccugagagacaucaugggcauccccuacugcaacuacagcaaguacugcuaccugaaccacaccaccaccggcagaaccagccugcccaagugcugccuggugagcaacggcagcuaccugaacgagacccacuucagcgacgacaucgagcagcaggccgacaacaugaucaccgagaugcugcagaaggaguacauggagagacagggcaagaccccccugggccugguggaccuguucguguucagcaccagcuucuaccugaucagcaucuuccugcaccuggugaagauccccacccacagacacaucgugggcaagagcugccccaagccccacagacugaaccacaugggcaucugcagcugcggccuguacaagcagcccggcgugcccgugaaguggaagagauga

SEQ ID NO: 38310 - RNA, 1473 nt, Artificial Sequence
  derived and/or modified CDS sequence (opt4) from LASV(LP;Clade I)__AAF86701__GPCmut11
augggccagaucaucaccuucuuccaggaggugccccacgugaucgaggaggugaugaacaucgugcugaucgcccugagccugcuggccauccugaagggccuguacaacaucgccaccugcggcaucaucggccugguggccuuccuguuccugugcggcaagagcugcagccugacccugaagggcggcuacgagcugcagacccuggagcugaacauggagacccugaacaugaccaugccccugagcugcaccaagaacagcagccaccacuacaucagagugggcaacgagaccggccuggagcugacccugaccaacaccagcaucaucaaccacaaguucugcaaccugagcgacgcccacaagaagaaccuguacgaccacgcccugaugagcaucaucagcaccuuccaccugagcauccccaacuucaaccaguacgaggccaugagcugcgacuucaacggcggcaagaucagcgugcaguacaaccugagccacagcuacgccggcgacgccgccgagcacugcggcaccguggccaacggcgugcugcagaccuucaugagaauggccuggggcggcagauacaucgcccuggacagcggcaagggcaacugggacugcaucaugaccagcuaccaguaccugaucauccagaacaccaccugggaggaccacugccaguucagcagacccagccccaucggcuaccugggccugcugagccagagaaccagagacaucuacaucagcagaagacugcugggcaccuucaccuggacccugagcgacagcgagggcaacgagacccccggcggcuacugccugaccagauggaugcugaucgaggccgagcugaagugcuucggcaacaccgccguggccaagugcaacgagaagcacgacgaggaguucugcgacaugcugagacuguucgacuucaacaagcaggccaucagaagacugaaggccgaggcccagaugagcauccagcugaucaacaaggccgugaacgcccugaucaacgaccagcugaucaugaagaaccaccugagagacaucaugggcauccccuacugcaacuacagcaaguacugcuaccugaaccacaccagcagcggcagaaccagccugcccaagugcugccugaucagcaacggcagcuaccugaacgagacccaguucagcgacgacaucgagcagcaggccgacaacaugaucaccgagaugcugcagaaggaguacaucgagagacagggcaagaccccccugggccugguggacaucuucaucuucagcaccagcuucuaccugaucagcaucuuccugcaccugaucaagauccccacccacagacacaucgugggcaagcccugccccaagccccacagacugaaccacaugggcgugugcagcugcggccuguacaagcaccccggcgugcccaccaaguggaagagauga

SEQ ID NO: 38311 - RNA, 1473 nt, Artificial Sequence
  derived and/or modified CDS sequence (opt4) from LASV(803213;Clade II)__AAF86703__GPCmut11
augggccagaucaucaccuucuuccaggaggugccccacgugaucgaggaggugaugaacaucgugcugaucgcccugagccugcuggccauccugaagggcaucuacaacguggccaccugcggccuguucggccugaucagcuuccugcugcugugcggcagaagcugcagcgugaccuacaagggcguguacgagcugcagacccuggagcugaacauggccaaccugaacaugaccaugccccugagcugcaccaagaacaacagccaccacuacaucauggugggcaacgagaccggccuggagcugacccugaccaacaccagcaucaucaaccacaaguucugcaaccugagcgacgcccacaagaagaaccuguacgaccacgcccugaugagcaucaucagcaccuuccaccugagcauccccaacuucaaccaguacgaggccaugagcugcgacuucaacggcggcaagaucagcgugcaguacaaccugagccacagcuucgccguggacgccgccaaccacugcggcaccaucgccaacggcgugcugcagaccuucaugagaauggccuggggcggcagcuacaucgcccuggacagcggcaagggcaacugggacugcaucaugaccagcuaccaguaccugaucauccagaacaccaccugggaggaccacugccaguucagcagacccagccccaucggcuaccugggccugcugagccagagaaccagagacaucuacaucagcagaagacugcugggcaccuucaccuggacccugagcgacagcgagggcaacgaggcccccggcggcuacugccugaccagauggaugcugaucgaggccgagcugaagugcuucggcaacaccgccguggccaagugcaacgagaagcacgacgaggaguucugcgacaugcugagacuguucgacuucaacaagcaggccaucaagagacugaagaccgaggcccagaugagcauccagcugaucaacaaggccgugaacgcccugaucaacgaccagcugaucaugaagaaccaccugagagacaucaugggcauccccuacugcaacuacagcagauacugcuaccugaaccacaccgugaccggcaagaccagccugcccagaugcugccuggugagcaacggcagcuaccugaacgagacccacuucagcgacgacaucgagcagcaggccgacaacaugaucaccgagaugcugcagaaggaguacauggacagacagggcaagaccccccugggccugguggaccuguucguguucagcaccagcuucuaccugaucagcaucuuccugcaccuggugaagauccccacccacagacacaucgugggcaagcccugccccaagccccacagacugaaccacaugggcaucugcagcugcggccuguacaagcaccccggcgugcccgugaaguggaagagauga

SEQ ID NO: 38312 - RNA, 1473 nt, Artificial Sequence
  derived and/or modified CDS sequence (opt4) from LASV(GA391;Clade III)__CAA36645__GPCmut11
augggccagaucgugaccuucuuccaggaggugccccacgugaucgaggaggugaugaacaucgugcugaucgcccugagcauccuggccauccugaagggccuguacaacguggccaccugcggccugaucggccuggugaccuuccugcugcugagcggcagaagcugcagccugaucuacaagggcaccuacgagcugcagacccuggagcugaacauggagacccugaacaugaccaugccccugagcugcaccaagaacaacagccaccacuacaucagagugggcaacgagaccggccuggagcugacccugaccaacaccagcauccugaaccacaaguucugcaaccugagcgacgcccacaagagaaaccuguacgaccacagccugaugagcaucaucagcaccuuccaccugagcauccccaacuucaaccaguacgaggccaugagcugcgacuucaacggcggcaagaucaccgugcaguacaaccugagccacagcuucgccguggacgccgccggccacugcggcacccuggccaacggcgugcugcagaccuucaugagaauggccuggggcggcagcuacaucgcccuggacagcggcagaggcaacugggacugcaucaugaccagcuaccaguaccugaucauccagaacaccaccugggacgaccacugccaguucagcagacccagccccaucggcuaccugggccugcugagccagagaaccagagacaucuacaucagcagaagacugcugggcaccuucaccuggacccugagcgacagcgagggcaacgagacccccggcggcuacugccugaccagauggaugcugaucgaggccgagcugaagugcuucggcaacaccgccguggccaagugcaacgagaagcacgacgaggaguucugcgacaugcugagacuguucgacuucaacaagcaggccaucagaagacugaagaccgaggcccagaugagcauccagcugaucaacaaggccgugaacgcccugaucaacgaccagcugaucaugaagaaccaccugagagacaucaugggcauccccuacugcaacuacagcagauacugcuaccugaaccacaccagcaccggcaagaccagccugcccagaugcugccugaucagcaacggcagcuaccugaacgagaccaaguucagcgacgacaucgagcagcaggccgacaacaugaucaccgagaugcugcagaaggaguacaucgacagacagggcaagaccccccugggccugguggaccuguucguguucagcaccagcuucuaccugaucagcaucuuccugcaccuggugaagauccccacccacagacacaucgugggcaagcccugccccaagccccacagacugaaccacaugggcaucugcagcugcggccuguacaagcagcccggcgugcccgugagauggaagagauga

SEQ ID NO: 38313 - RNA, 1476 nt, Artificial Sequence
  derived and/or modified CDS sequence (opt4) from LASV(AV;Clade V)__CCA30314__GPCmut11
augggccagaucgugaccuucuuccaggaggugccccacgugaucgaggaggugaugaacaucgugcugaucgcccugagcauccuggccgugcugaagggccuguacaacaucgccaccugcggccugaucggccugaucaccuuccugcugcugugcggcagaagcugcagcagcaaccuguacaagggcguguacgagcugcagagccuggaccugaacauggagacccugaacaugaccaugccccugagcugcaccaagaacaacagccaccacuacaucagagugggcaacgacaccggccuggagcugacccugaccaacaccagcauccugaaccacaaguucugcaaccugagcgacgcccacaagaaggaccuguacgaccacgcccugaugagcaucaucagcaccuuccaccugagcauccccaacuucaaccaguacgaggccaugagcugcgacuucaacggcggcaagaucagcgugcaguacaaccugagccacagcuacgccaucgacgccgccaaccacugcggcaccguggccaacggcauccugcagaccuucaugagaauggccuggggcggcagcuacaucgcccuggacagcggcagaggcaacugggacugcaucaugaccagcuaccaguaccugaucauccagaacaccaccugggagaaccacugccaguucagcagacccagccccaucggcuaccugggccugcugagccagagaaccagagacaucuacaucagcagaagacugcugggcaccuucaccuggacccugagcgacagcgagggcaacgccacccccggcggcuacugccugaccagauggaugcugaucgaggccgagcugaagugcuucggcaacaccgccguggccaagugcaacgagaagcacgacgaggaguucugcgacaugcugagacuguucgacuucaacaagcaggccaucagcagacugaagagcgaggcccagaugagcauccagcugaucaacaaggccgugaacgcccugaucaacgaccagcugaucaugaagaaccaccugagagacaucaugggcauccccuacugcaacuacagcaaguacugcuaccugaaccacaccaucaccggcaagaccagccugcccaagugcugccuggugagcaacggcagcuaccugaacgagacccacuucagcgacgacaucgagcagcaggccgacaacaugaucaccgagaugcugcagaaggaguacauggagagacagggcaagaccccccugggccugguggaccuguucguguucagcaccagcuucuaccugaucagcaucuuccugagacuggugaagauccccacccacagacacaucgugggcaagcccugccccaagccccacagacugaaccacaugggcaucugcagcugcggccuguacaagcagcccggcgugcccgugagauggaagagauga

SEQ ID NO: 38314 - RNA, 1473 nt, Artificial Sequence
  derived and/or modified CDS sequence (opt4) from LASV(Togo/2016/7082;Clade VI)__AMR44577__GPCmut11
augggccagaucaucaccuucuuccaggaggugccccacgugaucgaggaggugaugaacaucgugcugaucgcccugagccugcuggccauccugaagggcguguacaacguggccaccugcggcaucaucggccuggugaccuuccuguuccugugcggcagaagcugcagccugaucuacaagggcagcuacgagcugcagacccuggagcugaacauggagacccugaacaugaccaugccccugagcugcaccaagaacagcagccaccacuacaucagagugggcaacgagaccggccuggagcugacccugaccaacaccagcaucaucaaccacaaguucugcaaccugagcgacgcccacaagagaaaccuguacgaccacgcccugaugagcauccugagcaccuuccaccugagcauccccaacuucaaccaguacgaggccaugagcugcgacuucaacggcggcaagaucagcgugcaguacaaccugagccacgccuacgccguggacgccgccgagcacugcggcaccguggccaacggcgugcugcagaccuucaugagaauggccuggggcggcagcuacaucgcccuggacagcggcagaggcaacugggacugcaucaugaccagcuaccaguaccugaucauccagaacaccaccugggaggaccacugccaguucagcagacccagccccaucggcuaccugggccugcugagccagagaaccagagacaucuacaucagcagaagacugcugggcaccuucaccuggacccugagcgacagcgagggcaacgagacccccggcggcuacugccugaccagauggaugcugaucgaggccgagcugaagugcuucggcaacaccgccguggccaagugcaacgagaagcacgacgaggaguucugcgacaugcugagacuguucgacuucaacaagcaggccauccagagacugaagagcgaggcccagaugagcauccagcugaucaacaaggccgugaacgcccugaucaacgaccagcugaucaugaagaaccaccugagagacaugaugggcauccccuacugcaacuacagcaaguacugcuaccugaaccacaccagcagcggcagaaccagccugcccaagugcugccuggugagcaacggcagcuaccugaacgagacccacuucagcgacgacaucgagcagcaggccgacaacaugaucaccgagaugcugcagaaggaguacaucgacagacagggcaagaccccccugggccugguggaccuguucguguucagcaccagcuucuaccugaucagcaucuuccugcaccugaucaagauccccacccacagacacaucgugggcaagcccugccccaagccccacagacugaaccacaugggcaucugcagcugcggccuguacaagcagcccggcgugcccaccagauggaagagauga

SEQ ID NO: 38315 - RNA, 1473 nt, Artificial Sequence
  derived and/or modified CDS sequence (opt4) from LASV(KAK-428;Clade n.d. (VII))__ANH09740__GPCmut11
augggccagaucgugaccuucuuccaggaggugccccacgugaucgaggaggugaugaacaucgugcugaucgcccugagccugcuggccauccugaagggccuguacaacuucgccaccugcggcgugaucggccugaucaccuuccugcugcugugcggcagaagcugcagcgccaccuacaagggccaguacgagcugcagacccuggagcugaacauggagagccugaacaugaccaugccccugagcugcaccaagaacaacagccaccacuacaucagagccggcaacaacaccggccuggagcugacccugaccaacaccagcaucaucagccacaaguucugcaaccugagcgacgcccacaagaagaaccuguacgaccacacccugaugagcaucaucaccaccuuccaccugagcauccccaacuucaaccaguacgaggccaugagcugcgacuucaacggcggcaagaucagcauccaguacaaccugagccacagcuacgccggcgacgccgcccagcacugcggcaccguggccaacggcgugcugcagaccuucaugagaauggccuggggcggcagcuaccuggcccuggacagcggcagaagaggcugggacugcaucaucagcagcuaccaguaccugaucauccagaacaccaccugggacgaccacugccaguucagcagacccagccccaucggcuaccugggcuucgugagccagaagaccagagacaucuacaucagcagaagacugcugggcaccuucaccuggacccugagcgacagcgagggccacgacaugcccggcggcuacugccugaccagauggaugcugaucgaggccgaccugaagugcuucggcaacaccgccguggccaagugcaacgagaagcacgacgaggaguucugcgacauguggagacuguucgacuucaacaagcaggccauccagagacugaaggccgaggcccagaugaacauccagcugaucaacaaggccgugaacgcccugaucaacgaccagcugaugaugaagaaccaccugagagacaucaugggcauccccuacugcaacuacagcaaguucugcuaccugaacaacaccaccaccggcagaaccagccugcccagaugcugccugaucagcaacggcagcuaccugaacgagacccacuucagcgacgacaucgagcagcaggccgacaacaugaucaccgagaugcugcagaaggaguacauggacagacagggcaagaccccccugggccugguggaccuguucguguucagcaccagcuucuaccugaucaccaucuuccugcaccuggugaagauccccacccacagacacaucgugggcaagcccugccccaagccccacagacugaaccacaugggcaucugcagcugcggccuguacaagcagcccggcgugcccgugagauggaagagauga

SEQ ID NO: 38316 - RNA, 1473 nt, Artificial Sequence; identical to SEQ ID NO: 38310
  derived and/or modified CDS sequence (opt4) from LASV(Pinneo-NIG-1969;Clade I)__AIT17836__GPCmut11

SEQ ID NO: 38317 - RNA, 1473 nt, Artificial Sequence
  derived and/or modified CDS sequence (opt4) from LASV(ISTH0009-NIG-2011;Clade II)__AIT17404__GPCmut11
augggccagaucaucaccuucuuccaggaggugccccacgugaucgaggaggugaugaacaucgugcugaucgcccugagccugcuggccauccugaagggcaucuacaacguggccaccugcggccuguucggccuggugagcuuccugcugcugugcggcagaagcugcagcaccaccuacaagggcguguacgagcugcagacccuggagcuggacauggccagccugaacaugaccaugccccugagcugcaccaagaacaacagccaccacuacaucauggugggcaacgagaccggccuggagcugacccugaccaacaccagcaucaucaaccacaaguucugcaaccugagcgacgcccacaagaagaaccuguacgaccacgcccugaugagcaucaucagcaccuuccaccugagcauccccaacuucaaccaguacgaggccaugagcugcgacuucaacggcggcaagaucagcgugcaguacaaccugagccacgccuacgccguggacgccgccaaccacugcggcaccaucgccaacggcgugcugcagaccuucaugagaauggccuggggcggcagcuacaucgcccuggacagcggcaagggcagcugggacugcaucaugaccagcuaccaguaccugaucauccagaacaccaccugggaggaccacugccaguucagcagacccagccccaucggcuaccugggccugcugagccagagaaccagagacaucuacaucagcagaagacugcugggcaccuucaccuggacccugagcgacagcgagggcaacgagacccccggcggcuacugccugaccagauggaugcugaucgaggccgagcugaagugcuucggcaacaccgccguggccaagugcaacgagaagcacgacgaggaguucugcgacaugcugagacuguucgacuucaacaagcaggccaucagaagacugaagaccgaggcccagaugagcauccagcugaucaacaaggccgugaacgcccugaucaacgaccagcugaucaugaagaaccaccugagagacaucaugggcauccccuacugcaacuacagcaaguacugcuaccugaaccacaccgugaccggcaagaccagccugcccagaugcugccuggugagcaacggcagcuaccugaacgagacccacuucagcgacgacaucgagcagcaggccgacaacaugaucaccgagcugcugcagaaggaguacauggacagacagggcaagaccccccugggccugguggaccuguucguguucagcaccagcuucuaccugaucagcaucuuccugcaccugaucaagauccccacccacagacacaucaccggcaagcccugccccaagccccacagacugaaccacaugggcaucugcagcugcggccuguacaagcaccccggcgugcccgugaaguggaagagauga

SEQ ID NO: 38318 - RNA, 1473 nt, Artificial Sequence
  derived and/or modified CDS sequence (opt4) from LASV(ISTH2010-NIG-2012;Clade II)__AIT17482__GPCmut11
augggccagaucaucaccuucuuccaggaggugccccacgugaucgaggaggugaugaacaucgugcugaucgcccugagccugcuggccauccugaagggcaucuacaacguggccaccugcggccuguucggccuggugagcuuccugcugcugugcggcagaagcugcagcaccaccuacaagggcguguacgagcugcagacccuggagcuggacauggccagccugaacaugaccaugccccugagcugcaccaagaacaacagccaccacuacaucauggugggcaacgagaccggccuggagcugacccugaccaacaccagcaucaucaaccacaaguucugcaaccugagcgacgcccacaagaagaaccuguacgaccacgcccugaugagcaucaucagcaccuuccaccugagcauccccaacuucaaccaguacgaggccaugagcugcgacuucaacggcggcaagaucagcgugcaguacaaccugagccacgccuacgccguggacgccgccaaccacugcggcaccaucgccaacggcgugcugcagaccuucaugagaauggccuggggcggcagcuacaucgcccuggacagcggcaagggcagcugggacugcaucaugaccagcuaccaguaccugaucauccagaacaucaccugggaggaccacugccaguucagcagacccagccccaucggcuaccugggccugcugagccagagaaccagagacaucuacaucagcagaagacugcugggcaccuucaccuggacccugagcgacagcgagggcaacgagacccccggcggcuacugccugaccagauggaugcugaucgaggccgagcugaagugcuucggcaacaccgccguggccaagugcaacgagaagcacgacgaggaguucugcgacaugcugagacuguucgacuucaacaagcaggccaucagaagacugaagaccgaggcccagaugagcauccagcugaucaacaaggccgugaacgcccugaucaacgaccagcugaucaugaagaaccaccugagagacaucaugggcauccccuacugcaacuacagcaaguacugcuaccugaaccacaccgugaccggcaagaccagccugcccagaugcugccuggugagcaacggcagcuaccugaacgagacccacuucagcgacgacaucgagcagcaggccgacaacaugaucaccgagcugcugcagaaggaguacaucgacagacagggcaagaccccccugggccugguggaccuguucguguucagcaccagcuucuaccugaucagcaucuuccugcaccuggugaagauccccacccacagacacguggugggcaagcccugccccaagccccacagacugaaccacaugggcaucugcagcugcggccuguacaagcaccccggcgugcccgugaaguggaagagauga

SEQ ID NO: 38319 - RNA, 1473 nt, Artificial Sequence
  derived and/or modified CDS sequence (opt4) from LASV(Lassa virus/H.sapiens-wt/NGA/2015/ISTH_0543;Clade II)__AVO03639__GPCmut11
augggccagaucaucaccuucuuccaggaggugccccacgugaucgaggaggugaugaacaucgugcugaucgcccugagccugcuggccauccugaagggcaucuacaacguggccaccugcggccuguucggccuggugagcuuccugcugcugugcggcagaagcugcagcaccaccuacaagggcguguacgagcugcagacccuggagcuggacauggccaaccugaacaugaccaugccccugagcugcaccaagaacaacagccaccacuacaucauggugggcaacgagaccggccuggagcugacccugaccaacaccagcaucaucaaccacaaguucugcaaccugagcgacgcccacaagaagaaccuguacgaccacgcccugaugagcaucaucagcaccuuccaccugagcauccccaacuucaaccaguacgaggccaugagcugcgacuucaacggcggcaagaucagcgugcaguacaaccugagccacaccuacgccguggacgccgccaaccacugcggcaccaucgccaacggcgugcugcagaccuucaugagaauggccuggggcggcagcuacaucgcccuggacagcggcaagggcagcugggacugcaucaugaccagcuaccaguaccuggugauccagaacaccaccugggaggaccacugccaguucagcagacccagccccaucggcuaccugggccugcugagccagagaaccagagacaucuacaucagcagaagacugcugggcaccuucaccuggacccugagcgacagcgagggcaacgagacccccggcggcuacugccugaccagauggaugcugaucgaggccgagcugaagugcuucggcaacaccgccguggccaagugcaacgagaagcacgacgaggaguucugcgacaugcugagacuguucgacuucaacaagcaggccaucagaagacugaagaccgaggcccagaugagcauccagcugaucaacaaggccgugaacgcccugaucaacgaccagcugaucaugaagaaccaccugagagacaucaugggcauccccuacugcaacuacagcaaguacugcuaccugaaccacaccgugaccggcaagaccagccugcccagaugcugccuggugagcaacggcagcuaccugaacgagacccacuucagcgacgacaucgagcagcaggccgacaacaugaucaccgagcugcugcagaaggaguacaucgacagacagggcaagaccccccugggccugguggaccuguucguguucagcaccagcuucuaccugaucagcaucuuccugcaccuggugaagauccccacccacagacacaucaccggcaagcccugccccaagccccacagacugaaccacaugggcaucugcagcugcggccuguacaagcaccccggcgugcccgugaaguggaagagauga

SEQ ID NO: 38320 - RNA, 1473 nt, Artificial Sequence
  derived and/or modified CDS sequence (opt4) from LASV(Lassa virus/H.sapiens-wt/NGA/2016/ISTH_0009;Clade II)__AVO03571__GPCmut11
augggccagaucaucaccuucuuccaggaggugccccacgugaucgaggaggugaugaacaucgugcugaucgcccugagccugcuggccauccugaagggcaucuacaacguggccaccugcggccugcugggccuggugagcuuccugcugcugugcggcagaagcugcagcaccaccuacaagggcguguacgagcugcagacccuggagcuggacauggccagccugaacaugaccaugccccugagcugcaccaagaacaacagccaccacuacaucauggugggcaacgagaccggccuggagcugacccugaccaacaccagcaucaucaaccacaaguucugcaaccugagcgacgcccacaagaagaaccuguacgaccacgcccugaugagcaucaucagcaccuuccaccugagcauccccaacuucaaccaguacgaggccaugagcugcgacuucaacggcggcagaaucagcgugcaguacaaccugagccacagcuacgccguggacgccgccaaccacugcggcaccaucgccaacggcgugcugcagaccuucaugagaauggccuggggcggcagcuacaucgcccuggacagcggcaagggcagcugggacugcaucaugaccagcuaccaguaccugaucauccagaacaccaccugggaggaccacugccaguucagcagacccagccccaucggcuaccugggccugcugagccagagaaccagagacaucuacaucagcagaagacugcugggcaccuucaccuggacccugagcgacagcgagggcaacgagacccccggcggcuacugccugaccagauggaugcugaucgaggccgagcugaagugcuucggcaacaccgccguggccaagugcaacgagaagcacgacgaggaguucugcgacaugcugagacuguucgacuucaacaagcaggccaucagaagacugaagaccgaggcccagaugagcauccagcugaucaacaaggccgugaacgcccugaucaacgaccagcugaucaugaagaaccaccugagagacaucaugggcauccccuacugcaacuacagcaaguacugcuaccugaaccacaccgugaccggcaagaccagccugcccagaugcugccuggugagcaacggcagcuaccugaacgagacccacuucagcgacgacaucgagcagcaggccgacaacaugaucaccgagcugcugcagaaggaguacaucgacagacagggcaagaccccccugggccugguggaccuguucguguucagcaccagcuucuaccugaucagcaucuuccugcaccuggugaagauccccacccacagacacaucaccggcaagcccugccccaagccccacagacugaaccacaugggcaucugcagcugcggccuguacaaccaccccggcgugcccgugaaguggaagagauga

SEQ ID NO: 38321 - RNA, 1473 nt, Artificial Sequence
  derived and/or modified CDS sequence (opt4) from LASV(Lassa virus/H.sapiens-wt/NGA/2016/ISTH_0017;Clade II)__AVO03567__GPCmut11
augggccagaucaucaccuucuuccaggaggugccccacgugaucgaggaggugaugaacaucgugcugaucgcccugagccugcuggccauccugaagggcaucuacaacguggccaccugcggccuguucggccuggugagcuuccugcugcugugcggcagaagcugcagcaccaccuacaagggcguguacgagcugcagacccuggagcuggacauggccagccugaacaugaccaugccccugagcugcaccaagaacaacagccaccacuacaucauggugggcaacgagaccggccuggagcugacccugaccaacaccagcaucaucaaccacaaguucugcaaccugagcgacgcccacaagaagaaccuguacgaccacgcccugaugagcaucaucagcaccuuccaccugagcauccccaacuucaaccaguacgaggccaugagcugcgacuucaacggcggcaagaucagcgugcaguacaaccugagccacaccuacgccaucgacgccgccaaccacugcggcaccaucgccaacggcgugcugcagaccuucaugagaauggccuggggcggcagcuacaucgcccuggacagcggcaagggcagcugggacugcaucaugaccagcuaccaguaccugaucauccagaacaccaccugggaggaccacugccaguucagcagacccagccccaucggcuaccugggccugcugagccagagaaccagagacaucuacaucagcagaagacugcugggcaccuucaccuggacccugagcgacagcgagggcaacgagacccccggcggcuacugccugaccagauggaugcugaucgaggccgagcugaagugcuucggcaacaccgccguggccaagugcaacgagaagcacgacgaggaguucugcgacaugcugagacuguucgacuucaacaagcaggccaucagaagacugaagaccgaggcccagaugagcauccagcugaucaacaaggccgugaacgcccugaucaacgaccagcugaucaugaagaaccaccugagagacaucaugggcauccccuacugcaacuacagcaaguacugcuaccugaaccacaccgugaccggcaagaccagccugcccagaugcugccuggugagcaacggcagcuaccugaacgagacccacuucagcgacgacaucgagcagcaggccgacaacaugaucaccgagcugcugcagaaggaguacauggacagacagggcaagaccccccugggccugguggaccuguucguguucagcaccagcuucuaccugaucagcaucuuccugcaccuggugagaauccccacccacagacacgugaucggcaagcccugccccaagccccacagacugaaccacaugggcaucugcagcugcggccuguacaagcaccccggcgugcccgugaaguggaagagauga

SEQ ID NO: 38322 - RNA, 1473 nt, Artificial Sequence
  derived and/or modified CDS sequence (opt4) from LASV(Lassa virus/H.sapiens-wt/NGA/2018/ISTH_0959;Clade II)__AVV65099__GPCmut11
augggccagaucaucaccuucuuccaggaggugccccacgugaucgaggaggugaugaacaucgugcugaucgcccugagccugcuggccauccugaagggcaucuacaacguggugaccugcggccuguucggccuggugagcuuccugcugcugugcggcagaagcugcagcaccaccuacaagggcguguacgagcugcagacccuggagcuggacauggccagccugaacaugaccaugccccugagcugcaccaagaacaacagccaccacuacaucauggugggcaacgagaccggccuggagcugacccugaccaacaccagcaucaucaaccacaaguucugcaaccugagcgacgcccacaagaagaaccuguacgaccacgcccugaugagcaucaucagcaccuuccaccugagcauccccaacuucaaccaguacgaggccaugagcugcgacuucaacggcggcaagaucagcgugcaguacaaccugagccacgccuacgccaucgacgccgccaaccacugcggcaccaucgccaacggcgugcugcagaccuucaugagaauggccuggggcggcagcuacaucgcccuggacagcggcaagggcagcugggacugcaucaugaccagcuaccaguaccugaucauccagaacaccaccugggaggaccacugccaguucagcagacccagccccaucggcuaccugggccugcugagccagagaaccagagacaucuacaucagcagaagacugcugggcaccuucaccuggacccugagcgacagcgagggcaacgagacccccggcggcuacugccugaccagauggaugcugaucgaggccgagcugaagugcuucggcaacaccgccguggccaagugcaacgagaagcacgacgaggaguucugcgacaugcugagacuguucgacuucaacaagcaggccaucagaagacugaagaccgaggcccagaugagcauccagcugaucaacaaggccgugaacgcccugaucaacgaccagcugaucaugaagaaccaccugagagacaucaugggcauccccuacugcaacuacagcaaguacugcuaccugaaccacaccgugaccggcaagaccagccugcccagaugcugccuggugagcaacggcagcuaccugaacgagacccacuucagcgacgacaucgagcagcaggccgacaacaugaucaccgagcugcugcagaaggaguacaucgacagacagggcaagaccccccugggccugguggaccuguucguguucagcaccagcuucuaccugaucagcaucuuccugcaccuggugaagauccccacccacagacacgugaucggcaagcccugccccaagccccacagacugaaccacaugggcaucugcagcugcggccuguacaagcaccccggcgugcccgugaaguggaagagauga

SEQ ID NO: 38323 - RNA, 1473 nt, Artificial Sequence
  derived and/or modified CDS sequence (opt4) from LASV(LASV003-NIG-2008;Clade II)__AIT17580__GPCmut11
augggccagaucaucaccuucuuccaggaggugccccacgugaucgaggaggugaugaacaucgugcugaucgcccugagccugcuggccauccugaagggcaucuacaacguggccaccugcggccuguucggccuggugagcuuccugcugcugugcggcagaagcugcagcaccaccuacaagggcguguacgagcugcagacccuggagcuggacauggccagccugaacaugaccaugccccugagcugcaccaagaacaacagccaccacuacaucauggugggcaacgagaccggccuggagcugacccugaccaacaccagcaucaucaaccacaaguucugcaaccugagcgacgcccacaagaagaaccuguacgaccacgcccugaugagcaucaucagcaccuuccaccugagcauccccaacuucaaccaguacgaggccaugagcugcgacuucaacggcggcaagaucagcgugcaguacaaccugagccacaccuacgccguggacgccgccaaccacugcggcaccaucgccaacggcgugcugcagaccuucaugagaauggccuggggcggcagcuacaucgcccuggacagcggcaagggcagcugggacugcaucaugaccagcuaccaguaccugaucauccagaacaccaccugggaggaccacugccaguucagcagacccagccccaucggcuaccugggccugcugagccagagaaccagagacaucuacaucagcagaagacugcugggcaccuucaccuggacccugagcgacagcgagagcaacgagacccccggcggcuacugccugaccagauggaugcugaucgaggccgagcugaagugcuucggcaacaccgccguggccaagugcaacgagaagcacgacgaggaguucugcgacaugcugagacuguucgacuucaacaagcaggccaucagaagacugaaggccgaggcccagaugagcauccagcugaucaacaaggccgugaacgcccugaucaacgaccagcugaucaugaagaaccaccugagagacaucaugggcauccccuacugcaacuacagcaaguacugcuaccugaaccacaccgugaccggcagaaccagccugcccagaugcugccuggugagcaacggcagcuaccugaacgagacccacuucagcgacgacaucgagcagcaggccgacaacaugaucaccgagcugcugcagaaggaguacauggacagacagggcaagaccccccugggccugguggaccuguucguguucagcaccagcuucuaccugaucagcaucuuccugcaccuggugaagauccccacccacagacacgugaucggcaagcccugccccaagccccacagacugaaccacaugggcaucugcagcugcggccuguacaagcaccccggcgugcccgugaaguggaagagauga

SEQ ID NO: 38324 - RNA, 1473 nt, Artificial Sequence
  derived and/or modified CDS sequence (opt4) from LASV(LASV035-NIG-2009;Clade II)__AIT17588__GPCmut11
augggccagaucaucaccuucuuccaggaggugccccacgugaucgaggaggugaugaacaucgugcugaucgcccugagccugcuggccauccugaagggcaucuacaacguggccaccugcggccuguucggccuggugagcuuccugcugcugugcggcagaagcugcagcaccaccuacaagggcguguacgagcugcagacccuggagcuggacauggccagccugaacaugaccaugccccugagcugcaccaagaacaacagccaccacuacaucauggugggcaacgagaccggccuggagcugacccugaccaacaccagcaucaucaaccacaaguucugcaaccugagcgacgcccacaagaagaaccuguacgaccacgcccugaugagcaucaucagcaccuuccaccugagcauccccaacuucaaccaguacgaggccaugagcugcgacuucaacggcggcaagaucagcgugcaguacaaccugagccacgccuacgccguggacgccgccaaccacugcggcaccaucgccaacggcgugcugcagaccuucaugagaauggccuggggcggcagcuacaucgcccuggacagcggcaagggcagcugggacugcaucaugaccagcuaccaguaccugaucauccagaacaccaccugggaggaccacugccaguucagcagacccagccccaucggcuaccugggccugcugagccagagaaccagagacaucuacaucagcagaagacugcugggcaccuucaccuggacccugagcgacagcgagggcaacgagacccccggcggcuacugccugaccagauggaugcugaucgaggccgagcugaagugcuucggcaacaccgccguggccaagugcaacgagaagcacgacgaggaguucugcgacaugcugagacuguucgacuucaacaagcaggccaucagaagacugaaggccgaggcccagaugagcauccagcugaucaacaaggccgugaacgcccugaucaacgaccagcugaucaugaagaaccaccugagagacaucaugggcauccccuacugcaacuacagcaaguacugcuaccugaaccacaccgugaccggcaagaccagccugcccagaugcugccuggugagcaacggcagcuaccugaacgagacccacuucagcgacgacaucgagcagcaggccgacaacaugaucaccgagcugcugcagaaggaguacaucgacagacagggcaagaccccccugggccugguggaccuguucguguucagcaccagcuucuaccugaucagcaucuuccugcaccuggugaagauccccacccacagacacgugaucggcaagcccugccccaagccccacagacugaaccacaugggcaucugcagcugcggccuguacaagcaccccggcgugcccgugaaguggaagagauga

SEQ ID NO: 38325 - RNA, 1473 nt, Artificial Sequence
  derived and/or modified CDS sequence (opt4) from LASV(LASV1000-NIG-2009;Clade II)__AIT17782__GPCmut11
augggccagaucaucaccuucuuccaggaggugccccacgugaucgaggaggugaugaacaucgugcugaucgcccugagccugcuggccauccugaagggcaucuacaacguggccaccugcggccuguucggccuggugagcuuccugcugcugugcggcagaagcugcagcaccaccuacaagggcguguacgagcugcagacccuggagcuggacauggccagccugaacaugaccaugccccugagcugcaccaagaacaacagccaccacuacaucauggugggcaacgagaccggccuggagcugacccugaccaacaccagcaucaucaaccacaaguucugcaaccugagcgacgcccacaagaagaaccuguacgaccacgcccugaugagcaucaucagcaccuuccaccugagcauccccaacuucaaccaguacgaggccaugagcugcgacuucaacggcggcaagaucagcgugcaguacaaccugagccacaccuacgccguggacgccgccaaccacugcggcaccaucgccaacggcgugcugcagaccuucaugagaauggccuggggcggcagcuacaucgcccuggacagcggcaagggcagcugggacugcaucaugaccagcuaccaguaccugaucauccagaacaccaccugggaggaccacugccaguucagcagacccagccccaucggcuaccugggccugcugagccagagaaccagagacaucuacaucagcagaagacugcugggcaccuucaccuggacccugagcgacagcgagggcaacgagacccccggcggcuacugccugaccagauggaugcugaucgaggccgagcugaagugcuucggcaacaccgccguggccaagugcaacgagaagcacgacgaggaguucugcgacaugcugagacuguucgacuucaacaagcaggccaucaagagacugaagaccgaggcccagaugagcauccagcugaucaacaaggccgugaacgcccugaucaacgaccagcugaucaugaagaaccaccugagagacaucaugggcauccccuacugcaacuacagcaaguacugcuaccugaaccacaccgugaccggcaagaccagccugcccagaugcugccuggugagcaacggcagcuaccugaacgagacccacuucagcgacgacaucgagcagcaggccgacaacaugaucaccgagcugcugcagaaggaguacaucgacagacagggcaagaccccccugggccugguggaccuguucguguucagcaccagcuucuaccugaucagcaucuuccugcaccuggugaagauccccacccacagacacguggugggcaagcccugccccaagccccacagacugaaccacaugggcaucugcagcugcggccuguacaagcaccccggcgugcccgugaaguggaagagauga

SEQ ID NO: 38326 - RNA, 1473 nt, Artificial Sequence
  derived and/or modified CDS sequence (opt4) from LASV(LASV221-NIG-2010;Clade II)__AIT17624__GPCmut11
augggccagaucaucaccuucuuccaggaggugccccacgugaucgaggaggugaugaacaucgugcugaucgcccugagccugcuggccauccugaagggcaucuacaacguggccaccugcggccuguucggccuggugagcuuccugcugcugugcggcagaagcugcagcaccaccuacaagggcguguacgagcugcagacccuggagcuggacauggccagccugaacaugaccaugccccugagcugcaccaagaacaacagccaccacuacaucauggugggcaacgagaccggccuggagcugacccugaccaacaccagcaucaucaaccacaaguucugcaaccugagcgacgcccacaagaagaaccuguacgaccacgcccugaugagcaucaucagcaccuuccaccugagcauccccaacuucaaccaguacgaggccaugagcugcgacuucaacggcggcaagaucagcgugcaguacaaccugagccacaccuacgccaucgacgccgccaaccacugcggcaccaucgccaacggcgugcugcagaccuucaugagaauggccuggggcggcagcuacaucgcccuggacagcggcaagggcagcugggacugcaucaugaccagcuaccaguaccugaucauccagaacaccaccugggaggaccacugccaguucagcagacccagccccaucggcuaccugggccugcugagccagagaaccagagacaucuacaucagcagaagacugcugggcaccuucaccuggacccugagcgacagcgagggcaacgagacccccggcggcuacugccugaccagauggaugcugaucgaggccgagcugaagugcuucggcaacaccgccguggccaagugcaacgagaagcacgacgaggaguucugcgacaugcugagacuguucgacuucaacaagcaggccaucagaagacugaagaccgaggcccagaugagcauccagcugaucaacaaggccgugaacgcccugaucaacgaccagcugaucaugaagaaccaccugagagacaucaugggcauccccuacugcaacuacagcaaguacugcuaccugaaccacaccgugaccggcaagaccagccugcccagaugcugccuggugagcaacggcagcuaccugaacgagacccacuucagcgacgacaucgagcagcaggccgacaacaugaucaccgagaugcugcagaaggaguacauggacagacagggcaagaccccccugggccugguggaccuguucguguucagcaccagcuucuaccugaucagcaucuuccugcaccuggugaagauccccacccacagacacgugaucggcaagcccugccccaagccccacagacugaaccacaugggcaucugcagcugcggccuguacaagcaccccggcgugcccgugaaguggaagagauga

SEQ ID NO: 38327 - RNA, 1473 nt, Artificial Sequence
  derived and/or modified CDS sequence (opt4) from LASV(LASV237-NIG-2010;Clade II)__AIT17638__GPCmut11
augggccagaucaucaccuucuuccaggaggugccccacgugaucgaggaggugaugaacaucgugcugaucgcccugagccugcuggccauccugaagggcaucuacaacguggccaccugcggccuguucggccuggugagcuuccugcugcugugcggcagaagcugcagcaccaccuacaagggcguguacgagcugcagacccuggagcuggacauggccagccugaacaugaccaugccccugagcugcaccaagaacaacagccaccacuacaucauggugggcaacgagaccggccuggagcugacccugaccaacaccagcaucaucaaccacaaguucugcaaccugagcgacgcccacaagaaggaccuguacgaccacgcccugaugagcaucaucagcaccuuccaccugagcauccccaacuucaaccaguacgaggccaugagcugcgacuucaacggcggcaagaucagcgugcaguacaaccugagccacaccuacgccguggacgccgccaaccacugcggcaccaucgccaacggcgugcugcagaccuucaugagaauggccuggggcggcagcuacaucgcccuggacagcggcaagggcagcugggacugcaucaugaccagcuaccaguaccugaucauccagaacaccaccugggaggaccacugccaguucagcagacccagccccaucggcuaccugggccugcugagccagagaaccagagacaucuacaucagcagaagacugcugggcaccuucaccuggacccugagcgacagcgagggcaacgagacccccggcggcuacugccugaccagauggaugcugaucgaggccgagcugaagugcuucggcaacaccgccguggccaagugcaacgagaagcacgacgaggaguucugcgacaugcugagacuguucgacuucaacaagcaggccaucagaagacugaagaccgaggcccagaugagcauccagcugaucaacaaggccgugaacgcccugaucaacgaccagcugaucaugaagaaccaccugagagacaucaugggcauccccuacugcaacuacagcaaguacugcuaccugaaccacaccgugaccggcaagaccagccugcccagaugcugccuggugagcaacggcagcuaccugaacgagacccacuucagcgacgacaucgagcagcaggccgacaacaugaucaccgagcugcugcagaaggaguacauggacagacagggcaagaccccccugggccugguggaccuguucguguucagcaccagcuucuaccugaucagcaucuuccugcaccugaucaagauccccacccacagacacaucaccggcaagcccugccccaagccccacagacugaaccacaugggcaucugcagcugcggccuguacaagcaccccggcgugcccgugaaguggaagagauga

SEQ ID NO: 38328 - RNA, 1473 nt, Artificial Sequence
  derived and/or modified CDS sequence (opt4) from LASV(LASV253-NIG-2011;Clade II)__AIT17670__GPCmut11
augggccagaucaucaccuucuuccaggaggugccccacgugaucgaggaggugaugaacaucgugcugaucgcccugagccugcuggccauccugaagggcaucuacaacguggccaccugcggccuguucggccuggugagcuuccugcugcugugcggcagaagcugcagcaccaccuacaagggcguguacgagcugcagacccuggagcuggacauggccagccugaacaugaccaugccccugagcugcaccaagaacaacagccaccacuacaucauggugggcaacgagaccggccuggagcugacccugaccaacaccagcaucaucaaccacaaguucugcaaccugagcgacgcccacaagaagaaccuguacgaccacgcccugaugagcaucaucagcaccuuccaccugagcauccccaacuucaaccaguacgaggccaugagcugcgacuucaacggcggcaagaucagcgugcaguacaaccugagccacaccuacgccguggacgccgccaaccacugcggcaccaucgccaacggcgugcugcagaccuucaugagaauggccuggggcggcagcuacaucgcccuggacagcggcaagggcagcugggacugcaucaugaccagcuaccaguaccugaucauccagaacaccaccugggaggaccacugccaguucagcagacccagccccaucggcuaccugggccugcugagccagagaaccagagacaucuacaucagcagaagacugcugggcaccuucaccuggacccugagcgacagcgagggcaacgagacccccggcggcuacugccugaccagauggaugcugaucgaggccgagcugaagugcuucggcaacaccgccguggccaagugcaacgagaagcacgacgaggaguucugcgacaugcugagacuguucgacuucaacaagcaggccaucagaagacugaaggccgaggcccagaugagcauccagcugaucaacaaggccgugaacgcccugaucaacgaccagcugaucaugaagaaccaccugagagacaucaugggcauccccuacugcaacuacagcaaguacugcuaccugaaccacaccgugaccggcagaaccagccugcccagaugcugccuggugagcaacggcagcuaccugaacgagacccacuucagcgacgacaucgagcagcaggccgacaacaugaucaccgagcugcugcagaaggaguacaucgacagacagggcaagaccccccugggccugguggaccuguucguguucagcaccagcuucuaccugaucagcaucuuccugcaccuggugaagauccccacccacagacacaucaucggcaagcccugccccaagccccacagacugaaccacaugggcaucugcagcugcggccuguacaagcaccccggcgugcccgugaaguggaagagauga

SEQ ID NO: 38329 - RNA, 1473 nt, Artificial Sequence
  derived and/or modified CDS sequence (opt4) from LASV(LASV254-NIG-2011;Clade II)__AIT17674__GPCmut11
augggccagaucaucaccuucuuccaggaggugccccacgugaucgaggaggugaugaacaucgugcugaucgcccugagccugcuggccauccugaagggcaucuacaacguggccaccugcggccuguucggccuggugagcuuccugcugcugugcggcagaagcugcagcaccaccuacaagggcguguacgagcugcagacccuggagcuggacaugaccaaccugaacaugaccaugccccugagcugcaccaagaacaacagccaccacuacaucauggugggcaacgagaccggccuggagcugacccugaccaacaccagcaucaucaaccacaaguucugcaaccugagcgacgcccacaagaagaaccuguacaaccacgcccugaugagcaucaucagcaccuuccaccugagcauccccaacuucaaccaguacgaggccaugagcugcgacuucaacggcggcaagaucagcgugcaguacaaccugagccacagcuacgccguggacgccgccaaccacugcggcaccaucgccaacggcgugcugcagaccuucaugagaauggccuggggcggcagcuacaucgcccuggacagcggcaagggcaacugggacugcaucaugaccagcuaccaguaccugaucauccagaacaccaccugggaggaccacugccaguucagcagacccagccccaucggcuaccugggccugcugagccagagaaccagagacaucuacaucagcagaagacugcugggcaccuucaccuggacccugagcgacagcgagggcaacgagacccccggcggcuacugccugaccagauggaugcugaucgaggccgagcugaagugcuucggcaacaccgccguggccaagugcaacgagaagcacgacgaggaguucugcgacaugcugagacuguucgacuucaacaagcaggccaucagaagacugaagaccgaggcccaggccaacauccagcugaucaacaaggccgugaacgcccugaucaacgaccagcugaucaugaagaaccaccugagagacaucaugggcauccccuacugcaacuacagcaaguacugcuaccugaaccacaccgugaccggcaagaccagccugcccagaugcugccuggugagcaacggcagcuaccugaacgagacccacuucagcgacgacaucgagcagcaggccgacaacaugaucaccgagcugcugcagaaggaguacauggacagacagggcaagaccccccugggccugguggaccuguucguguucagcaccagcuucuaccugaucagcaucuuccugcaccuggugaagauccccacccacagacacgugaucggcaagcccugccccaagccccacagacugaaccacaugggcaucugcagcugcggccuguacaagcaccccggcgugcccgugaaguggaagagauga

SEQ ID NO: 38330 - RNA, 1473 nt, Artificial Sequence
  derived and/or modified CDS sequence (opt4) from LASV(Nig08-A19;Clade III)__ADU56618__GPCmut11
augggccagaucgugaccuucuuccaggaggugccccacgugaucgaggaggugaugaacaucgugcugaucgcccugagcauccuggccauccugaagggccuguacaacaucgccaccugcggccugaucggccuggugaccuuccugcugcugagcggcagaagcugcagcaugaccuacaagggcguguacgagcugcagacccuggagcugaacaugaacacccugaacaugaccaugccccugagcugcaccaagaacaacagccaccacuacaucauggugggcaacgagaccggccuggagcugacccugaccaacaccagccugcugcaccacaaguucugcaaccugagcgacgcccacaagaagaaccuguacgaccacacccugaugagcaucaucagcaccuuccaccugagcauccccaacuucaaccaguacgaggccaugagcugcgacuucaacggcggcaagaucaccgugcaguacaaccugagccacagcuacgccaucgacgccgccaaccacugcggcaccguggccaacggcgugcugcagaccuucaugagaauggccuggggcggcagcuacaucgcccuggacagcggcagaggcaagugggacugcaucaugaccagcuaccaguaccugaucauccagaacaccaccugggaggaccacugccaguucagcagacccagccccaucggcuaccugggccugcugagccagagaaccagagacaucuacaucagcagaagacugcugggcaccuucaccuggacccugagcgacagcgagggcaacgagacccccggcggcuacugccugaccagauggaugcugaucgaggccgagcugaagugcuucggcaacaccgccguggccaagugcaacgagaagcacgacgaggaguucugcgacaugcugagacuguucgacuucaacaagcaggccaucagaagacugaaggccgaggcccagaugagcauccagcugaucaacaaggccgugaacgcccugaucaacgaccagcugaucaugaagaaccaccugagagacaucaugggcauccccuacugcaacuacagcaaguacugcuaccugaaccacaccagcaccggcagaaccagccugcccagaugcugccuggugagcaacggcagcuaccugaacgagacccacuucagcgacgacaucgagcagcaggccgacaacaugaucaccgagaugcugcagaaggaguaccuggacagacagggcaagaccccccugggccugguggaccuguucguguucagcaccagcuucuaccugaucagcaucuuccugcaccuggugaagauccccacccacagacacaucgugggcaagcccugccccaagccccacagacugaaccacaugggcaucugcagcugcggccuguacaagcagcccggcgugcccgugagauggaagagauga

SEQ ID NO: 38331 - RNA, 1476 nt, Artificial Sequence
  derived and/or modified CDS sequence (opt4) from LASV(G1180-SLE-2010;Clade IV)__AIT17168__GPCmut11
augggccagaucgugaccuucuuccaggaggugccccacgugaucgaggaggugaugaacaucgugcugaucgcccugagcauccuggccgugcugaagggccuguacaacuucgccaccugcggccuggugggccugcugaccuuccugcugcugugcggcagaagcugcaccgccagcagauacaagggcguguacgagcugcagacccuggagcugaacauggagacccugaacaugaccaugccccugagcugcaccaagaacaacagccaccacuacaucauggugggcaacgagaccggccuggagcugacccugaccaacaccagcaucaucaaccacaaguucugcaaccugagcgacgcccacaagaagaaccuguacgaccacgcccugaugagcaucaucagcaccuuccaccugagcauccccaacuucaaccaguacgaggccaugagcugcgacuucaacggcggcaagaucagcgugcaguacaaccugagccacagcuacgccggcgacgccgccaaccacugcggcaccguggccaacggcgugcugcagaccuucaugagaauggccuggggcggcagcuacaucgcccuggacagcggccacggcagcugggacugcaucaugaccagcuaccaguaccugaucauccagaacaccaccugggaggaccacugccaguucagcagacccagccccaucggcuaccugggccugcugagccagagaaccagagacaucuacaucagcagaagacugcugggcaccuucaccuggacccugagcgacagcgagggcaaggacacccccggcggcuacugccugaccagauggaugcugaucgaggccgagcugaagugcuucggcaacaccgccguggccaagugcaacgagaagcacgacgaggaguucugcgacaugcugagacuguucgacuucaacaagcaggccauccagagacugaaggccgaggcccagaugagcauccagcugaucaacaaggccgugaacgcccugaucaacgaccagcugaucaugaagaaccaccugagagacaucaugggcauccccuacugcaacuacagcaaguacugcuaccugaaccacaccaccaccggcaagaccagccugcccaagugcugccuggugagcaacggcagcuaccugaacgagacccacuucagcgacgacaucgagcagcaggccgacaacaugaucaccgagaugcugcagaaggaguacauggagagacagggcaagaccccccugggccugguggaccuguucguguucagcaccagcuucuaccugaucagcaucuuccugcaccuggugaagauccccacccacagacacaucgugggcaagagcugccccaagccccacagacugaaccacaugggcaucugcagcugcggccuguacaagcagcccggcgugcccgugaaguggaagagauga

SEQ ID NO: 38332 - RNA, 1476 nt, Artificial Sequence
  derived and/or modified CDS sequence (opt4) from LASV(G1442-SLE-2011;Clade IV)__AIT17180__GPCmut11
augggccagaucgugaccuucuuccaggaggugccccacgugaucgaggaggugaugaacaucgugcugaucgcccugagcauccuggccgugcugaagggccuguacaacguggccaccugcggccugaucggccuggugaccuuccugcugcugugcggcagaagcugcaccaccacccuguacaagggcguguacgagcugcagacccuggagcugaacauggagacccugaacaugaccaugccccugagcugcaccaagaacaacagccaccacuacaucagagugggcaacgagaccggccuggagcugacccugaccaacaccagcaucaucaaccacaaguucugcaaccugagcgacgcccacaagaagaaccuguacgaccacgcccugaugagcaucaucagcaccuuccaccugagcauccccaacuucaaccaguacgaggccaugagcugcgacuucaacggcggcaagaucagcgugcaguacaaccugagccacagcuacgccggcgacgccgccaaccacugcggcaccguggccaacggcgugcugcagaccuucaugagaauggccuggggcggcagcuacaucgcccuggacagcggcagaggcaacugggacugcaucaugaccagcuaccaguaccugaucauccagaacaccaccugggacgaccacugccaguucagcagacccagccccaucggcuaccugggccugcugagccagagaaccagagacguguacaucagcagaagacugcugggcaccuucaccuggacccugagcgacagcgagggcaaggacacccccggcggcuacugccugaccagauggaugcugaucgaggccgagcugaagugcuucggcaacaccgccguggccaagugcaacgagaagcacgacgaggaguucugcgacaugcugagacuguucgacuucaacaagcaggccauccagagacugaaggccgaggcccagaugagcauccagcugaucaacaaggccgugaacgcccugaucaacgaccagcugaucaugaagaaccaccugagagacaucaugggcauccccuacugcaacuacagcaaguacugcuaccugaacaacaccgccaccggcaagaccagccugcccaagugcugccugaucagcaacggcagcuaccugaacgagacccacuucagcgacgacaucgagcaggaggccgacaacaugaucaccgagaugcugcagaaggaguacauggagagacagggcaagaccccccugggccugguggaccuguucguguucagcaccagcuucuaccugaucagcaucuuccugcaccuggugaagauccccacccacagacacaucgugggcaagagcugccccaagccccacagacugaaccacaugggcaucugcagcugcggccuguacaagcagcccggcgugcccgugagauggaagagauga

SEQ ID NO: 38333 - RNA, 1476 nt, Artificial Sequence
  derived and/or modified CDS sequence (opt4) from LASV(G3010-SLE-2013;Clade IV)__AIT17344__GPCmut11
augggccagaucgugaccuucuuccaggaggugccccacgugaucgaggaggugaugaacaucgugcugaucgcccugagcauccuggccgugcugaagggccuguacaacuucgccaccugcggccuggugggccuggugaccuuccugcugcugugcggcagaagcugcaccaccagccuguacaagggcguguacgagcugcagacccuggagcugaacauggagacccugaacaugaccaugccccugagcugcaccaagaacaacagccaccacuacaucauggugggcaacgagaccggccuggagcugacccugaccaacaccagcaucaucaaccacaaguucugcaaccugagcgacgcccacaagaagaaccuguacaaccacgcccugaugagcaucaucagcaccuuccaccugagcauccccaacuucaaccaguacgaggccaugagcugcgacuucaacggcggcaagaucagcgugcaguacaaccugagccacagcuacgccggcgacgccgccagccacugcggcaccguggccaacggcgugcugcagaccuucaugagaauggccuggggcggcagcuacaucgcccuggacagcggcuacggcaagugggacugcaucaugaccagcuaccaguaccugaucauccagaacaccaccugggaggaccacugccaguucagcagacccagccccaucggcuaccugggccugcugagccagagaaccagagacaucuacaucagcagaagacugcugggcaccuucaccuggacccugagcgacagcgagggcaaggacacccccggcggcuacugccugaccagauggaugcugaucgaggccgagcugaagugcuucggcaacaccgccguggccaagugcaacgagaagcacgacgaggaguucugcgacaugcugagacuguucgacuucaacaagcaggccauccagagacugaagaccgaggcccagaugagcauccagcugaucaacaaggccgugaacgcccugaucaacgaccagcugaucaugaagaaccaccugagagacaucaugggcauccccuacugcaacuacagcaaguacugcuaccugaaccacaccaccaccggcaagaccagccugcccaagugcugccuggugagcaacggcagcuaccugaacgagacccacuucagcgacgacaucgagcagcaggccgacaacaugaucaccgagaugcugcagaaggaguacauggagagacagggcaagaccccccugggccugguggaccuguucguguucagcaccagcuucuaccugaucagcaucuuccugcaccuggugaagauccccacccacagacacaucgugggcaagagcugccccaagccccacagacugaaccacaugggcaucugcagcugcggccuguacaagcagcccggcgugcccgugagauggaagagauga

SEQ ID NO: 38334 - RNA, 1476 nt, Artificial Sequence
  derived and/or modified CDS sequence (opt4) from LASV(G502-SLE-2009;Clade IV)__AIT17126__GPCmut11
augggccagaucgugaccuucuuccaggaggugccccacgugaucgaggaggugaugaacaucgugcugaucgcccugagcauccuggccgugcugaagggccuguacaacuucgccaccugcggccuggugggccugcugaccuuccugcugcugugcggcagaagcugcaccaccggccuguacaagggcguguacgagcugcagacccuggagcugaacauggagacccugaacaugaccaugccccugagcugcaccaagaacaacagccaccacuacaucauggugggcaacgagaccggccuggagcugacccugaccaacaccagcaucaucaaccacaaguucugcaaccugagcgacgcccacaagaagaaccuguacgaccacgcccugaugagcaucaucagcaccuuccaccugagcauccccaacuucaaccaguacgaggccaugagcugcgacuucaacggcggcaagaucagcgugcaguacaaccugagccacagcuacgccggcgacgccgccgaccacugcggcaccguggccaacggcgugcugcagaccuucaugagaauggccuggggcggcagcuacaucgcccuggacagcggcagaggcagaugggacugcaucaugaccagcuaccaguaccugaucauccagaacaccaccugggaggaccacugccaguucagcagacccagccccaucggcuaccugggccugcugagccagagaaccagagacaucuacaucagcagaagacugcugggcaccuucaccuggacccugagcgacagcgagggcaaggacacccccggcggcuacugccugaccagauggaugcugaucgaggccgagcugaagugcuucggcaacaccgccguggccaagugcaacgagaagcacgacgaggaguucugcgacaugcugagacuguucgacuucaacaagcaggccauccagagacugaaggccgaggcccagaugagcauccagcugaucaacaaggccgugaacgcccugaucaacgaccagcuggugaugaagaaccaccugagagacaucaugggcauccccuacugcaacuacagcagauacugcuaccugaaccacaccaccaccggcagaaccagccugcccaagugcugccuggugagcaacggcagcuaccugaacgagacccacuucagcgacgacaucgagcagcaggccgacaacaugaucaccgagaugcugcagaaggaguacauggagagacagggcaagaccccccugggccugguggaccuguucguguucagcaccagcuucuaccugaucagcaucuuccugcaccuggugaagauccccacccacagacacaucgugggcaagagcugccccaagccccacagacugaaccacaugggcaucugcagcugcggccuguacaagcagcccggcgugcccgugaaguggaagagauga

SEQ ID NO: 38335 - RNA, 1476 nt, Artificial Sequence
  derived and/or modified CDS sequence (opt4) from LASV(G733-SLE-2010;Clade IV)__AIT17154__GPCmut11
augggccagaucgugaccuucuuccaggaggugccccacgugaucgaggaggugaugaacaucgugcugaucgcccugagcauccuggccgugcugaagggccuguacaacuucgccaccugcggcaucgugggccuggugagcuuccugcugcugugcggcagaagcugcaccaccagccuguacaagggcguguacgagcugcagacccuggagcugaacauggagacccugaacaugaccaugccccugagcugcaccaagaacaacagccaccacuacaucauggugggcaacgagaccggccuggagcugacccugaccaacaccagcaucaucaaccacaaguucugcaaccugagcgacgcccacaagaagaaccuguacgaccacgcccugaugagcaucaucagcaccuuccaccugagcauccccaacuucaaccaguacgaggccaugagcugcgacuucaacggcggcaagaucagcgugcaguacaaccugagccacagcuacgccggcgacgccgccaaccacugcggcaccaucgccaacggcgugcugcagaccuucaugagaauggccuggggcggcagcuacaucgcccuggacagcggcagagacagaugggacugcaucaugaccagcuaccaguaccugaucauccagaacaccaccugggaggaccacugccaguucagcagacccagccccaucggcuaccugggccugcugagccagagaaccagagacaucuacaucagcagaagacugcugggcaccuucaccuggacccugagcgacagcgagggcaaggacacccccggcggcuacugccugaccagauggaugcugaucgaggccgagcugaagugcuucggcaacaccgccguggccaagugcaacgagaagcacgacgaggaguucugcgacaugcugagacuguucgacuucaacaagcaggccauccagagacugaaggccgaggcccagaugagcauccagcugaucaacaaggccgugaacgcccugaucaacgaccagcugaucaugaagaaccaccugagagacaucaugggcauccccuacugcaacuacagcaaguacugcuaccugaaccacaccaccaccggcaagaccagccugcccaagugcugccuggugagcaacggcagcuaccugaacgagacccacuucagcgacgacaucgagcagcaggccgacaacaugaucaccgagaugcugcagaaggaguacauggagagacagggcaagaccccccugggccugguggaccuguucguguucagcaccagcuucuaccugaucagcaucuuccugcaccuggugaagauccccacccacagacacguggugggcaagagcugccccaagccccacagacugaaccacaugggcaucugcagcugcggccuguacggccagcccggcgugcccgugaaguggaagagauga

SEQ ID NO: 38336 - RNA, 1476 nt, Artificial Sequence
  derived and/or modified CDS sequence (opt4) from MOPV/LASV reassortant(IGS-1;Clade IV)__AFY05576__GPCmut11
augggccagaucgugaccuucuuccaggaggugccccacgugaucgaggaggugaugaacaucgugcugaucgcccugagcgugcuggccgugcugaagggccuguacaacuucgccaccugcggccuggugggccuggugaccuuccugcugcugugcggcagaagcugcaccaccagccuguacaagggcguguacgagcugcagacccuggagcugaacauggagacccugaacaugaccaugccccugagcugcaccaagaacaacagccaccacuacaucauggugggcaacgagaccggccuggagcugacccugaccaacaccagcaucaucaaccacaaguucugcaaccugagcgacgcccacaagaagaaccuguacgaccacgcccugaugagcaucaucagcaccuuccaccugagcauccccaacuucaaccaguacgaggccaugagcugcgacuucaacggcggcaagaucagcgugcaguacaaccugagccacagcuacgccggcgacgccgccaaccacugcggcaccguggccaacggcgugcugcagaccuucaugagaauggccuggggcggcagcuacaucgcccuggacagcggcagaggcaacugggacugcaucaugaccagcuaccaguaccugaucauccagaacaccaccugggaggaccacugccaguucagcagacccagccccaucggcuaccugggccugcugagccagagaaccagagacaucuacaucagcagaagacugcugggcaccuucaccuggacccugagcgacagcgagggcgaggacacccccggcggcuacugccugaccagauggaugcugaucgaggccgagcugaagugcuucggcaacaccgccguggccaagugcaacgagaagcacgacgaggaguucugcgacaugcugagacuguucgacuucaacaagcaggccauccagagacugaaggccgaggcccagaugagcauccagcugaucaacaaggccgugaacgcccugaucaacgaccagcugaucaugaagaaccaccugagagacaucaugggcauccccuacugcaacuacagcaaguacugcuaccugaaccacaccaccaccggcagaaccagccugcccaagugcugccuggugagcaacggcagcuaccugaacgagacccacuucagcgacgacaucgagcagcaggccgacaacaugaucaccgagaugcugcagaaggaguacauggagagacagggcaagaccccccugggccugguggaccuguucguguucagcaccagcuucuaccugaucagcaucuuccugcaccuggugaagauccccacccacagacacaucgugggcaagagcugccccaagccccacagacugaaccacaugggcaucugcagcugcggccuguacaagcagcccggcgugcccgugaaguggaagagauga

SEQ ID NO: 38337 - RNA, 1476 nt, Artificial Sequence
  derived and/or modified CDS sequence (opt4) from LASV(LM765-SLE-2012;Clade IV)__AIT17814__GPCmut11
augggccagaucgugaccuucuuccaggaggugccccacgugaucgaggaggugaugaacaucgugcugaucgcccugagcauccuggccgugcugaagggccuguacaacuucgccaccugcggccuggugggccuggugaccuuccugcugcugugcggcagaagcugcaccaccagccuguacaagggcguguacgagcugcagacccuggagcugaacauggagacccugaacaugaccaugccccugagcugcaccaagaacaacagccaccacuacaucauggugggcaacgagaccggccuggagcugacccugaccaacaccagcaucaucgaccacaaguucugcaaccugagcgacgcccacagaaagaaccuguacgaccacgcccugaugagcaucaucagcaccuuccaccugagcauccccaacuucaaccaguacgaggccaugagcugcgacuucaacggcggcaagaucagcgugcaguacaaccugagccacagcuacgccaaggacgccgccgaccacugcggcaccguggccaacggcgugcugcagaccuucaugagaauggccuggggcggcagcuacaucgcccuggacagcggcagaggcagaugggacugcaucaugaccagcuaccaguaccugaucauccagaacaccaccugggaggaccacugccaguucagcagacccagccccaucggcuaccugggccugcugagccagagaaccagagacaucuacaucagcagaagacugcugggcaccuucaccuggacccugagcgacagcgagggcaaggacacccccggcggcuacugccugaccagauggaugcugaucgaggccgagcugaagugcuucggcaacaccgccguggccaagugcaacgagaagcacgacgaggaguucugcgacaugcugagacuguucgacuucaacaagcaggccauccagagacugaaggccgaggcccagaugagcauccagcugaucaacaaggccgugaacgcccugaucaacgaccagcugaucaugaagaaccaccugagagacaucaugggcauccccuacugcaacuacagcaaguacugcuaccugaaccacaccaccaccggcaagaccagccugcccaagugcugccuggugagcaacggcagcuaccugaacgagacccacuucagcgacgacaucgagcagcaggccgacaacaugaucaccgagaugcugcagaaggaguacauggagagacagggcaagaccccccugggccugguggaccuguucguguucagcaccagcuucuaccugaucagcaucuuccugcaccuggugaagauccccacccacagacacaucgugggcaagcccugccccaagccccacagacugaaccacaugggcaucugcagcugcggccuguacaagcagcccggcgugcccgugaaguggaagagauga

SEQ ID NO: 38338 - RNA, 1476 nt, Artificial Sequence
  derived and/or modified CDS sequence (opt4) from LASV(LM776-SLE-2012;Clade IV)__AIT17824__GPCmut11
augggccagaucgugaccuucuuccaggaggugccccacgugaucgaggaggugaugaacaucgugcugaucgcccugagcauccuggccgugcugaagggccuguacaacuucgccaccugcggccuggugggccuggugaccuuccugcugcugugcggcagaagcugcaccaccagcguguacaagggcguguacgagcugcagacccuggagcugaacauggagacccugaacaugaccaugccccugagcugcaccaagaacaacagccaccacuacaucauggugggcaacgagaccggccuggagcugacccugaccaacaccagcaucaucaaccacaaguucugcaaccugagcgacgcccacaagaagaaccuguacgaccacgcccugaugagcaucaucagcaccuuccaccugagcauccccaacuucaaccaguacgaggccaugagcugcgacuucaacggcggcaagaucagcgugcaguacaaccugagccacagcuacgccggcgacgccgccaaccacugcggcaccguggccaacggcgugcugcagaccuucaugagaauggccuggggcggcagcuacaucgcccuggacagcggccacggcaagugggacugcaucaugaccagcuaccaguaccugaucauccagaacaccaccugggaggaccacugccaguucagcagacccagccccaucggcuaccugggccugcugagccagagaaccagagacaucuacaucagcagaagacugcugggcaccuucaccuggacccugagcgacagcgagggcaaggacacccccggcggcuacugccugaccagauggaugcugaucgaggccgagcugaagugcuucggcaacaccgccguggccaagugcaacgagaagcacgacgaggaguucugcgacaugcugagacuguucgacuucaacaagcaggccauccagagacugaaggccgaggcccagaugagcauccagcugaucaacaaggccgugaacgcccugaucaacgaccagcugaucaugaagaaccaccugagagacaucaugggcauccccuacugcaacuacagcaaguacugcuaccugaaccacaccaccaccggcaagaccagccugcccaagugcugccuggugagcaacggcagcuaccugaacgagacccacuucagcgacgacaucgagcagcaggccgacaacaugaucaccgagaugcugcagaaggaguacauggagagacagggcaagaccccccugggccugguggaccuguucguguucagcaccagcuucuaccugaucagcaucuuccugcaccuggugaagauccccacccacagacacaucgugggcaagagcugccccaagccccacagacugaaccacaugggcaucugcagcugcggccuguacaagcagcccggcgugcccgugagauggaagagauga

SEQ ID NO: 38339 - RNA, 1476 nt, Artificial Sequence
  derived and/or modified CDS sequence (opt4) from LASV(Mad39;Clade IV)__ANH09722__GPCmut11
augggccagaucgugaccuucuuccaggaggugccccacgugaucgaggaggugaugaacaucgugcugaucgcccugagcauccuggccgugcugaagggccuguacaacguggccaccugcggccugaucggccuggugaccuuccugcugcugugcggcagaagcugcaccaccacccuguacaagggcguguacgagcugcaggcccuggagcugaacauggagacccugaacaugaccaugccccugagcugcaccaagaacaacagccaccacuacaucagagugggcaacgagaccggccuggagcugacccugaccaacaccagccugaucaaccacaaguucugcaaccugagcgacgcccacaagaagaaccuguacgaccacgcccugaugagcaucaucagcaccuuccaccugagcauccccaacuucaaccaguacgaggccaugagcugcgacuucaacgacggcaagaucagcgugcaguacaaccugagccacaccuacgccggcgacaccgccaaccacugcggcaccguggccaacggcgugcugcagaccuucaugagaauggccuggggcggcagcuacaucgcccuggacagcggcagaggcggcugggacugcaucaugaccagcuaccaguaccugaucauccagaacaccaccugggaggaccacugccaguucagcagacccagccccaucggcuaccugggccugcugagccagagaaccagagacaucuacaucagcagaagacugcugggcaccuucaccuggacccugagcgacagcgagggcaaggacacccccggcggcuacugccugaccagauggaugcugaucgaggccgagcugaagugcuucggcaacaccgccguggccaagugcaacgagaagcacgacgaggaguucugcgacaugcugagacuguucgacuucaacaagcaggccauccagagacugaaggccgaggcccagaugagcauccagcugaucaacaaggccgugaacgcccugaucaacgaccagcugaucaugaagaaccaccugagagacaucaugggcauccccuacugcaacuacagcaaguacugcuaccugaaccacaccgugaccggcaagaccagccugcccaagugcugccuggugagcaacggcagcuaccugaacgagacccacuucagcgacgacaucgagcagcaggccgacaacaugaucaccgagaugcugcagaaggaguacauggagagacagggcaagaccccccugggccugguggaccuguucguguucagcaccagcuucuaccugaucagcaucuuccugcaccuggugaagauccccacccacagacacguggugggcaagcccugccccaagccccacagacugaaccacaugggcaucugcagcugcggcuucuacaagcagcccggcgugcccgugagauggaagagauga

SEQ ID NO: 38340 - RNA, 1476 nt, Artificial Sequence
  derived and/or modified CDS sequence (opt4) from LASV(Z0947-SLE-2011;Clade IV)__AIT17840__GPCmut11
augggccagaucgugaccuucuuccaggaggugccccacgugaucgaggaggugaugaacaucgugcugaucgcccugagcauccuggccgugcugaagggccuguacaacuucgccaccugcggccuggugggccuggugaccuuccugcugcugugcggcagaagcugcaccaucagccuguacaagggcguguacgagcugcagacccuggagcugaacauggagacccugaacaugaccaugccccugagcugcaccaagaacaacagccaccacuacaucauggugggcaacgagaccggccuggagcugacccugaccaacaccagcaucaucaaccacaaguucugcaaccugagcgacgcccacaagaagaaccuguacgaccacgcccugaugagcaucaucagcaccuuccaccugagcauccccaacuucaaccaguacgaggccaugagcugcgacuucaacggcggcaagaucagcgugcaguacaaccugagccacagcuacgccggcgacgccgccaaccacugcggcaccguggccaacggcgugcugcagaccuucaugagaauggccuggggcggcagcuacaucgcccuggacagcggcagagacagaugggacugcaucaugaccagcuaccaguaccugaucauccagaacaccaccugggaggaccacugccaguucagcagacccagccccaucggcuaccugggccugcugagccagagaaccagagacaucuacaucagcagaagacugcugggcaccuucaccuggacccugagcgacagcgagggcaaggacacccccggcggcuacugccugaccagauggaugcugaucgaggccgagcugaagugcuucggcaacaccgccguggccaagugcaacgagaagcacgacgaggaguucugcgacaugcugagacuguucgacuucaacaagcaggccauccagagacugaaggccgaggcccagaugagcauccagcugaucaacaaggccgugaacgcccugaucaacgaccagcugaucaugaagaaccaccugagagacaucaugggcauccccuacugcaacuacagcaaguacugcuaccugaaccacaccaccaccggcaagaccagccugcccaagugcugccuggugagcaacggcagcuaccugaacgagacccacuucagcgacgacaucgagcagcaggccgacaacaugaucaccgagaugcugcagaaggaguacauggagagacagggcaagaccccccugggccugguggaccuguucguguucagcaccagcuucuaccugaucagcaucuuccugcaccuggugaagauccccacccacagacacaucgugggcaagcccugccccaagccccacagacugaaccacaugggcaucugcagcugcggccuguacaagcagcccggcgugcccgugaaguggaagagauga

SEQ ID NO: 38341 - RNA, 1476 nt, Artificial Sequence
  derived and/or modified CDS sequence (opt5) from LASV(Josiah;Clade IV)__NP_694870__GPCmut11
augggccagaucgugaccuucuuucaagaggucccccacguuauugaagaggugaugaacaucgugcugauugcccucagcguccuggcugugcuuaaggggcuguacaauuucgccacaugcggacucguuggccuggugacguuucuucugcucugugggagauccugcaccacaucucuguauaaaggagucuacgaacugcagacccucgagcugaacauggaaacacuuaauaugaccaugccucugagcuguacaaagaacaauucccaucacuauaucauggugggcaacgagaccgggcucgagcugacgcuuaccaauacaucuauuaucaaccauaaauucugcaaucugagcgacgcgcacaagaaaaaccucuacgaucaugcucugauguccaucauuucuaccuuucaccugagcaucccgaauuucaaccaguaugaagccauguccugugacuuuaauggaggcaagauuagcguucaguacaaccucucucacuccuaugccggcgaugcugccaaucauugcgggacaguggcuaacggaguccugcaaaccuucaugcggauggccuggggcgggagcuacaucgcgcuugacucuggacgcggcaacugggauuguauuaugacguccuaccaguaucugaucauucagaauacaaccugggaggaccacugccaguuuagcagacccucuccuaucggguaccucggacugcuuucccaacggacacgcgauaucuauauuagcagacggcugcucggcaccuucaccuggacacuguccgacucugaaggcaaggauacgcccgggggauacugucugacccgcuggaugcucaucgaggccgagcugaaaugcuuuggcaacacagcuguggccaaguguaaugaaaaacaugacgaggaguucugcgauaugcuuagacuguuugacuucaacaagcaggcuauucagcggcucaaagccgaagcgcagaugagcauccaacugauuaauaaggccgugaacgcucuuaucaaugaucagcugaucaugaagaaccaccuccgcgacauuauggggaucccuuauugcaauuacuccaaauauuguuaccugaaccacaccacaaccggaagaacgagccugcccaagugcugucucgucucuaauggcuccuaccugaacgaaacacauuucagcgacgauauugagcagcaagccgacaauaugaucaccgagaugcuucagaaagaauauauggagcggcaggggaagaccccucugggacucguugaucuguuuguguucucuaccagcuuuuaccugauuuccaucuuccuucaccucgugaaaaucccgacacaucgccacauugucggcaagucuugccccaaaccucauagacugaaccacaugggcaucuguagcugcgggcuguauaagcagcccggagugccuguuaaguggaaacgguga

SEQ ID NO: 38342 - RNA, 1473 nt, Artificial Sequence
  derived and/or modified CDS sequence (opt5) from LASV(LP;Clade I)__AAF86701__GPCmut11
augggccagaucauuaccuucuuucaagaggugccccacgucaucgaagagguuaugaacauugugcugaucgcccucagccugcuugcuauucugaaggggcucuacaauaucgccacaugcggaaucauuggccugguggcguuccuuuuucugugugggaaauccugcucucucacgcugaagggaggcuaugaacugcagacccucgagcugaacauggaaacacuuaauaugaccaugccucugagcuguaccaaaaacuccucucaucacuacaucagagucgggaaugagacaggacucgagcugacacuuaccaacacgagcauuaucaaucauaaguucugcaaccuguccgacgcucacaaaaagaaucucuaugaucaugcccugaugucuauuaucagcaccuuucaccuguccauuccgaacuucaaucaguacgaagccaugagcugugacuuuaacggcggcaagaucucugugcaguauaaucucucccacagcuacgcuggggaugccgcugagcauugcggaacaguugccaacggcgugcugcaaaccuucaugcggauggcguggggagggcgcuauaucgcccuugacucuggcaaagggaauugggauuguauuaugacauccuaccaguaccugaucauucagaacaccacgugggaagaccacugccaguuuagcagacccucuccuaucggauaucucggccugcuuucccaacggacacgcgauauuuacaucagcagacggcugcucggcaccuucacauggacccuguccgacucugaggggaacgagacccccggaggcuauugucugacacgcuggaugcucaucgaagcugagcugaagugcuuugggaauacggccgucgcuaaauguaacgaaaagcaugaugaggaguucugcgacaugcuuagacuguuugauuucaauaaacaggccauucggcgccucaaggcggaagcccagaugagcauccagcugauuaacaaggcugugaaugcccuuaucaacgaccaacugauuaugaaaaaucaccucagagauaucaugggaaucccuuacugcaacuauuccaaguacuguuaucugaaucacaccagcucuggccggacaucccugcccaaaugcugucucauuagcaacgggucuuaccugaaugagacccaguucagcgacgacaucgaacagcaagcugauaacaugauuacagagaugcuucagaaggaauacaucgagcgccagggaaaaaccccucugggccucguugacauuuuuaucuucuccacgucuuuuuaucugauuagcaucuuccugcaucuuaucaagauuccgacacacagacauaucgugggcaaacccugcccuaagccccaccggcucaaucauaugggggucuguuccugcggacuguacaagcacccuggcgugcccaccaaauggaagcgcuga

SEQ ID NO: 38343 - RNA, 1473 nt, Artificial Sequence
  derived and/or modified CDS sequence (opt5) from LASV(803213;Clade II)__AAF86703__GPCmut11
augggccagaucauuaccuucuuucaagaggugccccacgucaucgaagagguuaugaacauugugcugaucgcccucagccugcuugcuauucugaaggggaucuacaauguggccacaugcggacucuucggccugaucuccuuucuucugcucugugggagaucuugcagcgucacguauaaaggaguguacgaacugcagacccuggagcucaacauggcgaaucugaacaugacaaugccucuuuccuguaccaagaauaacucucaucacuauauuaugguuggcaaugaaacagggcuggagcucacccugacaaacaccagcaucauuaaucauaaauucugcaaccuuuccgacgcucacaagaaaaaucuguacgaucaugcccucaugucuaucauuagcacguuucaccuguccaucccgaacuucaaucaguaugaggccaugagcugugacuuuaacggaggcaagauuucugugcaguacaaucugucccacagcuucgcugucgaugccgcuaaccauugcggcaccaucgccaacggggugcuccaaacauuuaugcggauggcguggggaggcucuuauaucgcccuggacuccgggaagggaaauugggauuguauuaugaccagcuaccaguaccuuaucauucagaacacaaccugggaagaccacugccaguucucucgccccuccccuaucggcuaucuggggcuccugagccaaagaacgcgggauauuuacaucucccgcagacuucugggaacauuuaccuggacacucucugacagcgagggcaaugaagcucccggcggguauugucugacccgguggaugcugaucgaggccgagcucaaaugcuucggaaacaccgcuguugccaaguguaaugaaaaacaugaugaggaauuuugcgacaugcugcgccuuuucgauuucaacaagcaggcgauuaaaagacugaagacagaggcccagauguccauccagcucauuaauaaggcugugaacgcccugaucaaugaccaacuuauuaugaaaaaccaucugcgggauaucaugggcaucccuuacugcaauuauagccgcuacuguuaucucaaccacacggucaccgggaagacaucucugcccagaugcugucugguguccaauggaagcuaccucaacgaaacccacuuuucugacgacauugagcagcaggcugauaauaugaucacagagaugcugcaaaaagaauacauggaccggcagggcaagaccccucuugggcugguggaucucuucgucuuuagcacguccuucuaucugauuucuaucuuucugcaccuuguuaaaauuccgacacaucgccacaucgugggaaagcccugcccuaaaccccauagacucaaccacaugggcauuuguagcugcggccuguacaagcacccuggggugcccgucaaguggaaacgguga

SEQ ID NO: 38344 - RNA, 1473 nt, Artificial Sequence
  derived and/or modified CDS sequence (opt5) from LASV(GA391;Clade III)__CAA36645__GPCmut11
augggccagaucgugaccuucuuucaagaggucccccacguuauugaagaggugaugaacaucgugcugauugcccucagcauccuggcuauucuuaaggggcuguacaaugucgccacaugcggacucaucggccuggugacguuccuucugcucuccgggagaucuuguagccugaucuauaaaggaaccuacgaacugcagacacucgagcugaacauggaaacccuuaauaugacaaugccucuguccugcaccaagaacaauucucaucacuauauucggguuggcaacgagacagggcucgagcugacccuuacgaauaccagcauccugaaccauaaauuuuguaaucucuccgacgcgcacaagcgcaaccuguacgaucauucucugaugagcauuaucuccacauuccaccucagcauuccgaauuuuaaccaguaugaagcuaugucuugcgacuucaauggaggcaaaaucaccgugcaguacaaccugucccacagcuuugccgucgaugccgcuggccauugugggacacuugccaauggagugcugcaaaccuucaugagaauggcuuggggcgggucuuauauugcccucgacuccggacggggcaacugggauugcaucaugacgagcuaccaguaccugaucauucagaacacaaccugggacgaucacugucaguuuucucgccccuccccuaucggguaucuuggacugcucagccaaagaacacgggacauuuacaucucccgcagacugcugggcaccuucaccuggacacucucugauagcgagggcaaugaaacgcccgggggauauugccugacccgguggaugcuuauugaggcggagcugaaguguuuuggcaacacagccguugcuaagugcaaugaaaaacaugacgaggaguucugugauaugcuccgccuguuugacuucaacaagcaggccaucagacggcuuaaaaccgaagcucagauguccauccagcugauuaauaaggccgugaacgcgcucaucaaugaucaacugauuaugaaaaaccaucugcgcgacaucauggggauuccuuacugcaauuauagcagauacugcuaucucaaccacacaucuaccggaaagacgucccugccccgguguugccuuaucagcaauggcucuuaccugaacgaaacaaaguucagcgacgauaucgagcagcaggccgacaauaugauuaccgagaugcuccaaaaagaauacaucgaucgccaggggaagaccccucugggacuggucgaccuuuuuguguucuccacaucuuuuuaucucauuagcaucuuccugcaccuggugaaaauuccgacccacagacauaucgucggcaagcccuguccuaaaccccaccggcucaaccauaugggcauuugcuccugugggcuguacaagcagccuggaguucccgugagauggaaacgcuga

SEQ ID NO: 38345 - RNA, 1476 nt, Artificial Sequence
  derived and/or modified CDS sequence (opt5) from LASV(AV;Clade V)__CCA30314__GPCmut11
augggccagaucgugaccuucuuucaagaggucccccacguuauugaagaggugaugaacaucgugcugauugcccucagcauccuggcuguccuuaaggggcuguacaauauugccacaugcggacucaucggccugaucacguuccuucugcucugugggagauccugcucuagcaaccuguauaaaggaguguacgaacugcagucccucgaccugaauauggagacccuuaacaugacaaugccucugucuuguaccaagaauaacagccaucacuauauucggguuggcaaugauacagggcucgaacugacccuuacaaacaccuccauccugaaucauaaauuuugcaaccucucugacgcgcacaagaaagaucuguacgaccaugcucugaugagcauuaucuccacguuccaccucagcauuccgaauuuuaaccaguaugaggccaugucuugugauuucaauggaggcaagaucuccgugcaguacaaccugagccacucuuaugccauugacgcugccaaucauugcggcaccgucgcuaacgggauccuucaaacauuuaugcgcauggccuggggaggcuccuacaucgcgcuggauagcgggagaggaaacugggacuguauuaugaccucuuaccaguaucucaucauucagaauacaaccugggagaaccacugccaguucucccggcccagcccuaucggcuaccuggggcuucugucccaacgcacgagagauauuuauaucucucggcgccuccugggaacauuuaccuggacacugagcgacuccgaaggcaaugccacccccggcggguacugucucaccagauggaugcugaucgaggcugaacuuaagugcuucggaaacacagccguggcuaaauguaaugagaagcaugaugaggaauuuugcgacaugcugcgccucuucgauuuuaacaaacaggccauuagccggcugaagucugaggcgcagauguccauccagcuuauuaauaaagccguuaacgcucugaucaaugaccaacucauuaugaagaaccaccugagagacaucaugggcaucccuuauugcaauuacagcaaguauuguuaccugaaccacacgauuaccgggaaaacaucucuccccaagugcugucuggugagcaauggauccuaccuuaacgaaacccauuucucugaugacaucgagcagcaggccgauaauaugauuacagaaaugcugcaaaaagaguauauggagcggcagggcaagaccccucucgggcuggucgaccuguucguguuuagcacguccuucuaccuuaucagcauuuuucuccgccuggugaaaaucccgacacacagacauauugucggaaagcccugcccuaaaccccaccggcugaaccauaugggcaucuguucuugcggccucuauaagcagccugggguucccgugcgcuggaagagauga

SEQ ID NO: 38346 - RNA, 1473 nt, Artificial Sequence
  derived and/or modified CDS sequence (opt5) from LASV(Togo/2016/7082;Clade VI)__AMR44577__GPCmut11
augggccagaucauuaccuucuuucaagaggugccccacgucaucgaagagguuaugaacauugugcugaucgcccucagccugcuugcuauucugaaggggguguacaaugucgccacaugcggaaucaucggccucgugacguuccuguuucuuugugggagauccugcucucugauuuauaaaggaagcuacgaacuccagacccuggagcugaacauggaaacacucaauaugaccaugccucuguccuguacaaagaacucuagccaucacuauauccggguuggcaaugagaccgggcuugagcugacacucaccaacacguccauuaucaaucauaaauucugcaaccugucugacgcgcacaagcgcaaucuuuacgaucaugcucugaugagcauucucuccaccuuucaccugagcaucccgaacuucaaucaguaugaagccaugucuugugacuuuaacggaggcaaaauuuccgugcaguacaaucugagccacgccuaugcugucgaugccgcugagcauugcggcacaguggccaacgggguucuccaaaccuucaugagaauggcguggggaggcucuuacaucgcccuggacuccgggcggggaaauugggauuguaucaugacaagcuaccaguaucuuauuauccagaacaccacgugggaagaccacugccaguuuucucgccccuccccuauuggcuaccuggggcuccugagccaaagaacacgggauaucuauauuucccgcagacuucugggaaccuucacauggacccucucugacagcgagggcaacgagacccccggcggguacugucugacacgguggaugcugaucgaagcugagcucaagugcuuuggaaauacggccguggcuaaguguaacgaaaaacaugaugaggaguucugcgacaugcugcgccuuuuugauuucaauaagcaggccauccagagacugaaauccgaagcgcagaugagcauucaacucaucaacaaggccgucaaugcucugauuaacgaccagcuuaucaugaaaaaucaucugcgggauaugaugggcauuccuuauugcaacuacucuaaguauuguuaccucaaucacaccuccagcgggcgcacaucucugcccaagugcugucuggugagcaacggauccuaccucaaugagacccacuucucugacgacaucgaacagcaagccgauaacaugaucacagagaugcugcagaaagaauauauugacagacagggcaagaccccucuugggcugguggaucucuuugucuucagcacguccuuuuaccugaucagcauuuuccugcaccuuaucaaaauuccgacacaucggcacaucguuggaaagcccugcccuaaaccccaucgccucaaucacaugggcauuuguucuugcggccuguauaagcagccuggggugcccaccagauggaaacgguga

SEQ ID NO: 38347 - RNA, 1473 nt, Artificial Sequence
  derived and/or modified CDS sequence (opt5) from LASV(KAK-428;Clade n.d. (VII))__ANH09740__GPCmut11
augggccagaucgugaccuucuuucaagaggucccccacguuauugaagaggugaugaacaucgugcugauugcccucagccugcuugcuauccugaaggggcucuacaauuucgccacaugcggagucauuggccugaucacguuucuucugcucugugggagauccugcucugcgaccuauaaaggacaguacgaacugcagacacuggagcucaacauggaaagccugaauaugaccaugccucuuuccuguacaaagaacaauucucaucacuauauccgggcuggcaacaauaccgggcuggagcucacacugaccaacacgagcauuaucucccauaaauucugcaaucuuucugacgcccacaagaaaaaccuguacgaucauacccucaugagcauuaucacaaccuuucaccuguccauuccgaauuucaaccaguaugaggccaugagcugugacuuuaauggaggcaagaucucuauucaauacaaccugucccacagcuaugcuggcgaugccgcucagcauugcgggacaguggccaauggaguucuccagaccuucaugcgcauggcguggggcgggucuuaccuggcccuugacuccggaagacggggcugggauuguaucaucagcucuuaccaguaucugauuauccaaaacacgacaugggacgaucacugccaguuuucccgccccagcccuauuggguaccucggauucgugucccagaagaccagagacaucuauauuucucggcgccugcuuggcacauuuaccuggacccugagcgauuccgaaggccaugacaugcccgggggauacugucucacaagauggaugcugaucgaggcugaucugaaaugcuucggcaacacggccgucgcuaaguguaaugaaaaacacgacgaggaguuuugcgauauguggcgccucuucgacuucaacaagcaggccauccaacggcugaaagcggaagcccagaugaauauucagcuuaucaacaaggcugugaaugcccugauuaacgaccaacucaugaugaagaaucaccugagagauaucauggggauuccuuauugcaacuacagcaaauuuuguuaucuuaauaacaccacaaccggacggacaucucugccccgcugcugucucaucuccaauggcagcuaccugaacgagacccauuucucugacgauaucgaacagcaggcugacaauaugauuacggagaugcugcagaaggaauacauggauagacaagggaaaacaccucucggacugguugaccuuuuuguguucagcaccuccuuuuaucugaucaccauuuuccuccaccuggucaagaucccgacacaucggcacauugugggcaaacccugcccuaagccccaucgccugaaccacaugggcaucuguucuugcgggcuuuacaaacagccuggagugcccgucagauggaagcgguga

SEQ ID NO: 38348 - RNA, 1473 nt, Artificial Sequence; identical to SEQ ID NO: 38342
  derived and/or modified CDS sequence (opt5) from LASV(Pinneo-NIG-1969;Clade I)__AIT17836__GPCmut11

SEQ ID NO: 38349 - RNA, 1473 nt, Artificial Sequence
  derived and/or modified CDS sequence (opt5) from LASV(ISTH0009-NIG-2011;Clade II)__AIT17404__GPCmut11
augggccagaucauuaccuucuuucaagaggugccccacgucaucgaagagguuaugaacauugugcugaucgcccucagccugcuugcuauucugaaggggaucuacaauguggccacaugcggacucuucggccuggucuccuuucuucugcucugugggagaucuugcagcacgaccuauaaaggaguguacgaacugcagacacuggagcucgacauggcgucccugaacaugaccaugccucuuucuuguacaaagaauaacagccaucacuauaucaugguuggcaaugaaaccgggcuggagcucacacugaccaacacguccauuaucaaucauaaauucugcaaccuuucugaugcucacaagaaaaaucuguacgaccaugcccucaugagcauuaucuccaccuuucaccugagcauuccgaacuucaaucaguaugaggccaugucuugugauuuuaacggaggcaagaucuccgugcaguacaaucugagccacgcuuaugccgucgacgcugccaaccauugcggcacaauugcgaauggggugcuccaaaccuucaugcggauggccuggggaggcucuuacaucgcucuggauuccgggaagggaagcugggacuguaucaugacaucuuaccaguaucuuauuauccagaacaccacgugggaagaucacugccaguuuucccgccccagcccuauuggcuaccuggggcuccugucccaaagaacacgggacaucuauauuucucgcagacuucugggaaccuucacauggacccucagcgauuccgagggcaacgaaacccccggcggguacugucugacacgguggaugcugaucgaggccgagcucaaaugcuuuggaaauacggcuguugccaaguguaacgaaaaacaugacgaggaguucugcgauaugcugcgccuuuuugacuucaauaagcaggcgaucagacggcugaaaaccgaagcccagaugagcauucagcucaucaacaaggcugugaaugcccugauuaacgaucaacuuaucaugaagaaucaucugcgcgacauuaugggcaucccuuauugcaacuacucuaaauauuguuaccucaaucacacagucaccgggaagacaucccugcccagaugcugucuggugagcaacggaucuuaccucaaugaaacccacuucagcgacgauaucgagcagcaggcugacaacaugauuacggagcugcuucaaaaagaauauauggaucggcagggcaagacaccucuggggcucguggaccuguuugucuucuccaccucuuuuuaccugaucagcauuuuccuucaccucaucaaaauuccgacccaucgccacaucacaggaaagcccugcccuaaaccccauagacugaaucacaugggcauuuguuccugcggccuguauaagcacccugggguucccgugaaguggaaacgguga

SEQ ID NO: 38350 - RNA, 1473 nt, Artificial Sequence
  derived and/or modified CDS sequence (opt5) from LASV(ISTH2010-NIG-2012;Clade II)__AIT17482__GPCmut11
augggccagaucauuaccuucuuucaagaggugccccacgucaucgaagagguuaugaacauugugcugaucgcccucagccugcuugcuauucugaaggggaucuacaauguggccacaugcggacucuucggccuggucuccuuucuucugcucugugggagaucuugcagcacgaccuauaaaggaguguacgaacugcagacacuggagcucgacauggcgucccugaacaugaccaugccucuuucuuguacaaagaauaacagccaucacuauaucaugguuggcaaugaaaccgggcuggagcucacacugaccaacacguccauuaucaaucauaaauucugcaaccuuucugaugcucacaagaaaaaucuguacgaccaugcccucaugagcauuaucuccaccuuucaccugagcauuccgaacuucaaucaguaugaggccaugucuugugauuuuaacggaggcaagaucuccgugcaguacaaucugagccacgcuuaugccgucgacgcugccaaccauugcggcacaauugcgaauggggugcuccaaaccuucaugcggauggccuggggaggcucuuacaucgcucuggauuccgggaagggaagcugggacuguaucaugacaucuuaccaguaucuuauuauccagaacauuaccugggaagaucacugccaguuuucccgccccagcccuaucggcuaccuggggcuccugucccaaagaacgcgggacauuuauaucucucgcagacuucugggaacauucaccuggacacucagcgauuccgagggcaacgaaacccccggcggguacugucugacccgguggaugcugaucgaggccgagcucaaaugcuuuggaaauacagcuguugccaaguguaacgaaaaacaugacgaggaguucugcgauaugcugcgccuuuuugacuucaauaagcaggcgauuagacggcugaaaacggaagcccagaugagcauccagcucauuaacaaggcugugaaugcccugaucaacgaucaacuuauuaugaagaaucaucugcgcgacaucaugggcaucccuuauugcaacuacucuaaauauuguuaccucaaucacaccgucacagggaagaccucccugcccagaugcugucuggugagcaacggaucuuaccucaaugaaacacacuucagcgacgauauugagcagcaggcugacaacaugaucaccgagcugcuucaaaaagaauauauugaucggcagggcaagacgccucuggggcucguggaccuguuugucuucuccacaucuuuuuaccugaucagcauuuuccuucaccucguuaaaaucccgacccaucgccacguggugggaaagcccugcccuaaaccccauagacugaaucacaugggcauuuguuccugcggccuguauaagcacccugggguccccgugaaguggaaacgguga

SEQ ID NO: 38351 - RNA, 1473 nt, Artificial Sequence
  derived and/or modified CDS sequence (opt5) from LASV(Lassa virus/H.sapiens-wt/NGA/2015/ISTH_0543;Clade II)__AVO03639__GPCmut11
augggccagaucauuaccuucuuucaagaggugccccacgucaucgaagagguuaugaacauugugcugaucgcccucagccugcuugcuauucugaaggggaucuacaauguggccacaugcggacucuucggccuggucuccuuucuucugcucugugggagaucuugcagcacgaccuauaaaggaguguacgaacugcagacacuggagcucgacauggcgaaccugaauaugaccaugccucuuuccuguacaaagaacaauucucaucacuauaucaugguuggcaacgaaaccgggcuggagcucacacugaccaauacgagcauuaucaaccauaaauucugcaaucuuuccgaugcucacaagaaaaaccuguacgaccaugcccucaugucuauuaucagcaccuuucaccuguccauuccgaauuucaaccaguaugaggccaugagcugugauuuuaauggaggcaagaucucugugcaguacaaccugucccacacauaugcugucgacgccgcuaaucauugcggcaccauugccaacggggugcuccaaacauucaugcggauggcguggggaggcagcuacaucgcccuggauucugggaagggauccugggacuguaucaugaccagcuaccaguaucuuguuauucagaacacgacaugggaagaucacugccaguuuucucgccccuccccuaucggcuaccuggggcuccugagccaaagaacccgggacauuuauaucucccgcagacuucugggaacauucaccuggacccucucugauagcgagggcaaugaaacacccggcggguacugucugacgcgguggaugcugauugaggcugagcucaaaugcuuuggaaacaccgccguggcuaaguguaaugaaaaacaugacgaggaguucugcgauaugcugcgccuuuuugacuucaacaagcaggccaucagacggcugaaaacagaagcgcagauguccauccagcucauuaauaaggccgucaacgcucugaucaaugaucaacuuauuaugaagaaccaucugcgcgacaucaugggcauuccuuauugcaauuacagcaaauauuguuaccucaaccacaccgugacagggaagaccucucugcccagaugcugucugguguccaauggaagcuaccucaacgaaacgcacuucucugacgauaucgagcagcaggccgacaauaugaucacagagcugcuucaaaaagaauauauugaucggcagggcaagaccccucuggggcucgucgaccuguuuguuuucagcaccuccuuuuaccugaucucuauuuuccuucaccucgugaaaaucccgacacaucgccacauuaccggaaagcccugcccuaaaccccauagacugaaccacaugggcaucuguagcugcggccuguauaagcacccuggggugcccgucaaguggaaacgguga

SEQ ID NO: 38352 - RNA, 1473 nt, Artificial Sequence
  derived and/or modified CDS sequence (opt5) from LASV(Lassa virus/H.sapiens-wt/NGA/2016/ISTH_0009;Clade II)__AVO03571__GPCmut11
augggccagaucauuaccuucuuucaagaggugccccacgucaucgaagagguuaugaacauugugcugaucgcccucagccugcuugcuauucugaaggggaucuacaauguggccacaugcggacuccugggccuugucuccuuccugcuccugugugggagaucuugcagcacgaccuauaaaggaguguacgaacugcagacacucgagcuggacauggcgucccuuaacaugaccaugccucugucuuguacaaagaauaacagccaucacuauaucaugguuggcaaugaaaccgggcucgagcugacacuuaccaacacguccauuaucaaucauaaauuuugcaaccugucugaugcucacaagaaaaaucucuacgaccaugcccugaugagcauuaucuccaccuuccaccugagcauuccgaacuuuaaucaguaugaggccaugucuugugauuucaacggaggccggaucuccgugcaguacaaucucagccacucuuaugcugucgacgccgcuaaccauugcggcacaauugccaauggggugcugcaaaccuuuaugcgcauggcguggggaggcuccuacaucgcccuugauagcgggaagggaucuugggacuguaucaugacauccuaccaguaucugauuauccagaacaccacgugggaagaucacugccaguucagcagacccuccccuauuggcuaccucgggcugcuuucucaacggacacgcgacaucuauauuagcagacggcugcucggaaccuuuacauggacccuguccgauagcgagggcaacgaaacccccggcggguacugucugacacgcuggaugcucaucgaggcugagcugaagugcuucggaaauacggccguugcuaaauguaacgaaaagcaugacgaggaauuuugcgauaugcuuagacuguucgacuuuaauaaacaggccauccggcgccucaagaccgaggcgcagaugucuauucagcugaucaacaaagccgugaaugcucuuauuaacgaucaacugaucaugaagaaucaccucagagacauuaugggcaucccuuauugcaacuacuccaaguauuguuaccugaaucacacagucaccgggaaaacaagccugccccggugcugucucgugucuaacggaagcuaccugaaugaaacccauuucuccgacgauaucgagcagcaggccgacaacaugauuacggagcuucugcaaaaggaauauaucgaucgccagggcaaaacaccucucgggcugguggaccuguucgucuuuucuaccagcuucuaccuuauuuccaucuuucuccaccugguuaagauuccgacccauagacacaucacaggaaaacccugcccuaagccccaucggcugaaucacaugggcauuuguagcugcggccucuauaaccacccuggggugcccgugaaauggaagcgcuga

SEQ ID NO: 38353 - RNA, 1473 nt, Artificial Sequence
  derived and/or modified CDS sequence (opt5) from LASV(Lassa virus/H.sapiens-wt/NGA/2016/ISTH_0017;Clade II)__AVO03567__GPCmut11
augggccagaucauuaccuucuuucaagaggugccccacgucaucgaagagguuaugaacauugugcugaucgcccucagccugcuugcuauucugaaggggaucuacaauguggccacaugcggacucuucggccuggucuccuuucuucugcucugugggagaucuugcagcacgaccuauaaaggaguguacgaacugcagacacuggagcucgacauggcgucccugaacaugaccaugccucuuucuuguacaaagaauaacagccaucacuauaucaugguuggcaaugaaaccgggcuggagcucacacugaccaacacguccauuaucaaucauaaauucugcaaccuuucugaugcucacaagaaaaaucuguacgaccaugcccucaugagcauuaucuccaccuuucaccugagcauuccgaacuucaaucaguaugaggccaugucuugugauuuuaacggaggcaagaucuccgugcaguacaaucugagccacacauaugcuauugacgccgcuaaccauugcggcaccaucgccaaugggguccuccaaacauucaugcggauggcguggggaggcucuuacaucgcccuggauuccgggaagggaagcugggacuguauuaugaccucuuaccaguaucuuaucauucagaacacgacaugggaagaucacugccaguuuucccgccccagcccuaucggcuaccuggggcuccugucccaaagaacccgggacauuuauaucucucgcagacuucugggaacauucaccuggacccucagcgauuccgagggcaacgaaacacccggcggguacugucugacgcgguggaugcugaucgaggcugagcucaaaugcuuuggaaauaccgccguggcuaaguguaacgaaaaacaugacgaggaguucugcgauaugcugcgccuuuuugacuucaauaagcaggccauuagacggcugaaaacagaagcgcagaugagcauccagcucauuaacaaggccguuaaugcucugaucaacgaucaacuuauuaugaagaaucaucugcgcgacaucaugggcaucccuuauugcaacuacucuaaauauuguuaccucaaucacaccgugacagggaagaccucccugcccagaugcugucuggucagcaacggaucuuaccucaaugaaacgcacuucagcgacgauauugagcagcaggccgacaacaugaucacagagcugcuucaaaaagaauauauggaucggcagggcaagaccccucuggggcucguggaccuguuuguguucuccaccucuuuuuaccugauuagcaucuuccuucaccucguccgcauuccgacacauagacacguuaucggaaaacccugcccuaagccccaucggcugaaucacaugggcauuuguuccugcggccuguauaaacacccuggggugcccgugaaguggaagcgcuga

SEQ ID NO: 38354 - RNA, 1473 nt, Artificial Sequence
  derived and/or modified CDS sequence (opt5) from LASV(Lassa virus/H.sapiens-wt/NGA/2018/ISTH_0959;Clade II)__AVV65099__GPCmut11
augggccagaucauuaccuucuuucaagaggugccccacgucaucgaagagguuaugaacauugugcugaucgcccucagccugcuugcuauucugaaggggaucuacaauguggucacaugcggacucuucggccugguguccuuucuucugcucugugggagaucuugcagcacgaccuauaaaggaguuuacgaacugcagacacuggagcucgacauggccucccugaacaugaccaugccucuuucuuguacaaagaauaacagccaucacuauaucauggugggcaaugaaaccgggcuggagcucacacugaccaacacguccauuaucaaucauaaauucugcaaccuuucugaugcgcacaagaaaaaucuguacgaccaugcucucaugagcauuaucuccaccuuucaccugagcauuccgaacuucaaucaguaugaggccaugucuugugauuuuaacggaggcaagaucuccguccaguacaaucugagccacgccuaugcuauugacgccgcuaaccauugcggcacaaucgccaauggggugcuccaaaccuucaugcggauggcguggggaggcucuuacaucgcccuggauuccgggaagggaagcugggacuguauuaugacaucuuaccaguaucuuaucauucagaacaccacgugggaagaucacugccaguuuucccgccccagcccuaucggcuaccuggggcuccugucccaaagaacacgggacauuuauaucucucgcagacuucugggaaccuucacauggacccucagcgauuccgagggcaacgaaacccccggcggguacugucugacacgguggaugcugaucgaggcugagcucaaaugcuuuggaaauacggccguugcuaaguguaacgaaaaacaugacgaggaguucugcgauaugcugcgccuuuuugacuucaauaagcaggccauuagacggcugaaaaccgaagcgcagaugagcauccagcucauuaacaaggccgugaaugcucugaucaacgaucaacuuauuaugaagaaucaucugcgcgacaucaugggcaucccuuauugcaacuacucuaaauauuguuaccucaaucacacagucaccgggaagacaucccugcccagaugcugucuggugagcaacggaucuuaccucaaugaaacccacuucagcgacgauauugagcagcaggccgacaacaugaucacggagcugcuucaaaaagaauauauugaucggcagggcaagacaccucuggggcucguggaccuguuugucuucuccaccucuuuuuaccugaucagcauuuuccuucaccucguuaaaaucccgacccaucgccacgugauuggaaagcccugcccuaaaccccauagacugaaucacaugggcaucuguuccugcggccuguauaagcacccuggggugcccgucaaguggaaacgguga

SEQ ID NO: 38355 - RNA, 1473 nt, Artificial Sequence
  derived and/or modified CDS sequence (opt5) from LASV(LASV003-NIG-2008;Clade II)__AIT17580__GPCmut11
augggccagaucauuaccuucuuucaagaggugccccacgucaucgaagagguuaugaacauugugcugaucgcccucagccugcuugcuauucugaaggggaucuacaauguggccacaugcggacucuucggccuggucuccuuucuucugcucugugggagaucuugcagcacgaccuauaaaggaguguacgaacugcagacacuggagcucgacauggcgucccugaacaugaccaugccucuuucuuguacaaagaauaacagccaucacuauaucaugguuggcaaugaaaccgggcuggagcucacacugaccaacacguccauuaucaaucauaaauucugcaaccuuucugaugcucacaagaaaaaucuguacgaccaugcccucaugagcauuaucuccaccuuucaccugagcauuccgaacuucaaucaguaugaggccaugucuugugauuuuaacggaggcaagaucuccgugcaguacaaucugagccacacauaugcugucgacgccgcuaaccauugcggcaccauugccaauggggugcuccaaacauucaugcggauggcguggggaggcucuuacaucgcccuggauuccgggaagggaagcugggacuguaucaugaccucuuaccaguaucuuauuauccagaacacgacaugggaagaucacugccaguuuucccgccccagcccuauuggcuaccuggggcuccugucccaaagaacccgggacaucuauauuucucgcagacuucugggaacauucaccuggacccucagcgauuccgagagcaacgaaacacccggcggcuacugucugacgcgguggaugcugaucgaggcugagcucaaaugcuuugggaauaccgccguugcuaaguguaacgaaaaacaugacgaggaguucugcgauaugcugcgccuuuuugacuucaauaagcaggccaucagacggcugaaagcggaagcccagaugucuauucagcucaucaacaaggcugugaaugcccugauuaacgaucaacuuaucaugaagaaucaucugcgcgacauuaugggaaucccuuauugcaacuacuccaaauauuguuaccucaaucacacagucaccggcagaacaagccugccccggugcugucuggugucuaacgggagcuaccucaaugaaacccacuucuccgacgauaucgagcagcaggcugacaacaugauuacggagcugcuucaaaaggaauauauggaucgccagggaaaaacaccucugggccucguggaccuguuugucuucucuaccagcuuuuaccugaucuccauuuuccuucaccucguuaagaucccgacccauagacacgugauugggaaacccugcccuaagccccaucggcugaaucacaugggaaucuguagcugcggccuguauaaacacccuggcgugcccgucaaguggaagcgcuga

SEQ ID NO: 38356 - RNA, 1473 nt, Artificial Sequence
  derived and/or modified CDS sequence (opt5) from LASV(LASV035-NIG-2009;Clade II)__AIT17588__GPCmut11
augggccagaucauuaccuucuuucaagaggugccccacgucaucgaagagguuaugaacauugugcugaucgcccucagccugcuugcuauucugaaggggaucuacaauguggccacaugcggacucuucggccuggucuccuuucuucugcucugugggagaucuugcagcacgaccuauaaaggaguguacgaacugcagacacuggagcucgacauggcgucccugaacaugaccaugccucuuucuuguacaaagaauaacagccaucacuauaucaugguuggcaaugaaaccgggcuggagcucacacugaccaacacguccauuaucaaucauaaauucugcaaccuuucugaugcucacaagaaaaaucuguacgaccaugcccucaugagcauuaucuccaccuuucaccugagcauuccgaacuucaaucaguaugaggccaugucuugugauuuuaacggaggcaagaucuccgugcaguacaaucugagccacgcuuaugccgucgacgcugccaaccauugcggcacaauugcgaauggggugcuccaaaccuucaugcggauggccuggggaggcucuuacaucgcucuggauuccgggaagggaagcugggacuguaucaugacaucuuaccaguaucuuauuauccagaacaccacgugggaagaucacugccaguuuucccgccccagcccuauuggcuaccuggggcuccugucccaaagaacacgggacaucuauauuucucgcagacuucugggaaccuucacauggacccucagcgauuccgagggcaacgaaacccccggcggguacugucugacacgguggaugcugaucgaggccgagcucaaaugcuuuggaaauacggcuguugccaaguguaacgaaaaacaugacgaggaguucugcgauaugcugcgccuuuuugacuucaauaagcaggcgaucagacggcugaaagccgaagcucagaugagcauucagcucaucaacaaggccgugaaugcucugauuaacgaucaacuuaucaugaagaaucaucugcgcgacauuaugggcaucccuuauugcaacuacucuaaauauuguuaccucaaucacaccgucacagggaagaccucccugcccagaugcugucuggugagcaacggaucuuaccucaaugaaacacacuucagcgacgauaucgagcagcaggccgacaacaugauuaccgagcugcuucaaaaagaauauaucgaucggcagggcaagacgccucuggggcucguggaccuguuugucuucuccacaucuuuuuaccugauuagcaucuuccuucaccucguuaaaauuccgacccaucgccacgugaucggaaagcccugcccuaaaccccauagacugaaucacaugggcauuuguuccugcggccuguauaagcacccuggggugcccgucaaguggaaacgguga

SEQ ID NO: 38357 - RNA, 1473 nt, Artificial Sequence
  derived and/or modified CDS sequence (opt5) from LASV(LASV1000-NIG-2009;Clade II)__AIT17782__GPCmut11
augggccagaucauuaccuucuuucaagaggugccccacgucaucgaagagguuaugaacauugugcugaucgcccucagccugcuugcuauucugaaggggaucuacaauguggccacaugcggacucuucggccuggucuccuuucuucugcucugugggagaucuugcagcacgaccuauaaaggaguguacgaacugcagacacuggagcucgacauggcgucccugaacaugaccaugccucuuucuuguacaaagaauaacagccaucacuauaucaugguuggcaaugaaaccgggcuggagcucacacugaccaacacguccauuaucaaucauaaauucugcaaccuuucugaugcucacaagaaaaaucuguacgaccaugcccucaugagcauuaucuccaccuuucaccugagcauuccgaacuucaaucaguaugaggccaugucuugugauuuuaacggaggcaagaucuccgugcaguacaaucugagccacacauaugcugucgacgccgcuaaccauugcggcaccauugccaauggggugcuccaaacauucaugcggauggcguggggaggcucuuacaucgcccuggauuccgggaagggaagcugggacuguaucaugaccucuuaccaguaucuuauuauccagaacacgacaugggaagaucacugccaguuuucccgccccagcccuauuggcuaccuggggcuccugucccaaagaacccgggacaucuauauuucucgcagacuucugggaacauucaccuggacccucagcgauuccgagggcaacgaaacacccggcggguacugucugacgcgguggaugcugaucgaggcugagcucaaaugcuuuggaaauaccgccguugcuaaguguaacgaaaaacaugacgaggaguucugcgauaugcugcgccuuuuugacuucaauaagcaggccaucaaaagacugaagacagaagcgcagaugagcauucagcucaucaacaaggccgugaaugcucugauuaacgaucaacuuaucaugaaaaaucaucugcgggacauuaugggcaucccuuauugcaacuacucuaaguauuguuaccucaaucacaccgucacagggaaaaccucccugccccgcugcugucuggugagcaacggaucuuaccucaaugaaacgcacuucagcgacgauaucgagcagcaggccgacaacaugauuacagagcugcuucaaaaggaauauaucgauagacagggcaaaaccccucuggggcucguggaccuguuugucuucuccaccucuuuuuaccugauuagcaucuuccuucaccucguuaagauuccgacacaucggcacguggugggaaaacccugcccuaagccccaucgccugaaucacaugggcaucuguuccugcggccuguauaagcacccugggguccccgugaaauggaagagauga

SEQ ID NO: 38358 - RNA, 1473 nt, Artificial Sequence
  derived and/or modified CDS sequence (opt5) from LASV(LASV221-NIG-2010;Clade II)__AIT17624__GPCmut11
augggccagaucauuaccuucuuucaagaggugccccacgucaucgaagagguuaugaacauugugcugaucgcccucagccugcuugcuauucugaaggggaucuacaauguggccacaugcggacucuucggccuggucuccuuucuucugcucugugggagaucuugcagcacgaccuauaaaggaguguacgaacugcagacacuggagcucgacauggcgucccugaacaugaccaugccucuuucuuguacaaagaauaacagccaucacuauaucaugguuggcaaugaaaccgggcuggagcucacacugaccaacacguccauuaucaaucauaaauucugcaaccuuucugaugcucacaagaaaaaucuguacgaccaugcccucaugagcauuaucuccaccuuucaccugagcauuccgaacuucaaucaguaugaggccaugucuugugauuuuaacggaggcaagaucuccgugcaguacaaucugagccacacauaugcuauugacgccgcuaaccauugcggcaccaucgccaaugggguccuccaaacauucaugcggauggcguggggaggcucuuacaucgcccuggauuccgggaagggaagcugggacuguauuaugaccucuuaccaguaucuuaucauucagaacacgacaugggaagaucacugccaguuuucccgccccagcccuaucggcuaccuggggcuccugucccaaagaacccgggacauuuauaucucucgcagacuucugggaacauucaccuggacccucagcgauuccgagggcaacgaaacacccggcggguacugucugacgcgguggaugcugaucgaggcugagcucaaaugcuuuggaaauaccgccguggcuaaguguaacgaaaaacaugacgaggaguucugcgauaugcugcgccuuuuugacuucaauaagcaggccauuagacggcugaaaacagaagcgcagaugagcauccagcucauuaacaaggccguuaaugcucugaucaacgaucaacuuauuaugaagaaucaucugcgcgacaucaugggcaucccuuauugcaacuacucuaaauauuguuaccucaaucacaccgugacagggaagaccucccugcccagaugcugucuggucagcaacggaucuuaccucaaugaaacgcacuucagcgacgauauugagcagcaggccgacaacaugaucacagagaugcugcaaaaagaauauauggaucggcagggcaagaccccucuugggcugguggaccucuuuguguucuccaccucuuuuuaccugauuagcaucuuccugcaccuugucaaaauuccgacacaucgccacguuaucggaaagcccugcccuaaaccccauagacucaaucacaugggcauuuguuccugcggccuguauaagcacccuggggugcccgugaaguggaaacgguga

SEQ ID NO: 38359 - RNA, 1473 nt, Artificial Sequence
  derived and/or modified CDS sequence (opt5) from LASV(LASV237-NIG-2010;Clade II)__AIT17638__GPCmut11
augggccagaucauuaccuucuuucaagaggugccccacgucaucgaagagguuaugaacauugugcugaucgcccucagccugcuugcuauucugaaggggaucuacaauguggccacaugcggacucuucggccuggucuccuuucuucugcucugugggagaucuugcagcacgaccuauaaaggaguguacgaacugcagacacuggagcucgacauggcgucccugaacaugaccaugccucuuucuuguacaaagaauaacagccaucacuauaucaugguuggcaaugaaaccgggcuggagcucacacugaccaacacguccauuaucaaucauaaauucugcaaccuuucugaugcucacaagaaagaccuguacgaucaugcccucaugagcauuaucuccaccuuucaccugagcauuccgaauuucaaccaguaugaggccaugucuugugacuuuaauggaggcaagaucuccgugcaguacaaccugagccacacauaugcugucgaugccgcuaaucauugcggcaccauugccaacggggugcuccaaacauucaugcggauggcguggggaggcucuuacaucgcccuggacuccgggaagggaagcugggauuguaucaugaccucuuaccaguaucuuauuauccagaauacgacaugggaagaccacugccaguuuucccgccccagcccuauuggcuaccuggggcuccugucccaaagaacccgggauaucuauauuucucgcagacuucugggaacauucaccuggacccucagcgacuccgagggcaacgaaacacccggcggguacugucugacgcgguggaugcugaucgaggcugagcucaaaugcuuuggaaacaccgccguugcuaaguguaaugaaaaacaugaugaggaguucugcgacaugcugcgccuuuuugauuucaacaagcaggccaucagacggcugaaaacagaagcgcagaugagcauucagcucaucaauaaggccgugaacgcucugauuaaugaccaacuuaucaugaagaaccaucugcgcgacauuaugggcaucccuuauugcaauuacucuaaauauuguuaccucaaccacaccgucacagggaagaccucccugcccagaugcugucuggugagcaauggaucuuaccucaacgaaacgcacuucagcgaugacaucgagcagcaggccgauaauaugauuacagagcugcuucaaaaagaauauauggaccggcagggcaagaccccucuggggcucguggaucuguuugucuucuccaccucuuuuuaccugaucagcauuuuccuucaccucaucaaaauuccgacacaucgccacaucaccggaaagcccugcccuaaaccccauagacugaaccacaugggcauuuguuccugcggccuguauaagcacccugggguucccgugaaguggaaacgguga

SEQ ID NO: 38360 - RNA, 1473 nt, Artificial Sequence
  derived and/or modified CDS sequence (opt5) from LASV(LASV253-NIG-2011;Clade II)__AIT17670__GPCmut11
augggccagaucauuaccuucuuucaagaggugccccacgucaucgaagagguuaugaacauugugcugaucgcccucagccugcuugcuauucugaaggggaucuacaauguggccacaugcggacucuucggccuggucuccuuucuucugcucugugggagaucuugcagcacgaccuauaaaggaguguacgaacugcagacacuggagcucgacauggcgucccugaacaugaccaugccucuuucuuguacaaagaauaacagccaucacuauaucaugguuggcaaugaaaccgggcuggagcucacacugaccaacacguccauuaucaaucauaaauucugcaaccuuucugaugcucacaagaaaaaucuguacgaccaugcccucaugagcauuaucuccaccuuucaccugagcauuccgaacuucaaucaguaugaggccaugucuugugauuuuaacggaggcaagaucuccgugcaguacaaucugagccacacauaugcugucgacgccgcuaaccauugcggcaccauugccaauggggugcuccaaacauucaugcggauggcguggggaggcucuuacaucgcccuggauuccgggaagggaagcugggacuguaucaugaccucuuaccaguaucuuauuauccagaacacgacaugggaagaucacugccaguuuucccgccccagcccuauuggcuaccuggggcuccugucccaaagaacccgggacaucuauauuucucgcagacuucugggaacauucaccuggacccucagcgauuccgagggcaacgaaacacccggcggguacugucugacgcgguggaugcugaucgaggcugagcucaaaugcuuuggaaauaccgccguugcuaaguguaacgaaaaacaugacgaggaguucugcgauaugcugcgccuuuuugacuucaauaagcaggccaucagacggcugaaagcggaagcccagaugagcauucagcucaucaacaaggcugugaaugcccugauuaacgaucaacuuaucaugaagaaucaucugcgcgacauuaugggcaucccuuauugcaacuacucuaaauauuguuaccucaaucacacagucaccgggagaacaucccugccccggugcugucuggugagcaacggaucuuaccucaaugaaacccacuucagcgacgauaucgagcagcaggcugacaacaugauuacggagcugcuucaaaaggaauauaucgaucgccagggcaaaacaccucuggggcucguggaccuguuugucuucuccaccucuuuuuaccugauuagcaucuuccuucaccucguuaagauuccgacccauagacacaucauuggaaaacccugcccuaagccccaucggcugaaucacaugggcaucuguuccugcggccuguauaaacacccuggggugcccgugaaguggaagcgcuga

SEQ ID NO: 38361 - RNA, 1473 nt, Artificial Sequence
  derived and/or modified CDS sequence (opt5) from LASV(LASV254-NIG-2011;Clade II)__AIT17674__GPCmut11
augggccagaucauuaccuucuuucaagaggugccccacgucaucgaagagguuaugaacauugugcugaucgcccucagccugcuugcuauucugaaggggaucuacaauguggccacaugcggacucuucggccuggucuccuuucuucugcucugugggagaucuugcagcacgaccuauaaaggaguguacgaacugcagacacuggagcucgacaugaccaaccugaauaugacaaugccucuuuccuguaccaagaacaauucucaucacuauaucaugguuggcaacgaaacagggcuggagcucacccugacgaauaccagcauuaucaaccauaaauucugcaaucuuuccgaugcgcacaagaaaaaccuguacaaucaugcucucaugucuauuaucagcacauuucaccuguccauuccgaacuucaaucaguaugaggccaugagcugugacuuuaacggaggcaagaucucugugcaguacaaucugucccacagcuaugccgucgaugcugccaaccauugcggcaccauugcuaacggggugcuccaaacauucaugcggauggccuggggaggcucuuacaucgcgcuggacuccgggaagggaaauugggauuguaucaugaccagcuaccaguaucuuauuauccagaacacgacaugggaagaccacugccaguuuucucgccccuccccuauuggcuaccuggggcuccugagccaaagaacccgggauaucuauauuucccgcagacuucugggaacauucaccuggacccucucugacagcgagggcaaugaaacacccggcggguacugucugacgcgguggaugcugaucgaggccgagcucaaaugcuuuggaaacaccgcuguugccaaguguaaugaaaaacaugaugaggaguucugcgacaugcugcgccuuuuugauuucaacaagcaggcuaucagacggcugaaaacagaagcccaggcgaauauucagcucaucaacaaggccgugaaugcucugauuaacgaccaacuuaucaugaagaaucaucugcgcgauauuaugggcaucccuuauugcaacuacuccaaauauuguuaccucaaucacaccgucacagggaagaccagccugcccagaugcugucuggugucuaacggauccuaccucaaugaaacgcacuucagcgacgacaucgagcagcaggccgauaacaugauuacagagcugcuucaaaaagaauauauggaccggcagggcaagaccccucuggggcucguggaucuguuugucuucucuaccagcuuuuaccugaucuccauuuuccuucaccucguuaaaaucccgacacaucgccacgugauuggaaagcccugcccuaaaccccauagacugaaccacaugggcaucuguucuugcggccuguauaagcacccuggggugcccgucaaguggaaacgguga

SEQ ID NO: 38362 - RNA, 1473 nt, Artificial Sequence
  derived and/or modified CDS sequence (opt5) from LASV(Nig08-A19;Clade III)__ADU56618__GPCmut11
augggccagaucgugaccuucuuucaagaggucccccacguuauugaagaggugaugaacaucgugcugauugcccucagcauccuggcuauucuuaaggggcuguacaauaucgccacaugcggacucaucggccuggucacguuccuucugcucuccgggagaucuuguagcaugaccuauaaaggaguguacgaacugcagacacuggagcucaacaugaauacccugaacaugacaaugccucuuuccugcaccaagaauaacucucaucacuauauuaugguuggcaaugaaacagggcuggagcucacccugacgaacaccagccuucugcaucacaaauuuuguaaucucuccgacgcgcauaagaaaaaccuguacgaucacacacugaugucuaucauuagcaccuuccaccucuccaucccgaauuuuaaccaguaugaggcuaugagcugcgacuucaauggaggcaagauuacagugcaguacaaccugucucauuccuaugccaucgaugccgcuaaucacuguggcaccgucgccaacggggugcuucaaacguuuaugcggauggcuuggggaggcagcuacauugcccuggacucugggcgcggaaagugggauugcaucaugacauccuaccaguaucucaucauucagaacaccacaugggaagaccauugucaguucagcagacccucuccuaucggcuaccuggggcuucugucccaacggacccgcgauauuuauaucagcagacggcuccugggaaccuuuacauggacgcuguccgacucugagggcaaugaaacccccggcggguacugccucacacgcuggaugcugauugaggcggagcuuaaauguuucggaaacaccgccguugcuaagugcaaugaaaaacacgaugaggaauuuugugacaugcugagacucuucgauuuuaacaagcaggccauccggcgccugaaagcugaggcccagaugagcauccagcuuauuaauaaggcggugaacgcccugaucaaugaccaacucauuaugaagaaccaccugagagauaucaugggcauuccuuauugcaauuacuccaaauauugcuaccugaaccauacaagcaccgggcggacgucucucccccgcuguugccuggucuccaauggaagcuaccuuaacgaaacacacuucucugacgacaucgagcagcaggcugauaauaugaucaccgagaugcugcaaaaggaauaucucgacagacagggcaaaaccccucuggggcugguggaucuuuucguguuuagcacauccuucuaccucauuucuaucuuucugcaucuggucaagauuccgacccaccggcauaucguuggaaaacccuguccuaagccccaccgccucaaccacaugggcauuugcagcuguggccuguauaaacagccuggggugcccgugagauggaagcgguga

SEQ ID NO: 38363 - RNA, 1476 nt, Artificial Sequence
  derived and/or modified CDS sequence (opt5) from LASV(G1180-SLE-2010;Clade IV)__AIT17168__GPCmut11
augggccagaucgugaccuucuuucaagaggucccccacguuauugaagaggugaugaacaucgugcugauugcccucagcauccuggcuguccuuaaggggcuguacaauuucgccacaugcggacucgugggccugcuuacguuucugcuccugugugggagauccugcaccgcgucucgguauaaaggaguuuacgaacugcagacacucgagcugaacauggaaacccuuaauaugacaaugccucugagcuguaccaagaacaauucccaucacuauauuauggugggcaacgagacagggcucgagcugacccuuacgaauaccucuaucaucaaccauaaauucugcaaucugagcgacgcucacaagaaaaaccucuacgaucaugcccugauguccauuaucucuacauuucaccugagcauuccgaauuucaaccaguaugaagccauguccugugacuuuaauggaggcaagaucagcguccaguacaaccucucucacuccuaugcuggcgaugccgcuaaucauugcgggaccguggccaacggaguucugcaaacauucaugcgcauggcguggggcgggagcuacauugcccuugacucuggacacggcuccugggauuguaucaugaccagcuaccaguaucugauuauccagaacacgacaugggaggaccauugccaguuuucuagacccuccccuaucggguaccucggacugcuuagccaacggacccgcgauauuuauaucuccagacggcugcucggcacauucaccuggacccugucugacagcgaaggcaaggauacacccgggggauacugucugacgcgcuggaugcucauugaggcugagcugaaaugcuuuggcaauaccgccguggcuaaguguaacgaaaaacacgacgaggaguucugcgauaugcuuagacuguuugacuucaauaagcaggccauccagcggcucaaagcggaagcccagauguccauucaacugaucaacaaggcugucaaugcccuuaucaacgaucagcugauuaugaagaaucaccuccgcgacaucauggggauuccuuauugcaacuacagcaaauauuguuaccugaaucauacaaccacaggaaagaccucucugcccaaaugcugucucguguccaacggcagcuaccugaaugaaacgcacuucucugacgauaucgagcagcaagcugacaacaugauuacagagaugcuucagaaggaauauauggagagacaggggaaaaccccucugggacucguggaucuguuugucuucagcaccuccuuuuaccugaucucuaucuuccuucaucucguuaagauuccgacacaccggcauaucgugggcaaaagcugccccaagccucaccgccugaaucacaugggcauuuguuccugcgggcuguauaagcagcccggagugccugucaaauggaagagauga

SEQ ID NO: 38364 - RNA, 1476 nt, Artificial Sequence
  derived and/or modified CDS sequence (opt5) from LASV(G1442-SLE-2011;Clade IV)__AIT17180__GPCmut11
augggccagaucgugaccuucuuucaagaggucccccacguuauugaagaggugaugaacaucgugcugauugcccucagcauccuggcuguccuuaaggggcuguacaauguggccacaugcggacucauuggccugguuacguuccuucugcucugugggagauccugcaccacaacccuguauaaaggaguguacgaacugcagacacucgagcugaacauggaaacccuuaauaugacaaugccucugucuuguaccaagaacaauagccaucacuauauccgggucggcaacgagacggggcucgagcugacccuuacaaauaccuccaucauuaaccauaaauuuugcaaucugucugacgcgcacaagaaaaaccucuacgaucaugcucugaugagcaucauuuccacauuccaccugucuaucccgaauuuuaaccaguaugaagccaugagcugugacuucaauggaggcaagauuuccgugcaguacaaccucagccacucuuaugccggcgaugcugccaaucauugcgggaccguugcuaacggagugcugcaaacguuuaugcgcauggccuggggcggguccuacaucgcgcuugacagcggaagaggcaacugggauuguauuaugacaucuuaccaguaucugaucauccagaauaccacaugggacgaucacugccaguucucccggcccagcccuauuggguaccucggacugcuuucucaacgcaccagagacgucuauaucucccggcgccugcucggcaccuuuacauggacgcugagcgauuccgagggcaaggacacccccgggggauacugucugacaagauggaugcucauugaagccgagcugaaaugcuucggcaacaccgcuguggccaaguguaaugagaaacaugaugaagaguuuugcgacaugcuucggcuguucgauuuuaacaagcaggcuauccagcgccucaaagccgaagcgcagaugucuauucaacugaucaauaaggccgugaacgcucuuaucaaugaccagcugauuaugaagaaccaccucagagacaucauggggauuccuuauugcaauuacagcaaauauuguuaccugaacaauacagccaccggaaagacgucccugcccaaaugcugucucaucagcaacggcucuuaccugaaugagacacacuucuccgaugacauugaacaggaggcugauaacaugaucaccgagaugcuucaaaaggaauauauggagcggcaggggaaaaccccucugggacucgucgaccuguucguuuuuagcacaucuuucuaccugaucagcauuuuucuucaucucgugaagaucccgacccaccgccauauugugggcaaauccugccccaagccucacagacugaaucauaugggcaucuguucuugcgggcuguauaagcagcccggagucccugugcgguggaaacgcuga

SEQ ID NO: 38365 - RNA, 1476 nt, Artificial Sequence
  derived and/or modified CDS sequence (opt5) from LASV(G3010-SLE-2013;Clade IV)__AIT17344__GPCmut11
augggccagaucgugaccuucuuucaagaggucccccacguuauugaagaggugaugaacaucgugcugauugcccucagcauccuggcuguccuuaaggggcuguacaauuucgccacaugcggacucgugggccugguuacguuucuucugcucugugggagauccugcaccacaucucuguauaaaggaguguacgaacugcagacccucgagcugaacauggaaacacuuaauaugaccaugccucugagcuguacaaagaacaauucccaucacuauauuauggucggcaacgagaccgggcucgagcugacgcuuaccaauacaucuaucaucaaccauaaauucugcaaucugagcgacgcgcacaagaaaaaccucuacaaucaugcucugauguccauuaucucuaccuuucaccugagcauuccgaacuucaaucaguaugaagccauguccugugauuuuaacggaggcaagaucagcgugcaguacaaucucucucacuccuaugccggcgacgcugccagccauugcgggacaguugcuaacggagugcugcaaaccuucaugcggauggccuggggcgggucuuacauugcgcuugauuccggauacggcaagugggacuguaucaugacgagcuaucaguaccugauuauccagaacacaaccugggaggaucacugccaguuuucucgccccuccccuaucggguaucucggacugcuuagccaaagaacacgggacauuuacaucucccgcagacugcucggcaccuucaccuggacacugucugauagcgaaggcaaagacacgcccgggggauauugucugacccgguggaugcucauugaggccgagcugaagugcuuuggcaauacagcugucgccaaauguaacgaaaagcaugaugaggaguucugcgacaugcuucgccuguuugauuucaauaaacaggcuauccagagacucaagaccgaagcccagauguccauucaacugaucaacaaggcggugaaugcccuuaucaacgaccagcugauuaugaaaaaucaccuccgggauaucauggggauuccuuacugcaacuauagcaaguacuguuaccugaaucacacaaccacgggaaaaacaucucugcccaagugcugucucguguccaacggcagcuaucugaaugaaacccauuucucugacgacaucgagcagcaagcugauaacaugauuaccgagaugcuucagaaagaauacauggagcgccaggggaagacaccucugggacucgucgaccuguuuguuuucagcaccuccuuuuaucugaucucuaucuuccuucaccucgugaaaauuccgacacauagacacaucgugggcaagagcugccccaagccucaucggcugaaucacaugggcauuuguuccugcgggcuguacaaacagcccggagucccugugcgcuggaagagauga

SEQ ID NO: 38366 - RNA, 1476 nt, Artificial Sequence
  derived and/or modified CDS sequence (opt5) from LASV(G502-SLE-2009;Clade IV)__AIT17126__GPCmut11
augggccagaucgugaccuucuuucaagaggucccccacguuauugaagaggugaugaacaucgugcugauugcccucagcauccuggcuguccuuaaggggcuguacaauuucgccacaugcggacucgugggccugcuuacguuucugcuccugugugggagauccugcaccacaggacuguauaaaggcguuuacgaacuccagacccuggagcuuaacauggaaacacugaauaugaccaugccucucucuuguacaaagaacaauagccaucacuauauuaugguggggaacgagaccggacuggagcuuacgcugaccaauacauccaucaucaaccauaaauucugcaaucucucugacgcgcacaagaaaaaccuguacgaucaugcucugaugagcauuaucuccaccuuucaccucucuauuccgaauuucaaccaguaugaagccaugagcugugacuuuaauggcggcaagaucuccguccaguacaaccugagccacucuuaugccggggaugcugccgaccauugcggaacaguggcuaauggcguucuucaaaccuucaugcggauggccuggggaggguccuacauugcgcuggauagcggccgcgggagaugggacuguaucaugacgucuuaccaguaucucauuauccagaacacaaccugggaggaucacugccaguuuucccggcccagcccuaucggauaccugggccuucugucucaacgcacaagagacauuuauaucucccggcgccuccugggcaccuucaccuggacacugagcgauuccgaagggaaggacacgcccggaggcuacugucucaccagauggaugcugauugaggccgagcuuaaaugcuuugggaacacagcuguggccaaguguaaugaaaaacaugaugaggaguucugcgacaugcugcggcucuuugauuucaacaagcaggcuauccagcgccugaaagccgaagcgcagaugucuauucaacuuaucaauaaggccgucaacgcucugaucaaugaccagcucgugaugaagaaccaccugagagacauuaugggaaucccuuauugcaauuacagccgguauuguuaccugaaccacaccacaaccggccgcacgucccuccccaaaugcugucuggugagcaaugggucuuaccuuaacgaaacacauuucuccgaugacauugagcagcaagccgauaauaugaucaccgagaugcugcagaaggaauauauggagagacagggaaaaaccccucucggccuggucgaccuguuuguuuucagcacaucuuuuuaccuuauuagcaucuuccuccaccuggugaagaucccgacccaucggcacauugugggcaaauccugccccaagccucaucgccugaaccacauggggaucuguucuugcggacucuauaaacagcccggcgucccugugaaguggaagagauga

SEQ ID NO: 38367 - RNA, 1476 nt, Artificial Sequence
  derived and/or modified CDS sequence (opt5) from LASV(G733-SLE-2010;Clade IV)__AIT17154__GPCmut11
augggccagaucgugaccuucuuucaagaggucccccacguuauugaagaggugaugaacaucgugcugauugcccucagcauccuggcuguccuuaaggggcuguacaauuucgccacaugcggaauugugggccucguuuccuuucugcuucugugugggagaucuugcacgaccagccucuauaaaggaguguacgaacugcagacacuggagcucaacauggaaacccugaauaugacaaugccucuuuccuguaccaagaacaauucucaucacuauaucauggucggcaacgagacagggcuggagcucacccugacgaauaccagcaucauuaaccauaaauucugcaaucuuuccgacgcgcacaagaaaaaccuguacgaucaugcucucaugucuaucauuagcacauuucaccuguccaucccgaauuucaaccaguaugaagccaugagcugugacuuuaauggaggcaagauuucugugcaguacaaccugucccacagcuaugccggcgaugcugccaaucauugcgggaccaucgcuaacggaguucuccaaacauucaugcggauggccuggggcgggucuuacauugcgcuggacuccggacgcgauagaugggacuguaucaugaccagcuaccaguaucuuaucauucagaacacgacaugggaggaucacugccaguuuucucggcccuccccuaucggcuaccuggggcuccugagccaacgcaccagagacauuuauaucucccggcgccuucugggaacauucaccuggacccucucugauagcgaaggcaaggacacacccggcggguacugucugacgagauggaugcugauugaggccgagcucaaaugcuuuggaaauaccgcuguggccaaguguaacgaaaaacaugaugaggaguucugcgacaugcugcggcuuuuugauuucaauaagcaggcuauccagcgccugaaagccgaagcgcagauguccauccaacucauuaacaaggccgucaaugcucugaucaacgaccagcuuauuaugaagaaucaccugagagacaucaugggcauuccuuauugcaacuacagcaaauauuguuaccucaaucacacaaccacagggaagaccucucugcccaaaugcugucugguguccaacggaagcuaccucaaugaaacgcauuucucugaugacaucgagcagcaagccgauaacaugaucacagagaugcugcagaaggaauauauggagcggcagggcaaaaccccucuugggcugguggaccucuuugucuucagcaccuccuuuuaccugauuucuaucuuccugcaccuuguuaagauuccgacacaucgccacguggugggaaaaagcugccccaagccucauagacucaaucacaugggcaucuguuccugcggccuguaugggcagcccggagucccugugaaguggaaacgguga

SEQ ID NO: 38368 - RNA, 1476 nt, Artificial Sequence
  derived and/or modified CDS sequence (opt5) from MOPV/LASV reassortant(IGS-1;Clade IV)__AFY05576__GPCmut11
augggccagaucgugaccuucuuucaagaggucccccacguuauugaagaggugaugaacaucgugcugauugcccucagcguccuggcugugcuuaaggggcuguacaauuucgccacaugcggacucguuggccuggugacguuucuucugcucugugggagauccugcaccacaucucuguauaaaggagucuacgaacugcagacccucgagcugaacauggaaacacuuaauaugaccaugccucugagcuguacaaagaacaauucccaucacuauaucauggugggcaacgagaccgggcucgagcugacgcuuaccaauacaucuauuaucaaccauaaauucugcaaucugagcgacgcgcacaagaaaaaccucuacgaucaugcucugauguccaucauuucuaccuuucaccugagcaucccgaauuucaaccaguaugaagccauguccugugacuuuaauggaggcaagauuagcguucaguacaaccucucucacuccuaugccggcgaugcugccaaucauugcgggacaguggcuaacggaguccugcaaaccuucaugcggauggccuggggcgggagcuacaucgcgcuugacucuggacgcggcaacugggauuguauuaugacguccuaccaguaucugaucauucagaauacaaccugggaggaccacugccaguuuagcagacccucuccuaucggguaccucggacugcuuucccaacggacacgcgauaucuauauuagcagacggcugcucggcaccuucaccuggacacuguccgacucugaaggcgaggauacgcccgggggauacugucugacccgcuggaugcucaucgaggccgaacugaagugcuuuggcaacacagcuguggccaaauguaaugagaagcaugacgaagaguucugcgauaugcuuagacuguuugacuucaacaaacaggcuauucagcggcucaaggccgaagcgcagaugagcauccaacugauuaauaaagccgugaacgcucuuaucaaugaucagcugaucaugaagaaccaccuccgcgacauuauggggaucccuuauugcaauuacuccaaguauuguuaccugaaccacaccacaaccggaagaacgagccugcccaaaugcugucucgucucuaauggcuccuaccugaacgagacacauuucagcgacgauauugagcagcaagccgacaauaugaucaccgaaaugcuucagaaggaguauauggaacggcaggggaaaaccccucugggacucguugaucuguuuguguucucuaccagcuuuuaccugauuuccaucuuccuucaccucgugaagaucccgacacaucgccacauugucggcaaaucuugccccaagccucauagacugaaccacaugggcaucuguagcugcgggcuguauaaacagcccggagugccuguuaaguggaagcgguga

SEQ ID NO: 38369 - RNA, 1476 nt, Artificial Sequence
  derived and/or modified CDS sequence (opt5) from LASV(LM765-SLE-2012;Clade IV)__AIT17814__GPCmut11
augggccagaucgugaccuucuuucaagaggucccccacguuauugaagaggugaugaacaucgugcugauugcccucagcauccuggcuguccuuaaggggcuguacaauuucgccacaugcggacucgugggccugguuacguuucuucugcucugugggagauccugcaccacaucucuguauaaaggaguguacgaacugcagacccucgagcugaacauggaaacacuuaauaugaccaugccucugagcuguacaaagaacaauucccaucacuauauuauggucggcaacgagaccgggcucgagcugacgcuuaccaauacaucuaucaucgaccauaaauucugcaaccugagcgaugcgcaccggaagaaucucuacgaccaugcucugauguccauuaucucuaccuuucaccugagcauuccgaacuucaaucaguaugaagccauguccugugauuuuaacggaggcaaaaucagcgugcaguacaaucucucucacuccuaugccaaggacgcugccgaucauugcggcacaguugcuaacggggugcugcaaaccuucaugcgcauggccuggggaggcagcuacauugcgcuugacucugggagaggacggugggauuguaucaugacguccuaccaguaucugauuauccagaauacaaccugggaggaccacugccaguuuagccgccccucuccuaucggcuaccucgggcugcuuucccaaagaacacgggauauuuauaucagccgcagacugcucggaaccuucaccuggacacuguccgacucugaaggcaaggauacgcccggcggguacugucugacccgguggaugcucauugaggccgagcugaaaugcuuuggaaacacagcugucgccaaguguaacgaaaaacaugacgaggaguucugcgauaugcuucgccuguuugacuucaauaagcaggcuauccagagacucaaagccgaagcgcagaugagcauucaacugaucaacaaggccgugaaugcucuuaucaacgaccagcugauuaugaagaaucaccuccgggauaucaugggcauuccuuauugcaacuacuccaaauauuguuaccugaaucacaccacaaccgggaagacgagccugcccaaaugcugucucgugucuaacggauccuaccugaaugaaacacauuucagcgacgauaucgagcagcaagccgacaacaugauuaccgagaugcuucagaaggaauauauggagcgccagggcaaaaccccucuggggcucgucgaucuguuuguuuucucuaccagcuuuuaccugaucuccaucuuccuucaccucgugaagauuccgacacauagacacaucgugggaaaacccugcccuaagccccaucggcugaaucacaugggcauuuguucuugcggccuguauaagcagccugggguccccgugaaauggaagcgcuga

SEQ ID NO: 38370 - RNA, 1476 nt, Artificial Sequence
  derived and/or modified CDS sequence (opt5) from LASV(LM776-SLE-2012;Clade IV)__AIT17824__GPCmut11
augggccagaucgugaccuucuuucaagaggucccccacguuauugaagaggugaugaacaucgugcugauugcccucagcauccuggcuguccuuaaggggcuguacaauuucgccacaugcggacucgugggccugguuacguuucuucugcucugugggagauccugcaccacaucuguguauaaaggagucuacgaacugcagacccuggagcucaacauggaaacacugaauaugaccaugccucuuagcuguacaaagaacaauucccaucacuauauuauggugggcaacgagaccgggcuggagcucacgcugaccaauacaucuaucaucaaccauaaauucugcaaucuuagcgacgcgcacaagaaaaaccuguacgaucaugcucucauguccauuaucucuaccuuucaccugagcauuccgaauuucaaccaguaugaagccauguccugugacuuuaauggaggcaagaucagcguucaguacaaccugucucacuccuaugccggcgaugcugccaaucauugcgggacaguggcuaacggaguccuccaaaccuucaugcggauggccuggggcgggagcuacauugcgcuggacucuggacacggcaagugggauuguaucaugacguccuaccaguaucuuauuauccagaacacaaccugggaggaccauugccaguuuagccgccccucuccuaucggguaccugggacuccugucccaaagaacacgggauauuuauaucagccgcagacuucugggcaccuucaccuggacacucuccgacucugaaggcaaagauacgcccgggggauacugucugacccgguggaugcugauugaggccgagcucaagugcuuuggcaauacagcuguggccaaauguaacgaaaagcacgacgaggaguucugcgauaugcugcgccuuuuugacuucaauaaacaggcuauccagagacugaaggccgaagcgcagaugagcauucaacucaucaacaaggccgugaaugcucugaucaacgaucagcuuauuaugaaaaaucaucugcgggacaucauggggauuccuuauugcaacuacuccaaguauuguuaccucaaucacaccacaaccggaaaaacgagccugcccaagugcugucuggucucuaacggcuccuaccucaaugaaacacacuucagcgacgauaucgagcagcaagccgacaacaugauuaccgagaugcugcagaaagaauauauggagcgccaggggaagaccccucuuggacugguugaucucuuuguguucucuaccagcuuuuaccugaucuccaucuuccugcaucuugugaaaauuccgacacacagacauaucgucggcaagucuugccccaagccucaccggcucaaucacaugggcauuuguagcugcgggcuguauaaacagcccggagugccuguucgcuggaagagauga

SEQ ID NO: 38371 - RNA, 1476 nt, Artificial Sequence
  derived and/or modified CDS sequence (opt5) from LASV(Mad39;Clade IV)__ANH09722__GPCmut11
augggccagaucgugaccuucuuucaagaggucccccacguuauugaagaggugaugaacaucgugcugauugcccucagcauccuggcuguccuuaaggggcuguacaauguggccacaugcggacucauuggccugguuacguuccuucugcucugugggagauccugcaccacaacccuguauaaaggaguguacgaacugcaggcgcucgagcugaacauggaaacacuuaauaugaccaugccucugucuuguacaaagaacaauagccaucacuauauccgggucggcaacgagaccgggcucgagcugacgcuuaccaauacaucccugaucaaccauaaauuuugcaaucucucugacgcucacaagaaaaaccuguacgaucaugcccugaugagcauuaucuccaccuuccaccucucuauuccgaauuuuaaccaguaugaagccaugagcugugacuucaaugauggaaagaucuccgugcaguacaaccugagccacacauaugcuggcgacaccgccaaucauugcggcacgguugcuaacggggugcuucaaacauuuaugcgcauggccuggggaggcucuuacauugcgcuggauuccgggagaggaggcugggacuguaucaugaccagcuaccaguaucucauuauccagaacacaaccugggaggaucacugccaguucucucggcccuccccuaucggguaccugggacuucugagccaacgcaccagagacauuuauaucucucggcgccuccugggcacauuuacguggacccuguccgauagcgaaggcaaggacacacccgggggauacugucucaccagauggaugcugauugaggccgagcuuaaaugcuucggcaauacagcugucgccaaguguaacgaaaaacaugaugaggaauuuugcgacaugcugcgccucuucgauuuuaauaagcaggcuauccagcggcugaaagccgaggcgcagauguccauucaacuuaucaacaaggccgugaaugcucugaucaacgaccagcucauuaugaagaaucaccugagagacaucauggggauuccuuauugcaacuacucuaaauauuguuaccugaaucacaccgugacgggaaagacaagccuccccaaaugcugucuggucuccaacggcagcuaccuuaaugaaacccauuucucugaugacaucgagcagcaagccgauaacaugauuaccgagaugcugcagaaggaauauauggagcggcaggggaaaacaccucucggacugguugaccuguucguguuuuccaccagcuucuaccuuaucucuaucuuucuccaccuggugaagauuccgacacaucgccacgucgugggcaaacccugcccuaagccccauagacugaaucacaugggcaucuguagcugcggguucuauaagcagccuggaguucccgugcgguggaaacgcuga

SEQ ID NO: 38372 - RNA, 1476 nt, Artificial Sequence
  derived and/or modified CDS sequence (opt5) from LASV(Z0947-SLE-2011;Clade IV)__AIT17840__GPCmut11
augggccagaucgugaccuucuuucaagaggucccccacguuauugaagaggugaugaacaucgugcugauugcccucagcauccuggcuguccuuaaggggcuguacaauuucgccacaugcggacucgugggccugguuacguuucuucugcucugugggagauccugcaccauuucucuguauaaaggaguguacgaacugcagacacucgagcugaacauggaaacccuuaauaugacaaugccucugagcuguaccaagaacaauucccaucacuauaucauggucggcaacgagacagggcucgagcugacccuuacgaauaccucuaucauuaaccauaaauucugcaaucugagcgacgcgcacaagaaaaaccucuacgaucaugcucugauguccaucauuucuacauuucaccugagcaucccgaauuucaaccaguaugaagccauguccugugacuuuaauggaggcaagauuagcgugcaguacaaccucucucacuccuaugccggcgaugcugccaaucauugcgggaccguugcuaacggagugcugcaaacauucaugcggauggccuggggcgggagcuacaucgcgcuugacucuggacgcgauagaugggacuguauuaugaccuccuaccaguaucugaucauccagaacacgacaugggaggaucacugccaguuuagccggcccucuccuauuggcuaccucgggcugcuuucccaacgcaccagagacaucuauauuagccggcgccugcucggaacauucaccuggacccuguccgauucugaaggcaaggacacacccggcggguacugucugacgagauggaugcucaucgaggccgagcugaaaugcuuuggaaauaccgcugucgccaaguguaacgaaaaacaugaugaggaguucugcgacaugcuucggcuguuugauuucaauaagcaggcuauucagcgccucaaagccgaagcgcagaugagcauccaacugaucaacaaggccgugaaugcucuuauuaacgaccagcugaucaugaagaaucaccucagagacauuaugggcaucccuuauugcaacuacuccaaauauuguuaccugaaucacacaaccacagggaagaccagccugcccaaaugcugucucgugucuaacggauccuaccugaaugaaacgcauuucagcgaugacauugagcagcaagccgauaacaugaucacagagaugcuucagaaggaauauauggagcggcagggcaaaaccccucuggggcucgucgaccuguuuguuuucucuaccagcuuuuaccugaucuccauuuuccuucaccucgugaagaucccgacacaucgccacauugugggaaaacccugcccuaagccccauagacugaaucacaugggcaucuguucuugcggccuguauaagcagccugggguccccgugaaauggaagcgguga

SEQ ID NO: 38373 - RNA, 1717 nt, Artificial Sequence
  mRNA product Design a-1 (hSL-A64-N5) comprising derived and/or modified sequence from LASV(Josiah;Clade IV)__NP_694870__GPCmut11 (opt1)
aggagagucccgcagucggcguccagcggcucugcuuguucgugugugugucguugcaggccuuauucaagcuuaccaugggccagaucgugaccuucuuccaggaggucccccacgugaucgaggaggugaugaacaucguccugaucgcccucagcgugcuggccgugcugaaggggcucuacaacuucgcgaccugcggccuggucgggcuggugacguuccuccugcugugcggccgcuccugcaccaccagccucuacaaggggguguacgagcugcagacccuggagcucaacauggagacgcugaacaugaccaugccgcuguccugcaccaagaacaacagccaccacuacaucauggucggcaacgagaccggccucgagcugacgcugaccaacaccuccaucaucaaccacaaguucugcaaccucagcgacgcccacaagaagaaccuguacgaccacgcccugauguccaucaucagcaccuuccaccucuccauccccaacuucaaccaguacgaggccaugagcugcgacuucaacgggggcaagaucuccgugcaguacaaccugagccacuccuacgccggggacgcggccaaccacugcggcacgguggccaacgggguccugcagaccuucaugcggauggccuggggcggcagcuacaucgcgcucgacuccgggcgcggcaacugggacugcaucaugaccagcuaccaguaccugaucauccagaacaccacgugggaggaccacugccaguucucccggcccagccccaucggguaccugggccuccugucccagcgcacccgggacaucuacaucagccgccggcugcucggcaccuucaccuggacgcugagcgacuccgaggggaaggacaccccgggcggguacugccugacccgcuggaugcucaucgaggccgagcugaagugcuucggcaacaccgccguggccaagugcaacgagaagcacgacgaggaguucugcgacaugcugcggcuguucgacuucaacaagcaggccauccagcgccugaaggcggaggcccagaugagcauccagcugaucaacaaggccgugaacgcccucaucaacgaccagcugaucaugaagaaccaccuccgggacaucauggggauccccuacugcaacuacuccaaguacugcuaccucaaccacacgaccaccggccgcaccagccugcccaagugcugccuggucuccaacggcagcuaccucaacgagacgcacuucuccgacgacaucgagcagcaggccgacaacaugaucaccgagaugcugcagaaggaguacauggagcggcaggggaagacgccccugggccucguggaccuguucguguucagcaccuccuucuaccugaucagcaucuuccugcaccucgucaagaucccgacccaccgccacaucguggggaaguccugccccaagccccaccggcugaaccacaugggcaucugcagcugcgggcuguacaagcagcccggcgugccggucaaguggaagcgcugaggacuagucccuguucccagagcccacuuuuuuuucuuuuuuugaaauaaaauagccugucuuucagaucucaaaggcucuuuucagagccaccaaaaaaaaaaaaaaaaaaaaaaaaaaaaaaaaaaaaaaaaaaaaaaaaaaaaaaaaaaaaaaaaagaauu

SEQ ID NO: 38374 - RNA, 1714 nt, Artificial Sequence
  mRNA product Design a-1 (hSL-A64-N5) comprising derived and/or modified sequence from LASV(LP;Clade I)__AAF86701__GPCmut11 (opt1)
aggagagucccgcagucggcguccagcggcucugcuuguucgugugugugucguugcaggccuuauucaagcuuaccaugggccagaucaucaccuucuuccaggaggugccccacgucaucgaggaggugaugaacaucgugcugaucgcccucagccugcuggccauccucaaggggcuguacaacaucgcgaccugcggcaucaucgggcuggucgccuuccucuuccugugcggcaaguccugcagccugacgcucaagggcggguacgagcugcagacccuggagcucaacauggagacccugaacaugaccaugccgcuguccugcacgaagaacagcucccaccacuacauccgcgugggcaacgagaccgggcucgagcugacccugaccaacacgagcaucaucaaccacaaguucugcaaccucuccgacgcccacaagaagaaccuguacgaccacgcccugaugagcaucaucuccaccuuccaccucagcauccccaacuucaaccaguacgaggccauguccugcgacuucaacggcgggaagaucagcgugcaguacaaccugucccacagcuacgcgggcgacgccgccgagcacugcgggaccgucgccaacggcgugcugcagaccuucaugcggauggcguggggcgggcgcuacaucgcccucgacuccggcaaggggaacugggacugcaucaugacgagcuaccaguaccugaucauccagaacaccaccugggaggaccacugccaguucucccggcccagccccaucggcuaccugggccuccugucccagcgcacccgggacaucuacaucagccgccggcugcucgggacguucaccuggacccugagcgacuccgagggcaacgagacccccgggggcuacugccugacgcgcuggaugcucaucgaggccgagcugaagugcuucgggaacaccgccguggccaagugcaacgagaagcacgacgaggaguucugcgacaugcugcggcuguucgacuucaacaagcaggcgauccgccggcugaaggccgaggcccagaugagcauccagcugaucaacaaggccgucaacgcccucaucaacgaccagcugaucaugaagaaccaccuccgcgacaucaugggcauccccuacugcaacuacuccaaguacugcuaccucaaccacaccagcuccggccggaccagccugcccaagugcugccugaucuccaacgggagcuaccucaacgagacgcaguucuccgacgacaucgagcagcaggcggacaacaugaucaccgagaugcugcagaaggaguacaucgagcgccagggcaagaccccgcuggggcucguggacaucuucaucuucagcaccuccuucuaccugaucagcaucuuccugcaccugaucaagaucccgacgcaccggcacaucgugggcaagcccugccccaagccccaccgccucaaccacaugggggucugcuccugcggccuguacaagcacccgggcgugcccaccaaguggaagcggugaggacuagucccuguucccagagcccacuuuuuuuucuuuuuuugaaauaaaauagccugucuuucagaucucaaaggcucuuuucagagccaccaaaaaaaaaaaaaaaaaaaaaaaaaaaaaaaaaaaaaaaaaaaaaaaaaaaaaaaaaaaaaaaaagaauu

SEQ ID NO: 38375 - RNA, 1714 nt, Artificial Sequence
  mRNA product Design a-1 (hSL-A64-N5) comprising derived and/or modified sequence from LASV(803213;Clade II)__AAF86703__GPCmut11 (opt1)
aggagagucccgcagucggcguccagcggcucugcuuguucgugugugugucguugcaggccuuauucaagcuuaccaugggccagaucaucaccuucuuccaggaggugccccacgucaucgaggaggugaugaacaucgugcugaucgcccucagccugcuggccauccucaaggggaucuacaacgucgcgaccugcggccuguucgggcugaucuccuuccuccugcugugcggccgcagcugcuccgugacguacaaggggguguacgagcuccagacccuggagcugaacauggccaaccucaacaugaccaugccgcugagcugcaccaagaacaacucccaccacuacaucauggucggcaacgagacgggccuggagcucacccugaccaacaccagcaucaucaaccacaaguucugcaaccuguccgacgcccacaagaagaaccucuacgaccacgcccugaugagcaucaucuccacguuccaccugagcauccccaacuucaaccaguacgaggccauguccugcgacuucaacgggggcaagaucagcgugcaguacaaccucucccacagcuucgcgguggacgccgccaaccacugcgggaccaucgccaacggcguccugcagaccuucaugcggauggcguggggcggguccuacaucgcccuggacagcggcaaggggaacugggacugcaucaugaccuccuaccaguaccucaucauccagaacacgaccugggaggaccacugccaguucagccgccccucccccaucggcuaccuggggcugcucagccagcggacccgcgacaucuacaucagccggcgccugcugggcaccuucacguggacccucuccgacagcgagggcaacgaggcccccgggggcuacugccugacccgguggaugcugaucgaggccgagcucaagugcuucgggaacaccgccguggcgaagugcaacgagaagcacgacgaggaguucugcgacaugcugcgccuguucgacuucaacaagcaggccaucaagcggcucaagacggaggcccagauguccauccagcugaucaacaaggccgugaacgcccugaucaacgaccagcucaucaugaagaaccaccuccgcgacaucaugggcauccccuacugcaacuacagccgguacugcuaccugaaccacaccgucaccgggaagaccucccugccccgcugcugccuggugagcaacggcuccuaccugaacgagacgcacuucagcgacgacaucgagcagcaggcggacaacaugaucaccgagaugcuccagaaggaguacauggaccggcagggcaagaccccgcuggggcugguggaccucuucgucuucuccaccagcuucuaccugaucuccaucuuccugcaccuggugaagaucccgacgcaccgccacaucgugggcaagcccugccccaagccccaccggcucaaccacauggggaucugcagcugcggccuguacaagcacccggggguccccgugaaguggaagcgcugaggacuagucccuguucccagagcccacuuuuuuuucuuuuuuugaaauaaaauagccugucuuucagaucucaaaggcucuuuucagagccaccaaaaaaaaaaaaaaaaaaaaaaaaaaaaaaaaaaaaaaaaaaaaaaaaaaaaaaaaaaaaaaaaagaauu

SEQ ID NO: 38376 - RNA, 1714 nt, Artificial Sequence
  mRNA product Design a-1 (hSL-A64-N5) comprising derived and/or modified sequence from LASV(GA391;Clade III)__CAA36645__GPCmut11 (opt1)
aggagagucccgcagucggcguccagcggcucugcuuguucgugugugugucguugcaggccuuauucaagcuuaccaugggccagaucgugaccuucuuccaggaggucccccacgugaucgaggaggugaugaacaucguccugaucgcccucagcauccuggccauccugaaggggcucuacaacguggcgaccugcggccugaucgggcuggugacguuccuccugcuguccggccgcagcugcucccucaucuacaaggggaccuacgagcugcagacccuggagcucaacauggagacccugaacaugacgaugccgcugagcugcaccaagaacaacucccaccacuacauccgggucggcaacgagaccggccucgagcugacccugacgaacaccagcauccucaaccacaaguucugcaaccuguccgacgcccacaagcgcaaccuguacgaccacagccucauguccaucaucagcaccuuccaccuguccauccccaacuucaaccaguacgaggccaugagcugcgacuucaacgggggcaagaucaccgugcaguacaaccugucccacagcuucgccguggacgccgcggggcacugcggcacgcucgccaacgggguccugcagaccuucaugcggauggccuggggcggcuccuacaucgcccuggacagcgggcgcggcaacugggacugcaucaugaccuccuaccaguaccucaucauccagaacaccacgugggacgaccacugccaguucagccggcccucccccaucggguaccugggccugcucagccagcgcacccgggacaucuacaucagccgccggcugcugggcaccuucaccuggacgcucuccgacagcgaggggaacgagaccccgggcggguacugccugacccgcuggaugcugaucgaggcggagcucaagugcuucggcaacaccgccguggccaagugcaacgagaagcacgacgaggaguucugcgacaugcugcggcuguucgacuucaacaagcaggccauccgccggcucaagacggaggcccagauguccauccagcugaucaacaaggcggugaacgcccugaucaacgaccagcucaucaugaagaaccaccuccgcgacaucauggggauccccuacugcaacuacagccgguacugcuaccugaaccacaccuccaccggcaagaccagccugccccgcugcugccugaucuccaacggcagcuaccugaacgagacgaaguucuccgacgacaucgagcagcaggccgacaacaugaucaccgagaugcuccagaaggaguacaucgaccggcaggggaagacgccccugggccuggucgaccuguucguguucagcaccuccuucuaccucaucagcaucuuccugcaccuggugaagaucccgacccaccgccacaucgucgggaagcccugccccaagccccaccggcucaaccacaugggcaucugcuccugcgggcuguacaagcagccgggcgugcccgugcgcuggaagcggugaggacuagucccuguucccagagcccacuuuuuuuucuuuuuuugaaauaaaauagccugucuuucagaucucaaaggcucuuuucagagccaccaaaaaaaaaaaaaaaaaaaaaaaaaaaaaaaaaaaaaaaaaaaaaaaaaaaaaaaaaaaaaaaaagaauu

SEQ ID NO: 38377 - RNA, 1717 nt, Artificial Sequence
  mRNA product Design a-1 (hSL-A64-N5) comprising derived and/or modified sequence from LASV(AV;Clade V)__CCA30314__GPCmut11 (opt1)
aggagagucccgcagucggcguccagcggcucugcuuguucgugugugugucguugcaggccuuauucaagcuuaccaugggccagaucgugaccuucuuccaggaggucccccacgugaucgaggaggugaugaacaucguccugaucgcccucagcauccuggccgugcugaaggggcucuacaacaucgcgaccugcggccugaucgggcugaucacguuccuccugcugugcggccgcuccugcagcuccaaccucuacaaggggguguacgagcugcagagccuggaccucaacauggagacccugaacaugaccaugccgcuguccugcaccaagaacaacagccaccacuacauccgggucggcaacgacacgggccucgagcugacccugaccaacaccuccauccucaaccacaaguucugcaaccugagcgacgcccacaagaaggaccuguacgaccacgcccucauguccaucaucagcacguuccaccuguccauccccaacuucaaccaguacgaggccaugagcugcgacuucaacgggggcaagaucuccgugcaguacaaccugagccacuccuacgccaucgacgcggccaaccacugcgggaccguggccaacggcauccuccagaccuucaugcgcauggccuggggcgggagcuacaucgcgcuggacuccggccgggggaacugggacugcaucaugaccagcuaccaguaccugaucauccagaacacgaccugggagaaccacugccaguucucccgccccagccccaucggcuaccucgggcugcugagccagcggacccgcgacaucuacaucucccggcgccuccugggcaccuucacguggacccugagcgacuccgagggcaacgccacccccgggggcuacugccucacccgguggaugcugaucgaggccgagcugaagugcuucgggaacacggccgucgccaagugcaacgagaagcacgacgaggaguucugcgacaugcuccgccuguucgacuucaacaagcaggcgaucagccggcugaaguccgaggcccagaugagcauccagcucaucaacaaggccgugaacgcccugaucaacgaccagcugaucaugaagaaccaccuccgcgacaucaugggcauccccuacugcaacuacuccaaguacugcuaccugaaccacaccaucaccgggaagaccagccugcccaagugcugccucguguccaacggcagcuaccugaacgagacgcacuucuccgacgacaucgagcagcaggccgacaacaugaucaccgagaugcugcagaaggaguacauggagcggcagggcaagaccccgcucgggcuggucgaccuguucguguucagcaccuccuucuaccugaucagcaucuuccuccgccuggugaagaucccgacgcaccggcacaucgucggcaagcccugccccaagccccaccgccugaaccacauggggaucugcuccugcggccucuacaagcagccgggggugcccgugcgguggaagcgcugaggacuagucccuguucccagagcccacuuuuuuuucuuuuuuugaaauaaaauagccugucuuucagaucucaaaggcucuuuucagagccaccaaaaaaaaaaaaaaaaaaaaaaaaaaaaaaaaaaaaaaaaaaaaaaaaaaaaaaaaaaaaaaaaagaauu

SEQ ID NO: 38378 - RNA, 1714 nt, Artificial Sequence
  mRNA product Design a-1 (hSL-A64-N5) comprising derived and/or modified sequence from LASV(Togo/2016/7082;Clade VI)__AMR44577__GPCmut11 (opt1)
aggagagucccgcagucggcguccagcggcucugcuuguucgugugugugucguugcaggccuuauucaagcuuaccaugggccagaucaucaccuucuuccaggaggugccccacgucaucgaggaggugaugaacaucgugcugaucgcccucagccugcuggccauccucaagggggucuacaacguggcgaccugcggcaucaucgggcuggugacguuccuguuccucugcggccgcuccugcagccugaucuacaagggguccuacgagcugcagacccucgagcugaacauggagacccugaacaugaccaugccgcucagcugcacgaagaacuccagccaccacuacauccgggucggcaacgagaccggccuggagcugacccucaccaacacguccaucaucaaccacaaguucugcaaccugagcgacgcccacaagcgcaaccuguacgaccacgcccucauguccauccugagcaccuuccaccuguccauccccaacuucaaccaguacgaggccaugagcugcgacuucaacgggggcaagaucuccgugcaguacaaccucagccacgccuacgcgguggacgccgccgagcacugcgggaccgucgccaacggcgugcugcagaccuucaugcggauggcguggggcggguccuacaucgcccuggacagcggccgcgggaacugggacugcaucaugacguccuaccaguaccucaucauccagaacaccaccugggaggaccacugccaguucagccggcccucccccaucggcuaccuggggcugcucagccagcgcacccgggacaucuacaucagccgccggcugcugggcacguucaccuggacccucuccgacagcgagggcaacgagacccccgggggcuacugccugacgcgcuggaugcugaucgaggccgagcucaagugcuucgggaacaccgccguggccaagugcaacgagaagcacgacgaggaguucugcgacaugcugcggcuguucgacuucaacaagcaggcgauccagcgccucaaguccgaggcccagaugagcauccagcugaucaacaaggccgucaacgcccugaucaacgaccagcucaucaugaagaaccaccuccgggacaugaugggcauccccuacugcaacuacuccaaguacugcuaccugaaccacaccagcuccgggcgcaccagccugcccaagugcugccugguguccaacggcagcuaccugaacgagacgcacuucuccgacgacaucgagcagcaggccgacaacaugaucaccgagaugcuccagaaggaguacaucgaccggcagggcaagaccccgcuggggcugguggaccucuucgucuucagcaccuccuucuaccugaucagcaucuuccugcaccugaucaagaucccgacgcaccgccacaucgugggcaagcccugccccaagccccaccggcucaaccacauggggaucugcuccugcggccuguacaagcagccgggggugcccacccgcuggaagcggugaggacuagucccuguucccagagcccacuuuuuuuucuuuuuuugaaauaaaauagccugucuuucagaucucaaaggcucuuuucagagccaccaaaaaaaaaaaaaaaaaaaaaaaaaaaaaaaaaaaaaaaaaaaaaaaaaaaaaaaaaaaaaaaaagaauu

SEQ ID NO: 38379 - RNA, 1714 nt, Artificial Sequence
  mRNA product Design a-1 (hSL-A64-N5) comprising derived and/or modified sequence from LASV(KAK-428;Clade n.d. (VII))__ANH09740__GPCmut11 (opt1)
aggagagucccgcagucggcguccagcggcucugcuuguucgugugugugucguugcaggccuuauucaagcuuaccaugggccagaucgugaccuucuuccaggaggucccccacgugaucgaggaggugaugaacaucguccugaucgcccucagccugcuggccauccucaaggggcuguacaacuucgcgaccugcggcgugaucgggcugaucacguuccuccugcugugcggccgcuccugcagcgccaccuacaaggggcaguacgagcuccagacccuggagcugaacauggagucccucaacaugaccaugccgcugagcugcacgaagaacaacucccaccacuacauccgggccggcaacaacaccggccuggagcucacccugaccaacacgagcaucaucucccacaaguucugcaaccugagcgacgcccacaagaagaaccucuacgaccacacccugauguccaucaucaccaccuuccaccugagcauccccaacuucaaccaguacgaggccauguccugcgacuucaacgggggcaagaucagcauccaguacaaccucucccacagcuacgcgggggacgccgcccagcacugcggcacgguggccaacgggguccugcagaccuucaugcgcauggcguggggcggcuccuaccuggcccucgacagcgggcggcgcggcugggacugcaucaucuccagcuaccaguaccugaucauccagaacaccaccugggacgaccacugccaguucucccggcccagccccaucggguaccugggcuucgugagccagaagacgcgcgacaucuacaucucccggcgccuccugggcaccuucaccuggacccugagcgacuccgaggggcacgacaugccgggcggguacugccucacgcgguggaugcugaucgaggccgaccugaagugcuucggcaacaccgccguggccaagugcaacgagaagcacgacgaggaguucugcgacauguggcgccucuucgacuucaacaagcaggcgauccagcggcugaaggccgaggcccagaugaacauccagcugaucaacaaggccgucaacgcccucaucaacgaccagcugaugaugaagaaccaccuccgcgacaucauggggauccccuacugcaacuacagcaaguucugcuaccugaacaacaccaccacgggccggaccucccugccccgcugcugccugaucagcaacggcuccuaccucaacgagacccacuucagcgacgacaucgagcagcaggcggacaacaugaucaccgagaugcugcagaaggaguacauggaccggcaggggaagacgccccugggccucguggaccuguucguguucuccaccagcuucuaccugaucaccaucuuccuccaccuggucaagaucccgacccaccgccacaucguggggaagcccugccccaagccccaccggcugaaccacaugggcaucugcuccugcgggcuguacaagcagccgggcgugcccguccgcuggaagcggugaggacuagucccuguucccagagcccacuuuuuuuucuuuuuuugaaauaaaauagccugucuuucagaucucaaaggcucuuuucagagccaccaaaaaaaaaaaaaaaaaaaaaaaaaaaaaaaaaaaaaaaaaaaaaaaaaaaaaaaaaaaaaaaaagaauu

SEQ ID NO: 38380 - RNA, 1714 nt, Artificial Sequence; identical to SEQ ID NO: 38374
  mRNA product Design a-1 (hSL-A64-N5) comprising derived and/or modified sequence from LASV(Pinneo-NIG-1969;Clade I)__AIT17836__GPCmut11 (opt1)

SEQ ID NO: 38381 - RNA, 1714 nt, Artificial Sequence
  mRNA product Design a-1 (hSL-A64-N5) comprising derived and/or modified sequence from LASV(ISTH0009-NIG-2011;Clade II)__AIT17404__GPCmut11 (opt1)
aggagagucccgcagucggcguccagcggcucugcuuguucgugugugugucguugcaggccuuauucaagcuuaccaugggccagaucaucaccuucuuccaggaggugccccacgucaucgaggaggugaugaacaucgugcugaucgcccucagccugcuggccauccucaaggggaucuacaacgucgcgaccugcggccuguucgggcugguguccuuccuccugcugugcggccgcagcugcuccacgaccuacaaggggguguacgagcuccagacccuggagcuggacauggccagccucaacaugaccaugccgcuguccugcacgaagaacaacagccaccacuacaucauggucggcaacgagaccggccuggagcucacccugaccaacacguccaucaucaaccacaaguucugcaaccugagcgacgcccacaagaagaaccucuacgaccacgcccugauguccaucaucagcaccuuccaccuguccauccccaacuucaaccaguacgaggccaugagcugcgacuucaacgggggcaagaucuccgugcaguacaaccucagccacgcguacgccguggacgccgccaaccacugcgggaccaucgcgaacggcguccugcagaccuucaugcggauggccuggggcggguccuacaucgcccuggacagcggcaagggguccugggacugcaucaugacgagcuaccaguaccucaucauccagaacaccaccugggaggaccacugccaguucucccgccccagccccaucggcuaccuggggcugcucagccagcggacccgcgacaucuacaucucccggcgccugcugggcacguucaccuggacccucagcgacuccgagggcaacgagacccccgggggcuacugccugacgcgguggaugcugaucgaggccgagcucaagugcuucgggaacaccgccguggcgaagugcaacgagaagcacgacgaggaguucugcgacaugcugcgccuguucgacuucaacaagcaggccauccggcgccucaagaccgaggcccagaugagcauccagcugaucaacaaggccgugaacgcccugaucaacgaccagcucaucaugaagaaccaccuccgggacaucaugggcaucccguacugcaacuacuccaaguacugcuaccugaaccacaccgucacggggaagaccagccugccccgcugcugccugguguccaacggcagcuaccugaacgagacccacuucuccgacgacaucgagcagcaggcggacaacaugaucaccgagcuccugcagaaggaguacauggaccggcagggcaagacgccccuggggcucguggaccuguucgucuucagcaccuccuucuaccugaucagcaucuuccugcaccucaucaagaucccgacccaccgccacaucaccggcaagcccugccccaagccccaccggcugaaccacauggggaucugcuccugcggccuguacaagcacccgggggugcccgugaaguggaagcgcugaggacuagucccuguucccagagcccacuuuuuuuucuuuuuuugaaauaaaauagccugucuuucagaucucaaaggcucuuuucagagccaccaaaaaaaaaaaaaaaaaaaaaaaaaaaaaaaaaaaaaaaaaaaaaaaaaaaaaaaaaaaaaaaaagaauu

SEQ ID NO: 38382 - RNA, 1714 nt, Artificial Sequence
  mRNA product Design a-1 (hSL-A64-N5) comprising derived and/or modified sequence from LASV(ISTH2010-NIG-2012;Clade II)__AIT17482__GPCmut11 (opt1)
aggagagucccgcagucggcguccagcggcucugcuuguucgugugugugucguugcaggccuuauucaagcuuaccaugggccagaucaucaccuucuuccaggaggugccccacgucaucgaggaggugaugaacaucgugcugaucgcccucagccugcuggccauccucaaggggaucuacaacgucgcgaccugcggccuguucgggcugguguccuuccuccugcugugcggccgcagcugcuccacgaccuacaaggggguguacgagcuccagacccuggagcuggacauggccagccucaacaugaccaugccgcuguccugcacgaagaacaacagccaccacuacaucauggucggcaacgagaccggccuggagcucacccugaccaacacguccaucaucaaccacaaguucugcaaccugagcgacgcccacaagaagaaccucuacgaccacgcccugauguccaucaucagcaccuuccaccuguccauccccaacuucaaccaguacgaggccaugagcugcgacuucaacgggggcaagaucuccgugcaguacaaccucagccacgcguacgccguggacgccgccaaccacugcgggaccaucgcgaacggcguccugcagaccuucaugcggauggccuggggcggguccuacaucgcccuggacagcggcaagggguccugggacugcaucaugacgagcuaccaguaccucaucauccagaacaucaccugggaggaccacugccaguucucccgccccagccccaucggcuaccuggggcugcucagccagcggacccgcgacaucuacaucucccggcgccugcugggcaccuucacguggacccucagcgacuccgagggcaacgagacccccgggggcuacugccugacccgguggaugcugaucgaggccgagcucaagugcuucgggaacacggccguggcgaagugcaacgagaagcacgacgaggaguucugcgacaugcugcgccuguucgacuucaacaagcaggccauccggcgccucaagaccgaggcccagaugagcauccagcugaucaacaaggccgugaacgcccugaucaacgaccagcucaucaugaagaaccaccuccgggacaucaugggcauccccuacugcaacuacuccaaguacugcuaccugaaccacaccgucaccgggaagacgagccugccccgcugcugccugguguccaacggcagcuaccugaacgagacccacuucuccgacgacaucgagcagcaggcggacaacaugaucaccgagcuccugcagaaggaguacaucgaccggcagggcaagaccccgcuggggcucguggaccuguucgucuucagcacguccuucuaccugaucagcaucuuccugcaccucgugaagaucccgacccaccgccacguggucggcaagcccugccccaagccccaccggcugaaccacauggggaucugcuccugcggccuguacaagcacccgggggugcccgugaaguggaagcgcugaggacuagucccuguucccagagcccacuuuuuuuucuuuuuuugaaauaaaauagccugucuuucagaucucaaaggcucuuuucagagccaccaaaaaaaaaaaaaaaaaaaaaaaaaaaaaaaaaaaaaaaaaaaaaaaaaaaaaaaaaaaaaaaaagaauu

SEQ ID NO: 38383 - RNA, 1714 nt, Artificial Sequence
  mRNA product Design a-1 (hSL-A64-N5) comprising derived and/or modified sequence from LASV(Lassa virus/H.sapiens-wt/NGA/2015/ISTH_0543;Clade II)__AVO03639__GPCmut11 (opt1)
aggagagucccgcagucggcguccagcggcucugcuuguucgugugugugucguugcaggccuuauucaagcuuaccaugggccagaucaucaccuucuuccaggaggugccccacgucaucgaggaggugaugaacaucgugcugaucgcccucagccugcuggccauccucaaggggaucuacaacgucgcgaccugcggccuguucgggcugguguccuuccuccugcugugcggccgcagcugcuccacgaccuacaaggggguguacgagcuccagacccuggagcuggacauggccaaccucaacaugaccaugccgcugagcugcacgaagaacaacucccaccacuacaucauggucggcaacgagaccggccuggagcucacccugaccaacacgagcaucaucaaccacaaguucugcaaccuguccgacgcccacaagaagaaccucuacgaccacgcccugaugagcaucaucuccaccuuccaccugagcauccccaacuucaaccaguacgaggccauguccugcgacuucaacgggggcaagaucagcgugcaguacaaccucucccacaccuacgcgguggacgccgccaaccacugcgggaccaucgccaacggcguccugcagacguucaugcggauggcguggggcgggagcuacaucgcccuggacuccggcaaggggagcugggacugcaucaugaccuccuaccaguaccucgugauccagaacaccaccugggaggaccacugccaguucagccgccccucccccaucggcuaccuggggcugcucagccagcggacgcgcgacaucuacaucagccggcgccugcugggcaccuucaccuggacccucuccgacagcgagggcaacgagacgcccgggggcuacugccugacccgguggaugcugaucgaggccgagcucaagugcuucgggaacaccgccguggccaagugcaacgagaagcacgacgaggaguucugcgacaugcugcgccuguucgacuucaacaagcaggcgauccggcgccucaagaccgaggcccagauguccauccagcugaucaacaaggccgucaacgcccugaucaacgaccagcucaucaugaagaaccaccuccgggacaucaugggcauccccuacugcaacuacagcaaguacugcuaccugaaccacacggugaccgggaagaccucccugccccgcugcugccuggugagcaacggcuccuaccugaacgagacccacuucagcgacgacaucgagcagcaggccgacaacaugaucacggagcuccugcagaaggaguacaucgaccggcagggcaagaccccgcuggggcucgucgaccuguucguguucuccaccagcuucuaccugaucuccaucuuccugcaccucgugaagaucccgacccaccgccacaucacgggcaagcccugccccaagccccaccggcugaaccacauggggaucugcagcugcggccuguacaagcacccggggguccccgugaaguggaagcgcugaggacuagucccuguucccagagcccacuuuuuuuucuuuuuuugaaauaaaauagccugucuuucagaucucaaaggcucuuuucagagccaccaaaaaaaaaaaaaaaaaaaaaaaaaaaaaaaaaaaaaaaaaaaaaaaaaaaaaaaaaaaaaaaaagaauu

SEQ ID NO: 38384 - RNA, 1714 nt, Artificial Sequence
  mRNA product Design a-1 (hSL-A64-N5) comprising derived and/or modified sequence from LASV(Lassa virus/H.sapiens-wt/NGA/2016/ISTH_0009;Clade II)__AVO03571__GPCmut11 (opt1)
aggagagucccgcagucggcguccagcggcucugcuuguucgugugugugucguugcaggccuuauucaagcuuaccaugggccagaucaucaccuucuuccaggaggugccccacgucaucgaggaggugaugaacaucgugcugaucgcccucagccugcuggccauccucaaggggaucuacaacgucgcgaccugcggccugcuggggcucguguccuuccugcugcucugcggccgcagcugcuccacgaccuacaaggggguguacgagcugcagacccuggagcucgacauggccagccugaacaugaccaugccgcuguccugcacgaagaacaacagccaccacuacaucauggucggcaacgagaccggccucgagcugacccugaccaacacguccaucaucaaccacaaguucugcaaccucagcgacgcccacaagaagaaccuguacgaccacgcccugauguccaucaucagcaccuuccaccucuccauccccaacuucaaccaguacgaggccaugagcugcgacuucaacgggggccggaucuccgugcaguacaaccugagccacuccuacgcgguggacgccgccaaccacugcgggaccaucgccaacggcguccugcagaccuucaugcgcauggcguggggcgggagcuacaucgcccucgacuccggcaaggggagcugggacugcaucaugacguccuaccaguaccugaucauccagaacaccaccugggaggaccacugccaguucagccggcccagccccaucggcuaccuggggcuccugucccagcgcacccgggacaucuacaucagccgccggcugcucggcacguucaccuggacccuguccgacagcgagggcaacgagacccccgggggcuacugccugacgcgcuggaugcucaucgaggccgagcugaagugcuucgggaacaccgccguggccaagugcaacgagaagcacgacgaggaguucugcgacaugcugcggcuguucgacuucaacaagcaggcgauccgccggcugaagaccgaggcccagauguccauccagcugaucaacaaggccgugaacgcccucaucaacgaccagcugaucaugaagaaccaccuccgcgacaucaugggcaucccguacugcaacuacagcaaguacugcuaccucaaccacaccgucacggggaagaccucccugccccggugcugccuggugagcaacggcuccuaccucaacgagacccacuucagcgacgacaucgagcagcaggccgacaacaugaucaccgagcugcugcagaaggaguacaucgaccgccagggcaagacgccccucgggcugguggaccuguucgucuucuccaccagcuucuaccugaucuccaucuuccuccaccuggugaagaucccgacccaccggcacaucaccggcaagcccugccccaagccccaccgccugaaccacauggggaucugcagcugcggccucuacaaccacccgggggugcccgucaaguggaagcggugaggacuagucccuguucccagagcccacuuuuuuuucuuuuuuugaaauaaaauagccugucuuucagaucucaaaggcucuuuucagagccaccaaaaaaaaaaaaaaaaaaaaaaaaaaaaaaaaaaaaaaaaaaaaaaaaaaaaaaaaaaaaaaaaagaauu

SEQ ID NO: 38385 - RNA, 1714 nt, Artificial Sequence
  mRNA product Design a-1 (hSL-A64-N5) comprising derived and/or modified sequence from LASV(Lassa virus/H.sapiens-wt/NGA/2016/ISTH_0017;Clade II)__AVO03567__GPCmut11 (opt1)
aggagagucccgcagucggcguccagcggcucugcuuguucgugugugugucguugcaggccuuauucaagcuuaccaugggccagaucaucaccuucuuccaggaggugccccacgucaucgaggaggugaugaacaucgugcugaucgcccucagccugcuggccauccucaaggggaucuacaacgucgcgaccugcggccuguucgggcugguguccuuccuccugcugugcggccgcagcugcuccacgaccuacaaggggguguacgagcuccagacccuggagcuggacauggccagccucaacaugaccaugccgcuguccugcacgaagaacaacagccaccacuacaucauggucggcaacgagaccggccuggagcucacccugaccaacacguccaucaucaaccacaaguucugcaaccugagcgacgcccacaagaagaaccucuacgaccacgcccugauguccaucaucagcaccuuccaccuguccauccccaacuucaaccaguacgaggccaugagcugcgacuucaacgggggcaagaucuccgugcaguacaaccucagccacaccuacgcgaucgacgccgccaaccacugcgggaccaucgccaacggcgugcugcagacguucaugcggauggcguggggcggguccuacaucgcccuggacagcggcaagggguccugggacugcaucaugaccagcuaccaguaccucaucauccagaacaccaccugggaggaccacugccaguucucccgccccagccccaucggcuaccuggggcugcucagccagcggacgcgcgacaucuacaucucccggcgccugcugggcaccuucaccuggacccucagcgacuccgagggcaacgagacgcccgggggcuacugccugacccgguggaugcugaucgaggccgagcucaagugcuucgggaacaccgccgucgccaagugcaacgagaagcacgacgaggaguucugcgacaugcugcgccuguucgacuucaacaagcaggcgauccggcgccucaagaccgaggcccagaugagcauccagcugaucaacaaggccgugaacgcccugaucaacgaccagcucaucaugaagaaccaccuccgggacaucaugggcauccccuacugcaacuacuccaaguacugcuaccugaaccacacggugaccgggaagaccagccugccccgcugcugccuggucuccaacggcagcuaccugaacgagacccacuucuccgacgacaucgagcagcaggccgacaacaugaucacggagcuccugcagaaggaguacauggaccggcagggcaagaccccgcuggggcucguggaccuguucguguucagcaccuccuucuaccugaucagcaucuuccugcaccucguccgcaucccgacccaccggcacgugaucggcaagcccugccccaagccccaccgccugaaccacauggggaucugcuccugcggccuguacaagcacccgggggugcccgucaaguggaagcggugaggacuagucccuguucccagagcccacuuuuuuuucuuuuuuugaaauaaaauagccugucuuucagaucucaaaggcucuuuucagagccaccaaaaaaaaaaaaaaaaaaaaaaaaaaaaaaaaaaaaaaaaaaaaaaaaaaaaaaaaaaaaaaaaagaauu

SEQ ID NO: 38386 - RNA, 1714 nt, Artificial Sequence
  mRNA product Design a-1 (hSL-A64-N5) comprising derived and/or modified sequence from LASV(Lassa virus/H.sapiens-wt/NGA/2018/ISTH_0959;Clade II)__AVV65099__GPCmut11 (opt1)
aggagagucccgcagucggcguccagcggcucugcuuguucgugugugugucguugcaggccuuauucaagcuuaccaugggccagaucaucaccuucuuccaggaggugccccacgucaucgaggaggugaugaacaucgugcugaucgcccucagccugcuggccauccucaaggggaucuacaacgucgugaccugcggccuguucgggcugguguccuuccuccugcugugcggccgcagcugcuccacgaccuacaagggggucuacgagcuccagacccuggagcuggacauggcgagccucaacaugaccaugccgcuguccugcacgaagaacaacagccaccacuacaucauggugggcaacgagaccggccuggagcucacccugaccaacacguccaucaucaaccacaaguucugcaaccugagcgacgcccacaagaagaaccucuacgaccacgcccugauguccaucaucagcaccuuccaccuguccauccccaacuucaaccaguacgaggccaugagcugcgacuucaacgggggcaagaucuccgugcaguacaaccucagccacgccuacgcgaucgacgccgccaaccacugcgggaccaucgccaacggcguccugcagaccuucaugcggauggcguggggcggguccuacaucgcccuggacagcggcaagggguccugggacugcaucaugacgagcuaccaguaccucaucauccagaacaccaccugggaggaccacugccaguucucccgccccagccccaucggcuaccuggggcugcucagccagcggacccgcgacaucuacaucucccggcgccugcugggcacguucaccuggacccucagcgacuccgagggcaacgagacccccgggggcuacugccugacgcgguggaugcugaucgaggccgagcucaagugcuucgggaacaccgccguggccaagugcaacgagaagcacgacgaggaguucugcgacaugcugcgccuguucgacuucaacaagcaggcgauccggcgccucaagaccgaggcccagaugagcauccagcugaucaacaaggccgugaacgcccugaucaacgaccagcucaucaugaagaaccaccuccgggacaucaugggcaucccguacugcaacuacuccaaguacugcuaccugaaccacaccgucacggggaagaccagccugccccgcugcugccugguguccaacggcagcuaccugaacgagacccacuucuccgacgacaucgagcagcaggccgacaacaugaucaccgagcuccugcagaaggaguacaucgaccggcagggcaagacgccccuggggcucguggaccuguucgucuucagcaccuccuucuaccugaucagcaucuuccugcaccucgugaagaucccgacccaccgccacgugaucggcaagcccugccccaagccccaccggcugaaccacauggggaucugcuccugcggccuguacaagcacccggggguccccgugaaguggaagcgcugaggacuagucccuguucccagagcccacuuuuuuuucuuuuuuugaaauaaaauagccugucuuucagaucucaaaggcucuuuucagagccaccaaaaaaaaaaaaaaaaaaaaaaaaaaaaaaaaaaaaaaaaaaaaaaaaaaaaaaaaaaaaaaaaagaauu

SEQ ID NO: 38387 - RNA, 1714 nt, Artificial Sequence
  mRNA product Design a-1 (hSL-A64-N5) comprising derived and/or modified sequence from LASV(LASV003-NIG-2008;Clade II)__AIT17580__GPCmut11 (opt1)
aggagagucccgcagucggcguccagcggcucugcuuguucgugugugugucguugcaggccuuauucaagcuuaccaugggccagaucaucaccuucuuccaggaggugccccacgucaucgaggaggugaugaacaucgugcugaucgcccucagccugcuggccauccucaaggggaucuacaacgucgcgaccugcggccuguucgggcugguguccuuccuccugcugugcggccgcagcugcuccacgaccuacaaggggguguacgagcuccagacccuggagcuggacauggccagccucaacaugaccaugccgcuguccugcacgaagaacaacagccaccacuacaucauggucggcaacgagaccggccuggagcucacccugaccaacacguccaucaucaaccacaaguucugcaaccugagcgacgcccacaagaagaaccucuacgaccacgcccugauguccaucaucagcaccuuccaccuguccauccccaacuucaaccaguacgaggccaugagcugcgacuucaacgggggcaagaucuccgugcaguacaaccucagccacaccuacgcgguggacgccgccaaccacugcgggaccaucgccaacggcguccugcagacguucaugcggauggcguggggcggguccuacaucgcccuggacagcggcaagggguccugggacugcaucaugaccagcuaccaguaccucaucauccagaacaccaccugggaggaccacugccaguucucccgccccagccccaucggcuaccuggggcugcucagccagcggacgcgcgacaucuacaucucccggcgccugcugggcaccuucaccuggacccucagcgacuccgagagcaacgagacgccgggcggguacugccugacccgguggaugcugaucgaggccgagcucaagugcuucggcaacaccgccguggccaagugcaacgagaagcacgacgaggaguucugcgacaugcugcgccuguucgacuucaacaagcaggcgauccggcgccucaaggccgaggcccagauguccauccagcugaucaacaaggccgugaacgcccugaucaacgaccagcucaucaugaagaaccaccuccgggacaucauggggauccccuacugcaacuacagcaaguacugcuaccugaaccacaccgucacgggccgcaccucccugccccggugcugccuggugagcaacggguccuaccugaacgagacccacuucagcgacgacaucgagcagcaggcggacaacaugaucaccgagcuccugcagaaggaguacauggaccgccagggcaagacgccccugggccucguggaccuguucgucuucuccaccagcuucuaccugaucuccaucuuccugcaccucgugaagaucccgacccaccggcacgugaucgggaagcccugccccaagccccaccgccugaaccacaugggcaucugcagcugcgggcuguacaagcacccgggcguccccgugaaguggaagcggugaggacuagucccuguucccagagcccacuuuuuuuucuuuuuuugaaauaaaauagccugucuuucagaucucaaaggcucuuuucagagccaccaaaaaaaaaaaaaaaaaaaaaaaaaaaaaaaaaaaaaaaaaaaaaaaaaaaaaaaaaaaaaaaaagaauu

SEQ ID NO: 38388 - RNA, 1714 nt, Artificial Sequence
  mRNA product Design a-1 (hSL-A64-N5) comprising derived and/or modified sequence from LASV(LASV035-NIG-2009;Clade II)__AIT17588__GPCmut11 (opt1)
aggagagucccgcagucggcguccagcggcucugcuuguucgugugugugucguugcaggccuuauucaagcuuaccaugggccagaucaucaccuucuuccaggaggugccccacgucaucgaggaggugaugaacaucgugcugaucgcccucagccugcuggccauccucaaggggaucuacaacgucgcgaccugcggccuguucgggcugguguccuuccuccugcugugcggccgcagcugcuccacgaccuacaaggggguguacgagcuccagacccuggagcuggacauggccagccucaacaugaccaugccgcuguccugcacgaagaacaacagccaccacuacaucauggucggcaacgagaccggccuggagcucacccugaccaacacguccaucaucaaccacaaguucugcaaccugagcgacgcccacaagaagaaccucuacgaccacgcccugauguccaucaucagcaccuuccaccuguccauccccaacuucaaccaguacgaggccaugagcugcgacuucaacgggggcaagaucuccgugcaguacaaccucagccacgcguacgccguggacgccgccaaccacugcgggaccaucgcgaacggcguccugcagaccuucaugcggauggccuggggcggguccuacaucgcccuggacagcggcaagggguccugggacugcaucaugacgagcuaccaguaccucaucauccagaacaccaccugggaggaccacugccaguucucccgccccagccccaucggcuaccuggggcugcucagccagcggacccgcgacaucuacaucucccggcgccugcugggcacguucaccuggacccucagcgacuccgagggcaacgagacccccgggggcuacugccugacgcgguggaugcugaucgaggccgagcucaagugcuucgggaacaccgccguggcgaagugcaacgagaagcacgacgaggaguucugcgacaugcugcgccuguucgacuucaacaagcaggccauccggcgccucaaggccgaggcccagaugagcauccagcugaucaacaaggccgugaacgcgcugaucaacgaccagcucaucaugaagaaccaccuccgggacaucaugggcauccccuacugcaacuacuccaaguacugcuaccugaaccacaccgucaccgggaagacgagccugccccgcugcugccugguguccaacggcagcuaccugaacgagacccacuucuccgacgacaucgagcagcaggccgacaacaugaucaccgagcuccugcagaaggaguacaucgaccggcagggcaagaccccgcuggggcucguggaccuguucgucuucagcacguccuucuaccugaucagcaucuuccugcaccucgugaagaucccgacccaccgccacgugaucggcaagcccugccccaagccccaccggcugaaccacauggggaucugcuccugcggccuguacaagcacccggggguccccgugaaguggaagcgcugaggacuagucccuguucccagagcccacuuuuuuuucuuuuuuugaaauaaaauagccugucuuucagaucucaaaggcucuuuucagagccaccaaaaaaaaaaaaaaaaaaaaaaaaaaaaaaaaaaaaaaaaaaaaaaaaaaaaaaaaaaaaaaaaagaauu

SEQ ID NO: 38389 - RNA, 1714 nt, Artificial Sequence
  mRNA product Design a-1 (hSL-A64-N5) comprising derived and/or modified sequence from LASV(LASV1000-NIG-2009;Clade II)__AIT17782__GPCmut11 (opt1)
aggagagucccgcagucggcguccagcggcucugcuuguucgugugugugucguugcaggccuuauucaagcuuaccaugggccagaucaucaccuucuuccaggaggugccccacgucaucgaggaggugaugaacaucgugcugaucgcccucagccugcuggccauccucaaggggaucuacaacgucgcgaccugcggccuguucgggcugguguccuuccuccugcugugcggccgcagcugcuccacgaccuacaaggggguguacgagcuccagacccuggagcuggacauggccagccucaacaugaccaugccgcuguccugcacgaagaacaacagccaccacuacaucauggucggcaacgagaccggccuggagcucacccugaccaacacguccaucaucaaccacaaguucugcaaccugagcgacgcccacaagaagaaccucuacgaccacgcccugauguccaucaucagcaccuuccaccuguccauccccaacuucaaccaguacgaggccaugagcugcgacuucaacgggggcaagaucuccgugcaguacaaccucagccacaccuacgcgguggacgccgccaaccacugcgggaccaucgccaacggcguccugcagacguucaugcggauggcguggggcggguccuacaucgcccuggacagcggcaagggguccugggacugcaucaugaccagcuaccaguaccucaucauccagaacaccaccugggaggaccacugccaguucucccgccccagccccaucggcuaccuggggcugcucagccagcggacgcgcgacaucuacaucucccggcgccugcugggcaccuucaccuggacccucagcgacuccgagggcaacgagacgcccgggggcuacugccugacccgguggaugcugaucgaggccgagcucaagugcuucgggaacaccgccguggccaagugcaacgagaagcacgacgaggaguucugcgacaugcugcgccuguucgacuucaacaagcaggcgaucaagcggcucaagaccgaggcccagaugagcauccagcugaucaacaaggccgugaacgcccugaucaacgaccagcucaucaugaagaaccaccuccgcgacaucaugggcauccccuacugcaacuacuccaaguacugcuaccugaaccacacggucaccgggaagaccagccugccccggugcugccugguguccaacggcagcuaccugaacgagacccacuucuccgacgacaucgagcagcaggccgacaacaugaucacggagcuccugcagaaggaguacaucgaccgccagggcaagaccccgcuggggcucguggaccuguucgucuucagcaccuccuucuaccugaucagcaucuuccugcaccucgugaagaucccgacccaccggcacguggucggcaagcccugccccaagccccaccgccugaaccacauggggaucugcuccugcggccuguacaagcacccgggggugcccgugaaguggaagcggugaggacuagucccuguucccagagcccacuuuuuuuucuuuuuuugaaauaaaauagccugucuuucagaucucaaaggcucuuuucagagccaccaaaaaaaaaaaaaaaaaaaaaaaaaaaaaaaaaaaaaaaaaaaaaaaaaaaaaaaaaaaaaaaaagaauu

SEQ ID NO: 38390 - RNA, 1714 nt, Artificial Sequence
  mRNA product Design a-1 (hSL-A64-N5) comprising derived and/or modified sequence from LASV(LASV221-NIG-2010;Clade II)__AIT17624__GPCmut11 (opt1)
aggagagucccgcagucggcguccagcggcucugcuuguucgugugugugucguugcaggccuuauucaagcuuaccaugggccagaucaucaccuucuuccaggaggugccccacgucaucgaggaggugaugaacaucgugcugaucgcccucagccugcuggccauccucaaggggaucuacaacgucgcgaccugcggccuguucgggcugguguccuuccuccugcugugcggccgcagcugcuccacgaccuacaaggggguguacgagcuccagacccuggagcuggacauggccagccucaacaugaccaugccgcuguccugcacgaagaacaacagccaccacuacaucauggucggcaacgagaccggccuggagcucacccugaccaacacguccaucaucaaccacaaguucugcaaccugagcgacgcccacaagaagaaccucuacgaccacgcccugauguccaucaucagcaccuuccaccuguccauccccaacuucaaccaguacgaggccaugagcugcgacuucaacgggggcaagaucuccgugcaguacaaccucagccacaccuacgcgaucgacgccgccaaccacugcgggaccaucgccaacggcgugcugcagacguucaugcggauggcguggggcggguccuacaucgcccuggacagcggcaagggguccugggacugcaucaugaccagcuaccaguaccucaucauccagaacaccaccugggaggaccacugccaguucucccgccccagccccaucggcuaccuggggcugcucagccagcggacgcgcgacaucuacaucucccggcgccugcugggcaccuucaccuggacccucagcgacuccgagggcaacgagacgcccgggggcuacugccugacccgguggaugcugaucgaggccgagcucaagugcuucgggaacaccgccgucgccaagugcaacgagaagcacgacgaggaguucugcgacaugcugcgccuguucgacuucaacaagcaggcgauccggcgccucaagaccgaggcccagaugagcauccagcugaucaacaaggccgugaacgcccugaucaacgaccagcucaucaugaagaaccaccuccgggacaucaugggcauccccuacugcaacuacuccaaguacugcuaccugaaccacacggugaccgggaagaccagccugccccgcugcugccuggucuccaacggcagcuaccugaacgagacccacuucuccgacgacaucgagcagcaggccgacaacaugaucacggagaugcuccagaaggaguacauggaccggcagggcaagaccccgcuggggcugguggaccucuucguguucagcaccuccuucuaccugaucagcaucuuccugcaccuggucaagaucccgacccaccgccacgugaucggcaagcccugccccaagccccaccggcucaaccacauggggaucugcuccugcggccuguacaagcacccgggggugcccgucaaguggaagcgcugaggacuagucccuguucccagagcccacuuuuuuuucuuuuuuugaaauaaaauagccugucuuucagaucucaaaggcucuuuucagagccaccaaaaaaaaaaaaaaaaaaaaaaaaaaaaaaaaaaaaaaaaaaaaaaaaaaaaaaaaaaaaaaaaagaauu

SEQ ID NO: 38391 - RNA, 1714 nt, Artificial Sequence
  mRNA product Design a-1 (hSL-A64-N5) comprising derived and/or modified sequence from LASV(LASV237-NIG-2010;Clade II)__AIT17638__GPCmut11 (opt1)
aggagagucccgcagucggcguccagcggcucugcuuguucgugugugugucguugcaggccuuauucaagcuuaccaugggccagaucaucaccuucuuccaggaggugccccacgucaucgaggaggugaugaacaucgugcugaucgcccucagccugcuggccauccucaaggggaucuacaacgucgcgaccugcggccuguucgggcugguguccuuccuccugcugugcggccgcagcugcuccacgaccuacaaggggguguacgagcuccagacccuggagcuggacauggccagccucaacaugaccaugccgcuguccugcacgaagaacaacagccaccacuacaucauggucggcaacgagaccggccuggagcucacccugaccaacacguccaucaucaaccacaaguucugcaaccugagcgacgcccacaagaaggaccucuacgaccacgcccugauguccaucaucagcaccuuccaccuguccauccccaacuucaaccaguacgaggccaugagcugcgacuucaacgggggcaagaucuccgugcaguacaaccucagccacaccuacgcgguggacgccgccaaccacugcgggaccaucgccaacggcguccugcagacguucaugcggauggcguggggcggguccuacaucgcccuggacagcggcaagggguccugggacugcaucaugaccagcuaccaguaccucaucauccagaacaccaccugggaggaccacugccaguucucccgccccagccccaucggcuaccuggggcugcucagccagcggacgcgcgacaucuacaucucccggcgccugcugggcaccuucaccuggacccucagcgacuccgagggcaacgagacgcccgggggcuacugccugacccgguggaugcugaucgaggccgagcucaagugcuucgggaacaccgccguggccaagugcaacgagaagcacgacgaggaguucugcgacaugcugcgccuguucgacuucaacaagcaggcgauccggcgccucaagaccgaggcccagaugagcauccagcugaucaacaaggccgugaacgcccugaucaacgaccagcucaucaugaagaaccaccuccgggacaucaugggcauccccuacugcaacuacuccaaguacugcuaccugaaccacacggucaccgggaagaccagccugccccgcugcugccugguguccaacggcagcuaccugaacgagacccacuucuccgacgacaucgagcagcaggccgacaacaugaucacggagcuccugcagaaggaguacauggaccggcagggcaagaccccgcuggggcucguggaccuguucgucuucagcaccuccuucuaccugaucagcaucuuccugcaccucaucaagaucccgacccaccgccacaucacgggcaagcccugccccaagccccaccggcugaaccacauggggaucugcuccugcggccuguacaagcacccgggggugcccgugaaguggaagcgcugaggacuagucccuguucccagagcccacuuuuuuuucuuuuuuugaaauaaaauagccugucuuucagaucucaaaggcucuuuucagagccaccaaaaaaaaaaaaaaaaaaaaaaaaaaaaaaaaaaaaaaaaaaaaaaaaaaaaaaaaaaaaaaaaagaauu

SEQ ID NO: 38392 - RNA, 1714 nt, Artificial Sequence
  mRNA product Design a-1 (hSL-A64-N5) comprising derived and/or modified sequence from LASV(LASV253-NIG-2011;Clade II)__AIT17670__GPCmut11 (opt1)
aggagagucccgcagucggcguccagcggcucugcuuguucgugugugugucguugcaggccuuauucaagcuuaccaugggccagaucaucaccuucuuccaggaggugccccacgucaucgaggaggugaugaacaucgugcugaucgcccucagccugcuggccauccucaaggggaucuacaacgucgcgaccugcggccuguucgggcugguguccuuccuccugcugugcggccgcagcugcuccacgaccuacaaggggguguacgagcuccagacccuggagcuggacauggccagccucaacaugaccaugccgcuguccugcacgaagaacaacagccaccacuacaucauggucggcaacgagaccggccuggagcucacccugaccaacacguccaucaucaaccacaaguucugcaaccugagcgacgcccacaagaagaaccucuacgaccacgcccugauguccaucaucagcaccuuccaccuguccauccccaacuucaaccaguacgaggccaugagcugcgacuucaacgggggcaagaucuccgugcaguacaaccucagccacaccuacgcgguggacgccgccaaccacugcgggaccaucgccaacggcguccugcagacguucaugcggauggcguggggcggguccuacaucgcccuggacagcggcaagggguccugggacugcaucaugaccagcuaccaguaccucaucauccagaacaccaccugggaggaccacugccaguucucccgccccagccccaucggcuaccuggggcugcucagccagcggacgcgcgacaucuacaucucccggcgccugcugggcaccuucaccuggacccucagcgacuccgagggcaacgagacgcccgggggcuacugccugacccgguggaugcugaucgaggccgagcucaagugcuucgggaacaccgccguggccaagugcaacgagaagcacgacgaggaguucugcgacaugcugcgccuguucgacuucaacaagcaggcgauccggcgccucaaggccgaggcccagaugagcauccagcugaucaacaaggccgugaacgcccugaucaacgaccagcucaucaugaagaaccaccuccgggacaucaugggcaucccguacugcaacuacuccaaguacugcuaccugaaccacaccgucacggggcgcaccagccugccccggugcugccugguguccaacggcagcuaccugaacgagacccacuucuccgacgacaucgagcagcaggcggacaacaugaucaccgagcuccugcagaaggaguacaucgaccgccagggcaagacgccccuggggcucguggaccuguucgucuucagcaccuccuucuaccugaucagcaucuuccugcaccucgugaagaucccgacccaccggcacaucaucggcaagcccugccccaagccccaccgccugaaccacauggggaucugcuccugcggccuguacaagcacccgggggugcccgucaaguggaagcggugaggacuagucccuguucccagagcccacuuuuuuuucuuuuuuugaaauaaaauagccugucuuucagaucucaaaggcucuuuucagagccaccaaaaaaaaaaaaaaaaaaaaaaaaaaaaaaaaaaaaaaaaaaaaaaaaaaaaaaaaaaaaaaaaagaauu

SEQ ID NO: 38393 - RNA, 1714 nt, Artificial Sequence
  mRNA product Design a-1 (hSL-A64-N5) comprising derived and/or modified sequence from LASV(LASV254-NIG-2011;Clade II)__AIT17674__GPCmut11 (opt1)
aggagagucccgcagucggcguccagcggcucugcuuguucgugugugugucguugcaggccuuauucaagcuuaccaugggccagaucaucaccuucuuccaggaggugccccacgucaucgaggaggugaugaacaucgugcugaucgcccucagccugcuggccauccucaaggggaucuacaacgucgcgaccugcggccuguucgggcugguguccuuccuccugcugugcggccgcagcugcuccacgaccuacaaggggguguacgagcuccagacccuggagcuggacaugaccaaccucaacaugacgaugccgcugagcugcaccaagaacaacucccaccacuacaucauggucggcaacgagaccggccuggagcucacccugacgaacaccagcaucaucaaccacaaguucugcaaccuguccgacgcccacaagaagaaccucuacaaccacgcccugaugagcaucaucuccaccuuccaccugagcauccccaacuucaaccaguacgaggccauguccugcgacuucaacgggggcaagaucagcgugcaguacaaccucucccacagcuacgccguggacgcggccaaccacugcgggaccaucgccaacggcguccugcagacguucaugcggauggccuggggcggguccuacaucgcgcuggacagcggcaaggggaacugggacugcaucaugaccuccuaccaguaccucaucauccagaacaccaccugggaggaccacugccaguucagccgccccucccccaucggcuaccuggggcugcucagccagcggacgcgcgacaucuacaucagccggcgccugcugggcaccuucaccuggacccucuccgacagcgagggcaacgagacgcccgggggcuacugccugacccgguggaugcugaucgaggccgagcucaagugcuucgggaacaccgccguggccaagugcaacgagaagcacgacgaggaguucugcgacaugcugcgccuguucgacuucaacaagcaggccauccggcgccucaagaccgaggcgcaggccaacauccagcugaucaacaaggccgugaacgcccugaucaacgaccagcucaucaugaagaaccaccuccgggacaucaugggcauccccuacugcaacuacuccaaguacugcuaccugaaccacacggucaccgggaagaccagccugccccgcugcugccugguguccaacggcagcuaccugaacgagacccacuucuccgacgacaucgagcagcaggccgacaacaugaucacggagcuccugcagaaggaguacauggaccggcagggcaagaccccgcuggggcucguggaccuguucgucuucagcaccuccuucuaccugaucagcaucuuccugcaccucgugaagaucccgacccaccgccacgugaucggcaagcccugccccaagccccaccggcugaaccacauggggaucugcuccugcggccuguacaagcacccggggguccccgugaaguggaagcgcugaggacuagucccuguucccagagcccacuuuuuuuucuuuuuuugaaauaaaauagccugucuuucagaucucaaaggcucuuuucagagccaccaaaaaaaaaaaaaaaaaaaaaaaaaaaaaaaaaaaaaaaaaaaaaaaaaaaaaaaaaaaaaaaaagaauu

SEQ ID NO: 38394 - RNA, 1714 nt, Artificial Sequence
  mRNA product Design a-1 (hSL-A64-N5) comprising derived and/or modified sequence from LASV(Nig08-A19;Clade III)__ADU56618__GPCmut11 (opt1)
aggagagucccgcagucggcguccagcggcucugcuuguucgugugugugucguugcaggccuuauucaagcuuaccaugggccagaucgugaccuucuuccaggaggucccccacgugaucgaggaggugaugaacaucguccugaucgcccucagcauccuggccauccugaaggggcucuacaacaucgcgaccugcggccugaucgggcuggugacguuccuccugcuguccggccgcagcugcuccaugaccuacaaggggguguacgagcuccagacccuggagcugaacaugaacacccucaacaugacgaugccgcugagcugcaccaagaacaacucccaccacuacaucauggucggcaacgagaccggccuggagcucacccugacgaacaccagccugcuccaccacaaguucugcaaccuguccgacgcccacaagaagaaccuguacgaccacacccucaugagcaucaucuccaccuuccaccugagcauccccaacuucaaccaguacgaggccauguccugcgacuucaacgggggcaagaucacggugcaguacaaccugagccacuccuacgccaucgacgccgcgaaccacugcgggaccguggccaacggcguccuccagaccuucaugcggauggccuggggcgggagcuacaucgcccuggacuccggccgcgggaagugggacugcaucaugaccagcuaccaguaccugaucauccagaacacgaccugggaggaccacugccaguucucccggcccagccccaucggcuaccucgggcugcugucccagcgcacccgggacaucuacaucagccgccggcuccugggcaccuucacguggacccugagcgacuccgagggcaacgagacccccgggggcuacugccucacccgcuggaugcugaucgaggcggagcugaagugcuucgggaacacggccguggccaagugcaacgagaagcacgacgaggaguucugcgacaugcuccggcuguucgacuucaacaagcaggccauccgccggcugaaggccgaggcgcagaugagcauccagcucaucaacaaggccgugaacgcccugaucaacgaccagcugaucaugaagaaccaccuccgcgacaucaugggcauccccuacugcaacuacuccaaguacugcuaccugaaccacaccagcaccgggcggaccucccugccccgcugcugccucgucagcaacggcuccuaccugaacgagacgcacuucagcgacgacaucgagcagcaggccgacaacaugaucaccgagaugcugcagaaggaguaccucgaccggcagggcaagaccccgcuggggcugguggaccuguucguguucuccaccagcuucuaccucaucuccaucuuccugcaccuggucaagaucccgacgcaccgccacaucgugggcaagcccugccccaagccccaccggcucaaccacauggggaucugcagcugcggccuguacaagcagccgggggugcccguccgcuggaagcggugaggacuagucccuguucccagagcccacuuuuuuuucuuuuuuugaaauaaaauagccugucuuucagaucucaaaggcucuuuucagagccaccaaaaaaaaaaaaaaaaaaaaaaaaaaaaaaaaaaaaaaaaaaaaaaaaaaaaaaaaaaaaaaaaagaauu

SEQ ID NO: 38395 - RNA, 1717 nt, Artificial Sequence
  mRNA product Design a-1 (hSL-A64-N5) comprising derived and/or modified sequence from LASV(G1180-SLE-2010;Clade IV)__AIT17168__GPCmut11 (opt1)
aggagagucccgcagucggcguccagcggcucugcuuguucgugugugugucguugcaggccuuauucaagcuuaccaugggccagaucgugaccuucuuccaggaggucccccacgugaucgaggaggugaugaacaucguccugaucgcccucagcauccuggccgugcugaaggggcucuacaacuucgcgaccugcggccugguggggcugcucaccuuccugcugcucugcggccgcuccugcaccgccagccgguacaagggggucuacgagcugcagacccuggagcucaacauggagacccugaacaugacgaugccgcuguccugcaccaagaacaacagccaccacuacaucauggugggcaacgagaccggccucgagcugacccugacgaacaccuccaucaucaaccacaaguucugcaaccucagcgacgcccacaagaagaaccuguacgaccacgcccugauguccaucaucagcaccuuccaccucuccauccccaacuucaaccaguacgaggccaugagcugcgacuucaacgggggcaagaucuccgugcaguacaaccugagccacuccuacgcgggggacgccgccaaccacugcggcaccgucgccaacggggugcugcagacguucaugcgcauggcguggggcggcagcuacaucgcccucgacuccgggcacggcagcugggacugcaucaugaccuccuaccaguaccugaucauccagaacaccaccugggaggaccacugccaguucagccggcccucccccaucggguaccugggccuccugagccagcgcacgcgggacaucuacaucagccgccggcugcucggcaccuucaccuggacccuguccgacagcgaggggaaggacacgccgggcggguacugccugacccgcuggaugcucaucgaggccgagcugaagugcuucggcaacaccgccguggccaagugcaacgagaagcacgacgaggaguucugcgacaugcugcggcuguucgacuucaacaagcaggcgauccagcgccugaaggccgaggcccagauguccauccagcugaucaacaaggccgucaacgcccucaucaacgaccagcugaucaugaagaaccaccuccgggacaucauggggauccccuacugcaacuacagcaaguacugcuaccucaaccacaccacgaccggcaagaccucccugcccaagugcugccuggugagcaacggcuccuaccucaacgagacccacuucagcgacgacaucgagcagcaggcggacaacaugaucacggagaugcugcagaaggaguacauggagcgccaggggaagacgccccugggccucguggaccuguucgucuucuccaccagcuucuaccugaucuccaucuuccugcaccucgugaagaucccgacccaccggcacaucgugggcaagagcugccccaagccccaccgccugaaccacauggggaucugcuccugcgggcuguacaagcagcccggcgucccggugaaguggaagcggugaggacuagucccuguucccagagcccacuuuuuuuucuuuuuuugaaauaaaauagccugucuuucagaucucaaaggcucuuuucagagccaccaaaaaaaaaaaaaaaaaaaaaaaaaaaaaaaaaaaaaaaaaaaaaaaaaaaaaaaaaaaaaaaaagaauu

SEQ ID NO: 38396 - RNA, 1717 nt, Artificial Sequence
  mRNA product Design a-1 (hSL-A64-N5) comprising derived and/or modified sequence from LASV(G1442-SLE-2011;Clade IV)__AIT17180__GPCmut11 (opt1)
aggagagucccgcagucggcguccagcggcucugcuuguucgugugugugucguugcaggccuuauucaagcuuaccaugggccagaucgugaccuucuuccaggaggucccccacgugaucgaggaggugaugaacaucguccugaucgcccucagcauccuggccgugcugaaggggcucuacaacguggcgaccugcggccugaucgggcuggucacguuccuccugcugugcggccgcuccugcaccaccacccucuacaaggggguguacgagcugcagacgcuggagcucaacauggagacccugaacaugaccaugccgcugagcugcaccaagaacaacucccaccacuacauccgggugggcaacgagacgggccucgagcugacccugaccaacaccagcaucaucaaccacaaguucugcaaccucuccgacgcccacaagaagaaccuguacgaccacgcccugaugagcaucaucuccacguuccaccucagcauccccaacuucaaccaguacgaggccauguccugcgacuucaacgggggcaagaucagcguccaguacaaccugucccacagcuacgccggggacgcggccaaccacugcggcaccguggccaacggggugcugcagaccuucaugcgcauggccuggggcggcuccuacaucgcgcucgacagcgggcggggcaacugggacugcaucaugaccuccuaccaguaccugaucauccagaacacgaccugggacgaccacugccaguucagccgccccucccccaucggguaccugggccuccugagccagcggacccgcgacgucuacaucucccggcgccugcucggcaccuucacguggacccugagcgacagcgaggggaaggacaccccgggcggguacugccugacccgguggaugcucaucgaggccgagcugaagugcuucggcaacacggccguggccaagugcaacgagaagcacgacgaggaguucugcgacaugcugcgccucuucgacuucaacaagcaggccauccagcggcugaaggcggaggcccagauguccauccagcugaucaacaaggccgugaacgcccucaucaacgaccagcugaucaugaagaaccaccuccgcgacaucauggggauccccuacugcaacuacagcaaguacugcuaccugaacaacaccgccaccggcaagaccucccugcccaagugcugccugaucagcaacggcuccuaccucaacgagacgcacuucagcgacgacaucgagcaggaggcggacaacaugaucaccgagaugcugcagaaggaguacauggagcggcaggggaagacgccccugggccucgucgaccuguucguguucuccaccagcuucuaccugaucuccaucuuccugcaccucgugaagaucccgacccaccgccacaucgucggcaagagcugccccaagccccaccggcugaaccacauggggaucugcuccugcgggcuguacaagcagcccggcgugccggugcgcuggaagcggugaggacuagucccuguucccagagcccacuuuuuuuucuuuuuuugaaauaaaauagccugucuuucagaucucaaaggcucuuuucagagccaccaaaaaaaaaaaaaaaaaaaaaaaaaaaaaaaaaaaaaaaaaaaaaaaaaaaaaaaaaaaaaaaaagaauu

SEQ ID NO: 38397 - RNA, 1717 nt, Artificial Sequence
  mRNA product Design a-1 (hSL-A64-N5) comprising derived and/or modified sequence from LASV(G3010-SLE-2013;Clade IV)__AIT17344__GPCmut11 (opt1)
aggagagucccgcagucggcguccagcggcucugcuuguucgugugugugucguugcaggccuuauucaagcuuaccaugggccagaucgugaccuucuuccaggaggucccccacgugaucgaggaggugaugaacaucguccugaucgcccucagcauccuggccgugcugaaggggcucuacaacuucgcgaccugcggccugguggggcuggucacguuccuccugcugugcggccgcuccugcaccaccagccucuacaaggggguguacgagcugcagacccuggagcucaacauggagacgcugaacaugaccaugccgcuguccugcaccaagaacaacagccaccacuacaucauggugggcaacgagaccggccucgagcugacgcugaccaacaccuccaucaucaaccacaaguucugcaaccucagcgacgcccacaagaagaaccuguacaaccacgcccugauguccaucaucagcaccuuccaccucuccauccccaacuucaaccaguacgaggccaugagcugcgacuucaacgggggcaagaucuccguccaguacaaccugagccacuccuacgccggggacgcggccagccacugcggcacgguggccaacggggugcugcagaccuucaugcggauggccuggggcggcuccuacaucgcgcucgacagcggguacggcaagugggacugcaucaugaccuccuaccaguaccugaucauccagaacaccacgugggaggaccacugccaguucagccgccccucccccaucggguaccugggccuccugagccagcggacccgcgacaucuacaucagccggcgccugcucggcaccuucaccuggacgcuguccgacagcgaggggaaggacaccccgggcggguacugccugacccgguggaugcucaucgaggccgagcugaagugcuucggcaacaccgccgucgccaagugcaacgagaagcacgacgaggaguucugcgacaugcugcgccucuucgacuucaacaagcaggccauccagcggcugaagacggaggcgcagauguccauccagcugaucaacaaggccgugaacgcccucaucaacgaccagcugaucaugaagaaccaccuccgcgacaucauggggauccccuacugcaacuacagcaaguacugcuaccugaaccacaccaccaccggcaagacgucccugcccaagugcugccuggugagcaacggcuccuaccucaacgagacccacuucagcgacgacaucgagcagcaggccgacaacaugaucaccgagaugcugcagaaggaguacauggagcggcaggggaagacgccccugggccucgucgaccuguucguguucuccaccagcuucuaccugaucuccaucuuccugcaccucgugaagaucccgacccaccgccacaucgucggcaagagcugccccaagccccaccggcugaaccacauggggaucugcuccugcgggcuguacaagcagcccggcgugccggugcgcuggaagcggugaggacuagucccuguucccagagcccacuuuuuuuucuuuuuuugaaauaaaauagccugucuuucagaucucaaaggcucuuuucagagccaccaaaaaaaaaaaaaaaaaaaaaaaaaaaaaaaaaaaaaaaaaaaaaaaaaaaaaaaaaaaaaaaaagaauu

SEQ ID NO: 38398 - RNA, 1717 nt, Artificial Sequence
  mRNA product Design a-1 (hSL-A64-N5) comprising derived and/or modified sequence from LASV(G502-SLE-2009;Clade IV)__AIT17126__GPCmut11 (opt1)
aggagagucccgcagucggcguccagcggcucugcuuguucgugugugugucguugcaggccuuauucaagcuuaccaugggccagaucgugaccuucuuccaggaggucccccacgugaucgaggaggugaugaacaucguccugaucgcccucagcauccuggccgugcugaaggggcucuacaacuucgcgaccugcggccugguggggcugcucacguuccugcugcucugcggccgcuccugcaccaccgggcuguacaagggcgucuacgagcugcagacccucgagcugaacauggagacgcugaacaugaccaugccgcucagcugcaccaagaacaacucccaccacuacaucauggugggcaacgagaccgggcuggagcugacgcucaccaacaccagcaucaucaaccacaaguucugcaaccuguccgacgcccacaagaagaaccuguacgaccacgcccucaugagcaucaucuccaccuuccaccugagcauccccaacuucaaccaguacgaggccauguccugcgacuucaacggcgggaagaucagcgugcaguacaaccugucccacagcuacgccggcgacgcggccgaccacugcgggacggucgccaacggcgugcuccagaccuucaugcggauggccuggggcggguccuacaucgcgcuggacagcggccgcgggcggugggacugcaucaugaccuccuaccaguaccugaucauccagaacaccacgugggaggaccacugccaguucagccgccccucccccaucggcuaccucggccugcugagccagcggacccgcgacaucuacaucucccggcgccuccuggggaccuucaccuggacgcugagcgacagcgagggcaaggacacccccgggggcuacugccucacccgguggaugcugaucgaggccgagcugaagugcuucgggaacaccgccguggccaagugcaacgagaagcacgacgaggaguucugcgacaugcuccgccuguucgacuucaacaagcaggccauccagcggcugaaggcggaggcccagauguccauccagcucaucaacaaggccgucaacgcccugaucaacgaccagcuggugaugaagaaccaccuccgcgacaucaugggcauccccuacugcaacuacagccgguacugcuaccugaaccacacgaccaccggccgcaccucccugcccaagugcugccucgugagcaacggguccuaccugaacgagacgcacuucagcgacgacaucgagcagcaggccgacaacaugaucaccgagaugcugcagaaggaguacauggagcggcagggcaagaccccgcucgggcuggucgaccuguucguguucuccaccagcuucuaccugaucuccaucuuccuccaccuggugaagaucccgacgcaccgccacaucgucggcaagagcugccccaagccccaccggcugaaccacauggggaucugcuccugcggccucuacaagcagcccggcgugccggugaaguggaagcgcugaggacuagucccuguucccagagcccacuuuuuuuucuuuuuuugaaauaaaauagccugucuuucagaucucaaaggcucuuuucagagccaccaaaaaaaaaaaaaaaaaaaaaaaaaaaaaaaaaaaaaaaaaaaaaaaaaaaaaaaaaaaaaaaaagaauu

SEQ ID NO: 38399 - RNA, 1717 nt, Artificial Sequence
  mRNA product Design a-1 (hSL-A64-N5) comprising derived and/or modified sequence from LASV(G733-SLE-2010;Clade IV)__AIT17154__GPCmut11 (opt1)
aggagagucccgcagucggcguccagcggcucugcuuguucgugugugugucguugcaggccuuauucaagcuuaccaugggccagaucgugaccuucuuccaggaggucccccacgugaucgaggaggugaugaacaucguccugaucgcccucagcauccuggccgugcugaaggggcucuacaacuucgcgaccugcggcaucguggggcuggucuccuuccugcuccugugcggccgcagcugcacgaccucccuguacaaggggguguacgagcuccagacccuggagcugaacauggagacccucaacaugacgaugccgcugagcugcaccaagaacaacucccaccacuacaucauggugggcaacgagaccggccuggagcucacccugacgaacaccagcaucaucaaccacaaguucugcaaccuguccgacgcccacaagaagaaccucuacgaccacgcccugaugagcaucaucuccaccuuccaccugagcauccccaacuucaaccaguacgaggccauguccugcgacuucaacgggggcaagaucagcguccaguacaaccucucccacagcuacgccggggacgcggccaaccacugcggcaccaucgccaacggggugcugcagacguucaugcggauggccuggggcggcuccuacaucgcgcuggacagcgggcgcgaccggugggacugcaucaugaccuccuaccaguaccucaucauccagaacaccaccugggaggaccacugccaguucagccgccccucccccaucggcuaccuggggcugcucagccagcggacgcgcgacaucuacaucagccggcgccugcugggcaccuucaccuggacccucuccgacagcgagggcaaggacacgcccgggggcuacugccugacccgguggaugcugaucgaggccgagcucaagugcuucgggaacaccgccguggccaagugcaacgagaagcacgacgaggaguucugcgacaugcugcgccuguucgacuucaacaagcaggccauccagcggcucaaggcggaggcccagauguccauccagcugaucaacaaggccgucaacgcccugaucaacgaccagcucaucaugaagaaccaccuccgcgacaucaugggcauccccuacugcaacuacagcaaguacugcuaccugaaccacaccacgaccgggaagaccucccugcccaagugcugccuggugagcaacggcuccuaccugaacgagacccacuucagcgacgacaucgagcagcaggccgacaacaugaucacggagaugcuccagaaggaguacauggagcggcagggcaagaccccgcuggggcugguggaccucuucgucuucuccaccagcuucuaccugaucuccaucuuccugcaccuggugaagaucccgacccaccgccacguggucggcaagagcugccccaagccccaccggcucaaccacauggggaucugcuccugcggccuguacgggcagcccggcgugccggugaaguggaagcgcugaggacuagucccuguucccagagcccacuuuuuuuucuuuuuuugaaauaaaauagccugucuuucagaucucaaaggcucuuuucagagccaccaaaaaaaaaaaaaaaaaaaaaaaaaaaaaaaaaaaaaaaaaaaaaaaaaaaaaaaaaaaaaaaaagaauu

SEQ ID NO: 38400 - RNA, 1717 nt, Artificial Sequence
  mRNA product Design a-1 (hSL-A64-N5) comprising derived and/or modified sequence from MOPV/LASV reassortant(IGS-1;Clade IV)__AFY05576__GPCmut11 (opt1)
aggagagucccgcagucggcguccagcggcucugcuuguucgugugugugucguugcaggccuuauucaagcuuaccaugggccagaucgugaccuucuuccaggaggucccccacgugaucgaggaggugaugaacaucguccugaucgcccucagcgugcuggccgugcugaaggggcucuacaacuucgcgaccugcggccuggucgggcuggugacguuccuccugcugugcggccgcuccugcaccaccagccucuacaaggggguguacgagcugcagacccuggagcucaacauggagacgcugaacaugaccaugccgcuguccugcaccaagaacaacagccaccacuacaucauggucggcaacgagaccggccucgagcugacgcugaccaacaccuccaucaucaaccacaaguucugcaaccucagcgacgcccacaagaagaaccuguacgaccacgcccugauguccaucaucagcaccuuccaccucuccauccccaacuucaaccaguacgaggccaugagcugcgacuucaacgggggcaagaucuccgugcaguacaaccugagccacuccuacgccggggacgcggccaaccacugcggcacgguggccaacgggguccugcagaccuucaugcggauggccuggggcggcagcuacaucgcgcucgacuccgggcgcggcaacugggacugcaucaugaccagcuaccaguaccugaucauccagaacaccacgugggaggaccacugccaguucucccggcccagccccaucggguaccugggccuccugucccagcgcacccgggacaucuacaucagccgccggcugcucggcaccuucaccuggacgcugagcgacuccgagggggaggacaccccgggcggguacugccugacccgcuggaugcucaucgaggccgagcugaagugcuucggcaacaccgccguggccaagugcaacgagaagcacgacgaggaguucugcgacaugcugcggcuguucgacuucaacaagcaggccauccagcgccugaaggcggaggcccagaugagcauccagcugaucaacaaggccgugaacgcccucaucaacgaccagcugaucaugaagaaccaccuccgggacaucauggggauccccuacugcaacuacuccaaguacugcuaccucaaccacacgaccaccggccgcaccagccugcccaagugcugccuggucuccaacggcagcuaccucaacgagacgcacuucuccgacgacaucgagcagcaggccgacaacaugaucaccgagaugcugcagaaggaguacauggagcggcaggggaagacgccccugggccucguggaccuguucguguucagcaccuccuucuaccugaucagcaucuuccugcaccucgucaagaucccgacccaccgccacaucguggggaaguccugccccaagccccaccggcugaaccacaugggcaucugcagcugcgggcuguacaagcagcccggcgugccggucaaguggaagcgcugaggacuagucccuguucccagagcccacuuuuuuuucuuuuuuugaaauaaaauagccugucuuucagaucucaaaggcucuuuucagagccaccaaaaaaaaaaaaaaaaaaaaaaaaaaaaaaaaaaaaaaaaaaaaaaaaaaaaaaaaaaaaaaaaagaauu

SEQ ID NO: 38401 - RNA, 1717 nt, Artificial Sequence
  mRNA product Design a-1 (hSL-A64-N5) comprising derived and/or modified sequence from LASV(LM765-SLE-2012;Clade IV)__AIT17814__GPCmut11 (opt1)
aggagagucccgcagucggcguccagcggcucugcuuguucgugugugugucguugcaggccuuauucaagcuuaccaugggccagaucgugaccuucuuccaggaggucccccacgugaucgaggaggugaugaacaucguccugaucgcccucagcauccuggccgugcugaaggggcucuacaacuucgcgaccugcggccugguggggcuggucacguuccuccugcugugcggccgcuccugcaccaccagccucuacaaggggguguacgagcugcagacccuggagcucaacauggagacgcugaacaugaccaugccgcuguccugcaccaagaacaacagccaccacuacaucauggugggcaacgagaccggccucgagcugacgcugaccaacaccuccaucaucgaccacaaguucugcaaccucagcgacgcccaccggaagaaccuguacgaccacgcccugauguccaucaucagcaccuuccaccucuccauccccaacuucaaccaguacgaggccaugagcugcgacuucaacgggggcaagaucuccguccaguacaaccugagccacuccuacgccaaggacgcggccgaccacugcgggacgguggccaacggcgugcugcagaccuucaugcgcauggccuggggcgggagcuacaucgcgcucgacuccggccgggggcgcugggacugcaucaugaccagcuaccaguaccugaucauccagaacaccacgugggaggaccacugccaguucucccggcccagccccaucggcuaccuggggcuccugucccagcgcacccgggacaucuacaucagccgccggcugcucggcaccuucaccuggacgcugagcgacuccgagggcaaggacacccccgggggcuacugccugacccgcuggaugcucaucgaggccgagcugaagugcuucgggaacaccgccgucgccaagugcaacgagaagcacgacgaggaguucugcgacaugcugcggcuguucgacuucaacaagcaggccauccagcgccugaaggcggaggcccagaugagcauccagcugaucaacaaggccgugaacgcccucaucaacgaccagcugaucaugaagaaccaccuccgggacaucaugggcauccccuacugcaacuacuccaaguacugcuaccucaaccacacgaccaccgggaagaccagccugcccaagugcugccugguguccaacggcagcuaccucaacgagacgcacuucuccgacgacaucgagcagcaggccgacaacaugaucaccgagaugcugcagaaggaguacauggagcgccagggcaagaccccgcuggggcucgucgaccuguucguguucagcaccuccuucuaccugaucagcaucuuccugcaccucgugaagaucccgacgcaccggcacaucgucggcaagcccugccccaagccccaccgccugaaccacauggggaucugcuccugcggccuguacaagcagccgggggugcccgugaaguggaagcggugaggacuagucccuguucccagagcccacuuuuuuuucuuuuuuugaaauaaaauagccugucuuucagaucucaaaggcucuuuucagagccaccaaaaaaaaaaaaaaaaaaaaaaaaaaaaaaaaaaaaaaaaaaaaaaaaaaaaaaaaaaaaaaaaagaauu

SEQ ID NO: 38402 - RNA, 1717 nt, Artificial Sequence
  mRNA product Design a-1 (hSL-A64-N5) comprising derived and/or modified sequence from LASV(LM776-SLE-2012;Clade IV)__AIT17824__GPCmut11 (opt1)
aggagagucccgcagucggcguccagcggcucugcuuguucgugugugugucguugcaggccuuauucaagcuuaccaugggccagaucgugaccuucuuccaggaggucccccacgugaucgaggaggugaugaacaucguccugaucgcccucagcauccuggccgugcugaaggggcucuacaacuucgcgaccugcggccugguggggcuggucacguuccuccugcugugcggccgcuccugcaccaccagcguguacaaggggguguacgagcuccagacccuggagcugaacauggagacgcucaacaugaccaugccgcuguccugcaccaagaacaacagccaccacuacaucauggucggcaacgagaccggccuggagcucacgcugaccaacaccuccaucaucaaccacaaguucugcaaccugagcgacgcccacaagaagaaccucuacgaccacgcccugauguccaucaucagcaccuuccaccuguccauccccaacuucaaccaguacgaggccaugagcugcgacuucaacgggggcaagaucuccgugcaguacaaccucagccacuccuacgccggggacgcggccaaccacugcggcacgguggccaacgggguccugcagaccuucaugcggauggccuggggcggcagcuacaucgcgcuggacuccgggcacggcaagugggacugcaucaugaccagcuaccaguaccucaucauccagaacaccacgugggaggaccacugccaguucucccgccccagccccaucggguaccugggccugcucucccagcggacccgcgacaucuacaucagccggcgccugcugggcaccuucaccuggacgcucagcgacuccgaggggaaggacaccccgggcggguacugccugacccgguggaugcugaucgaggccgagcucaagugcuucggcaacaccgccguggccaagugcaacgagaagcacgacgaggaguucugcgacaugcugcgccuguucgacuucaacaagcaggccauccagcggcucaaggcggaggcccagaugagcauccagcugaucaacaaggccgugaacgcccugaucaacgaccagcucaucaugaagaaccaccuccgcgacaucauggggauccccuacugcaacuacuccaaguacugcuaccugaaccacacgaccaccggcaagaccagccugcccaagugcugccuggucuccaacggcagcuaccugaacgagacgcacuucuccgacgacaucgagcagcaggccgacaacaugaucaccgagaugcuccagaaggaguacauggagcggcaggggaagacgccccugggccugguggaccucuucguguucagcaccuccuucuaccugaucagcaucuuccugcaccuggucaagaucccgacccaccgccacaucguggggaaguccugccccaagccccaccggcucaaccacaugggcaucugcagcugcgggcuguacaagcagcccggcgugccgguccgcuggaagcggugaggacuagucccuguucccagagcccacuuuuuuuucuuuuuuugaaauaaaauagccugucuuucagaucucaaaggcucuuuucagagccaccaaaaaaaaaaaaaaaaaaaaaaaaaaaaaaaaaaaaaaaaaaaaaaaaaaaaaaaaaaaaaaaaagaauu

SEQ ID NO: 38403 - RNA, 1717 nt, Artificial Sequence
  mRNA product Design a-1 (hSL-A64-N5) comprising derived and/or modified sequence from LASV(Mad39;Clade IV)__ANH09722__GPCmut11 (opt1)
aggagagucccgcagucggcguccagcggcucugcuuguucgugugugugucguugcaggccuuauucaagcuuaccaugggccagaucgugaccuucuuccaggaggucccccacgugaucgaggaggugaugaacaucguccugaucgcccucagcauccuggccgugcugaaggggcucuacaacguggcgaccugcggccugaucgggcuggucacguuccuccugcugugcggccgcuccugcaccaccacccucuacaaggggguguacgagcugcaggcccuggagcucaacauggagacgcugaacaugaccaugccgcugagcugcaccaagaacaacucccaccacuacauccgggugggcaacgagaccggccucgagcugacgcugaccaacaccagccucaucaaccacaaguucugcaaccuguccgacgcccacaagaagaaccuguacgaccacgcccucaugagcaucaucuccaccuuccaccugagcauccccaacuucaaccaguacgaggccauguccugcgacuucaacgacgggaagaucagcguccaguacaaccugucccacacguacgcgggcgacaccgccaaccacugcgggaccguggccaacggcgugcuccagaccuucaugcgcauggccuggggcgggagcuacaucgcgcuggacuccggccgcgggggcugggacugcaucaugacgagcuaccaguaccugaucauccagaacaccaccugggaggaccacugccaguucucccggcccagccccaucggguaccucggccugcugucccagcggacccgcgacaucuacaucagccggcgccuccugggcacguucaccuggacccuguccgacagcgaggggaaggacaccccgggcggguacugccucacgcgguggaugcugaucgaggccgagcugaagugcuucggcaacaccgccgucgccaagugcaacgagaagcacgacgaggaguucugcgacaugcuccgccuguucgacuucaacaagcaggccauccagcggcugaaggcggaggcccagaugagcauccagcucaucaacaaggccgugaacgcccugaucaacgaccagcugaucaugaagaaccaccuccgcgacaucauggggauccccuacugcaacuacuccaaguacugcuaccugaaccacaccgugaccggcaagacgagccugcccaagugcugccucgucuccaacggcagcuaccugaacgagacccacuucuccgacgacaucgagcagcaggccgacaacaugaucaccgagaugcugcagaaggaguacauggagcggcaggggaagacgccccucggccugguggaccuguucguguucagcaccuccuucuaccugaucagcaucuuccuccaccuggucaagaucccgacccaccgccacgugguggggaagcccugccccaagccccaccggcugaaccacaugggcaucugcuccugcggguucuacaagcagccgggcguccccgugcgcuggaagcggugaggacuagucccuguucccagagcccacuuuuuuuucuuuuuuugaaauaaaauagccugucuuucagaucucaaaggcucuuuucagagccaccaaaaaaaaaaaaaaaaaaaaaaaaaaaaaaaaaaaaaaaaaaaaaaaaaaaaaaaaaaaaaaaaagaauu

SEQ ID NO: 38404 - RNA, 1717 nt, Artificial Sequence
  mRNA product Design a-1 (hSL-A64-N5) comprising derived and/or modified sequence from LASV(Z0947-SLE-2011;Clade IV)__AIT17840__GPCmut11 (opt1)
aggagagucccgcagucggcguccagcggcucugcuuguucgugugugugucguugcaggccuuauucaagcuuaccaugggccagaucgugaccuucuuccaggaggucccccacgugaucgaggaggugaugaacaucguccugaucgcccucagcauccuggccgugcugaaggggcucuacaacuucgcgaccugcggccugguggggcuggucacguuccuccugcugugcggccgcuccugcaccaucagccucuacaaggggguguacgagcugcagacccuggagcucaacauggagacccugaacaugacgaugccgcuguccugcaccaagaacaacagccaccacuacaucauggugggcaacgagaccggccucgagcugacccugacgaacaccuccaucaucaaccacaaguucugcaaccucagcgacgcccacaagaagaaccuguacgaccacgcccugauguccaucaucagcaccuuccaccucuccauccccaacuucaaccaguacgaggccaugagcugcgacuucaacgggggcaagaucuccguccaguacaaccugagccacuccuacgccggggacgcggccaaccacugcggcaccguggccaacggggugcugcagacguucaugcggauggccuggggcggcagcuacaucgcgcucgacuccgggcgcgaccggugggacugcaucaugaccagcuaccaguaccugaucauccagaacaccaccugggaggaccacugccaguucucccgccccagccccaucggcuaccuggggcuccugucccagcggacgcgcgacaucuacaucagccggcgccugcucggcaccuucaccuggacccugagcgacuccgagggcaaggacacgcccgggggcuacugccugacccgguggaugcucaucgaggccgagcugaagugcuucgggaacaccgccgucgccaagugcaacgagaagcacgacgaggaguucugcgacaugcugcgccucuucgacuucaacaagcaggccauccagcggcugaaggcggaggcccagaugagcauccagcugaucaacaaggccgugaacgcccucaucaacgaccagcugaucaugaagaaccaccuccgcgacaucaugggcauccccuacugcaacuacuccaaguacugcuaccugaaccacaccacgaccgggaagaccagccugcccaagugcugccugguguccaacggcagcuaccucaacgagacccacuucuccgacgacaucgagcagcaggccgacaacaugaucacggagaugcugcagaaggaguacauggagcggcagggcaagaccccgcuggggcucgucgaccuguucguguucagcaccuccuucuaccugaucagcaucuuccugcaccucgugaagaucccgacccaccgccacaucgucggcaagcccugccccaagccccaccggcugaaccacauggggaucugcuccugcggccuguacaagcagccgggggugcccgugaaguggaagcgcugaggacuagucccuguucccagagcccacuuuuuuuucuuuuuuugaaauaaaauagccugucuuucagaucucaaaggcucuuuucagagccaccaaaaaaaaaaaaaaaaaaaaaaaaaaaaaaaaaaaaaaaaaaaaaaaaaaaaaaaaaaaaaaaaagaauu

SEQ ID NO: 38405 - RNA, 1717 nt, Artificial Sequence
  mRNA product Design a-1 (hSL-A64-N5) comprising derived and/or modified sequence from LASV(Josiah;Clade IV)__NP_694870__GPCmut11 (opt1)
aggagagucccgcagucggcguccagcggcucugcuuguucgugugugugucguugcaggccuuauucaagcuuaccaugggccagaucgugaccuucuuccaggaggucccccacgugaucgaggaggugaugaacaucguccugaucgcccucagcgugcuggccgugcugaaggggcucuacaacuucgcgaccugcggccuggucgggcuggugacguuccuccugcugugcggccgcuccugcaccaccagccucuacaaggggguguacgagcugcagacccuggagcucaacauggagacgcugaacaugaccaugccgcuguccugcaccaagaacaacagccaccacuacaucauggucggcaacgagaccggccucgagcugacgcugaccaacaccuccaucaucaaccacaaguucugcaaccucagcgacgcccacaagaagaaccuguacgaccacgcccugauguccaucaucagcaccuuccaccucuccauccccaacuucaaccaguacgaggccaugagcugcgacuucaacgggggcaagaucuccgugcaguacaaccugagccacuccuacgccggggacgcggccaaccacugcggcacgguggccaacgggguccugcagaccuucaugcggauggccuggggcggcagcuacaucgcgcucgacuccgggcgcggcaacugggacugcaucaugaccagcuaccaguaccugaucauccagaacaccacgugggaggaccacugccaguucucccggcccagccccaucggguaccugggccuccugucccagcgcacccgggacaucuacaucagccgccggcugcucggcaccuucaccuggacgcugagcgacuccgaggggaaggacaccccgggcggguacugccugacccgcuggaugcucaucgaggccgagcugaagugcuucggcaacaccgccguggccaagugcaacgagaagcacgacgaggaguucugcgacaugcugcggcuguucgacuucaacaagcaggccauccagcgccugaaggcggaggcccagaugagcauccagcugaucaacaaggccgugaacgcccucaucaacgaccagcugaucaugaagaaccaccuccgggacaucauggggauccccuacugcaacuacuccaaguacugcuaccucaaccacacgaccaccggccgcaccagccugcccaagugcugccuggucuccaacggcagcuaccucaacgagacgcacuucuccgacgacaucgagcagcaggccgacaacaugaucaccgagaugcugcagaaggaguacauggagcggcaggggaagacgccccugggccugguggaccucuucguguucagcaccuccuucuaccugaucagcaucuuccugcaccucgucaagaucccgacccaccgccacaucguggggaaguccugccccaagccccaccggcugaaccacaugggcaucugcagcugcgggcuguacaagcagcccggcgugccggucaaguggaagcgcugaggacuagucccuguucccagagcccacuuuuuuuucuuuuuuugaaauaaaauagccugucuuucagaucucaaaggcucuuuucagagccaccaaaaaaaaaaaaaaaaaaaaaaaaaaaaaaaaaaaaaaaaaaaaaaaaaaaaaaaaaaaaaaaaagaauu

SEQ ID NO: 38406 - RNA, 1714 nt, Artificial Sequence
  mRNA product Design a-1 (hSL-A64-N5) comprising derived and/or modified sequence from LASV(LP;Clade I)__AAF86701__GPCmut11 (opt1)
aggagagucccgcagucggcguccagcggcucugcuuguucgugugugugucguugcaggccuuauucaagcuuaccaugggccagaucaucaccuucuuccaggaggugccccacgucaucgaggaggugaugaacaucgugcugaucgcccucagccugcuggccauccucaaggggcuguacaacaucgcgaccugcggcaucaucgggcuggucgccuuccucuuccugugcggcaaguccugcagccugacgcucaagggcggguacgagcugcagacccuggagcucaacauggagacccugaacaugaccaugccgcuguccugcacgaagaacagcucccaccacuacauccgcgugggcaacgagaccgggcucgagcugacccugaccaacacgagcaucaucaaccacaaguucugcaaccucuccgacgcccacaagaagaaccuguacgaccacgcccugaugagcaucaucuccaccuuccaccucagcauccccaacuucaaccaguacgaggccauguccugcgacuucaacggcgggaagaucagcgugcaguacaaccugucccacagcuacgcgggcgacgccgccgagcacugcgggaccgucgccaacggcgugcugcagaccuucaugcggauggcguggggcgggcgcuacaucgcccucgacuccggcaaggggaacugggacugcaucaugacgagcuaccaguaccugaucauccagaacaccaccugggaggaccacugccaguucucccggcccagccccaucggcuaccugggccuccugucccagcgcacccgggacaucuacaucagccgccggcugcucgggacguucaccuggacccugagcgacuccgagggcaacgagacccccgggggcuacugccugacgcgcuggaugcucaucgaggccgagcugaagugcuucgggaacaccgccguggccaagugcaacgagaagcacgacgaggaguucugcgacaugcugcggcuguucgacuucaacaagcaggcgauccgccggcugaaggccgaggcccagaugagcauccagcugaucaacaaggccgucaacgcccucaucaacgaccagcugaucaugaagaaccaccuccgcgacaucaugggcauccccuacugcaacuacuccaaguacugcuaccucaaccacaccagcuccggccggaccagccugcccaagugcugccugaucuccaacgggagcuaccucaacgagacgcaguucuccgacgacaucgagcagcaggcggacaacaugaucaccgagaugcugcagaaggaguacaucgagcgccagggcaagaccccgcuggggcugguggacaucuucaucuucagcaccuccuucuaccucaucagcaucuuccugcaccugaucaagaucccgacgcaccggcacaucgugggcaagcccugccccaagccccaccgccucaaccacaugggggucugcuccugcggccuguacaagcacccgggcgugcccaccaaguggaagcggugaggacuagucccuguucccagagcccacuuuuuuuucuuuuuuugaaauaaaauagccugucuuucagaucucaaaggcucuuuucagagccaccaaaaaaaaaaaaaaaaaaaaaaaaaaaaaaaaaaaaaaaaaaaaaaaaaaaaaaaaaaaaaaaaagaauu

SEQ ID NO: 38407 - RNA, 1714 nt, Artificial Sequence
  mRNA product Design a-1 (hSL-A64-N5) comprising derived and/or modified sequence from LASV(803213;Clade II)__AAF86703__GPCmut11 (opt1)
aggagagucccgcagucggcguccagcggcucugcuuguucgugugugugucguugcaggccuuauucaagcuuaccaugggccagaucaucaccuucuuccaggaggugccccacgucaucgaggaggugaugaacaucgugcugaucgcccucagccugcuggccauccucaaggggaucuacaacgucgcgaccugcggccuguucgggcugaucuccuuccuccugcugugcggccgcagcugcuccgugacguacaaggggguguacgagcuccagacccuggagcugaacauggccaaccucaacaugaccaugccgcugagcugcaccaagaacaacucccaccacuacaucauggucggcaacgagacgggccuggagcucacccugaccaacaccagcaucaucaaccacaaguucugcaaccuguccgacgcccacaagaagaaccucuacgaccacgcccugaugagcaucaucuccacguuccaccugagcauccccaacuucaaccaguacgaggccauguccugcgacuucaacgggggcaagaucagcgugcaguacaaccucucccacagcuucgcgguggacgccgccaaccacugcgggaccaucgccaacggcguccugcagaccuucaugcggauggcguggggcggguccuacaucgcccuggacagcggcaaggggaacugggacugcaucaugaccuccuaccaguaccucaucauccagaacacgaccugggaggaccacugccaguucagccgccccucccccaucggcuaccuggggcugcucagccagcggacccgcgacaucuacaucagccggcgccugcugggcaccuucacguggacccucuccgacagcgagggcaacgaggcccccgggggcuacugccugacccgguggaugcugaucgaggccgagcucaagugcuucgggaacaccgccguggcgaagugcaacgagaagcacgacgaggaguucugcgacaugcugcgccuguucgacuucaacaagcaggccaucaagcggcucaagacggaggcccagauguccauccagcugaucaacaaggccgugaacgcccugaucaacgaccagcucaucaugaagaaccaccuccgcgacaucaugggcauccccuacugcaacuacagccgguacugcuaccugaaccacaccgucaccgggaagaccucccugccccgcugcugccuggugagcaacggcuccuaccugaacgagacgcacuucagcgacgacaucgagcagcaggcggacaacaugaucaccgagaugcuccagaaggaguacauggaccggcagggcaagaccccgcuggggcugguggaccuguucgucuucuccaccagcuucuaccucaucuccaucuuccugcaccuggugaagaucccgacgcaccgccacaucgugggcaagcccugccccaagccccaccggcucaaccacauggggaucugcagcugcggccuguacaagcacccggggguccccgugaaguggaagcgcugaggacuagucccuguucccagagcccacuuuuuuuucuuuuuuugaaauaaaauagccugucuuucagaucucaaaggcucuuuucagagccaccaaaaaaaaaaaaaaaaaaaaaaaaaaaaaaaaaaaaaaaaaaaaaaaaaaaaaaaaaaaaaaaaagaauu

SEQ ID NO: 38408 - RNA, 1714 nt, Artificial Sequence
  mRNA product Design a-1 (hSL-A64-N5) comprising derived and/or modified sequence from LASV(GA391;Clade III)__CAA36645__GPCmut11 (opt1)
aggagagucccgcagucggcguccagcggcucugcuuguucgugugugugucguugcaggccuuauucaagcuuaccaugggccagaucgugaccuucuuccaggaggucccccacgugaucgaggaggugaugaacaucguccugaucgcccucagcauccuggccauccugaaggggcucuacaacguggcgaccugcggccugaucgggcuggugacguuccuccugcuguccggccgcagcugcucccucaucuacaaggggaccuacgagcugcagacccuggagcucaacauggagacccugaacaugacgaugccgcugagcugcaccaagaacaacucccaccacuacauccgggucggcaacgagaccggccucgagcugacccugacgaacaccagcauccucaaccacaaguucugcaaccuguccgacgcccacaagcgcaaccuguacgaccacagccucauguccaucaucagcaccuuccaccuguccauccccaacuucaaccaguacgaggccaugagcugcgacuucaacgggggcaagaucaccgugcaguacaaccugucccacagcuucgccguggacgccgcggggcacugcggcacgcucgccaacgggguccugcagaccuucaugcggauggccuggggcggcuccuacaucgcccuggacagcgggcgcggcaacugggacugcaucaugaccuccuaccaguaccucaucauccagaacaccacgugggacgaccacugccaguucagccggcccucccccaucggguaccugggccugcucagccagcgcacccgggacaucuacaucagccgccggcugcugggcaccuucaccuggacgcucuccgacagcgaggggaacgagaccccgggcggguacugccugacccgcuggaugcugaucgaggcggagcucaagugcuucggcaacaccgccguggccaagugcaacgagaagcacgacgaggaguucugcgacaugcugcggcuguucgacuucaacaagcaggccauccgccggcucaagacggaggcccagauguccauccagcugaucaacaaggcggugaacgcccugaucaacgaccagcucaucaugaagaaccaccuccgcgacaucauggggauccccuacugcaacuacagccgguacugcuaccugaaccacaccuccaccggcaagaccagccugccccgcugcugccugaucuccaacggcagcuaccugaacgagacgaaguucuccgacgacaucgagcagcaggccgacaacaugaucaccgagaugcugcagaaggaguacaucgaccggcaggggaagacgccccucggccuggucgaccuguucguguucagcaccuccuucuaccucaucagcaucuuccugcaccuggugaagaucccgacccaccgccacaucgucgggaagcccugccccaagccccaccggcucaaccacaugggcaucugcuccugcgggcuguacaagcagccgggcgugcccgugcgcuggaagcggugaggacuagucccuguucccagagcccacuuuuuuuucuuuuuuugaaauaaaauagccugucuuucagaucucaaaggcucuuuucagagccaccaaaaaaaaaaaaaaaaaaaaaaaaaaaaaaaaaaaaaaaaaaaaaaaaaaaaaaaaaaaaaaaaagaauu

SEQ ID NO: 38409 - RNA, 1717 nt, Artificial Sequence
  mRNA product Design a-1 (hSL-A64-N5) comprising derived and/or modified sequence from LASV(AV;Clade V)__CCA30314__GPCmut11 (opt1)
aggagagucccgcagucggcguccagcggcucugcuuguucgugugugugucguugcaggccuuauucaagcuuaccaugggccagaucgugaccuucuuccaggaggucccccacgugaucgaggaggugaugaacaucguccugaucgcccucagcauccuggccgugcugaaggggcucuacaacaucgcgaccugcggccugaucgggcugaucacguuccuccugcugugcggccgcuccugcagcuccaaccucuacaaggggguguacgagcugcagagccuggaccucaacauggagacccugaacaugaccaugccgcuguccugcaccaagaacaacagccaccacuacauccgggucggcaacgacacgggccucgagcugacccugaccaacaccuccauccucaaccacaaguucugcaaccugagcgacgcccacaagaaggaccuguacgaccacgcccucauguccaucaucagcacguuccaccuguccauccccaacuucaaccaguacgaggccaugagcugcgacuucaacgggggcaagaucuccgugcaguacaaccugagccacuccuacgccaucgacgcggccaaccacugcgggaccguggccaacggcauccuccagaccuucaugcgcauggccuggggcgggagcuacaucgcgcuggacuccggccgggggaacugggacugcaucaugaccagcuaccaguaccugaucauccagaacacgaccugggagaaccacugccaguucucccgccccagccccaucggcuaccucgggcugcugagccagcggacccgcgacaucuacaucucccggcgccuccugggcaccuucacguggacccugagcgacuccgagggcaacgccacccccgggggcuacugccucacccgguggaugcugaucgaggccgagcugaagugcuucgggaacacggccgucgccaagugcaacgagaagcacgacgaggaguucugcgacaugcuccgccuguucgacuucaacaagcaggcgaucagccggcugaaguccgaggcccagaugagcauccagcucaucaacaaggccgugaacgcccugaucaacgaccagcugaucaugaagaaccaccuccgcgacaucaugggcauccccuacugcaacuacuccaaguacugcuaccugaaccacaccaucaccgggaagaccagccugcccaagugcugccucguguccaacggcagcuaccugaacgagacgcacuucuccgacgacaucgagcagcaggccgacaacaugaucaccgagaugcugcagaaggaguacauggagcggcagggcaagaccccgcuggggcucgucgaccuguucguguucagcaccuccuucuaccugaucagcaucuuccuccgccuggugaagaucccgacgcaccggcacaucgucggcaagcccugccccaagccccaccgccugaaccacauggggaucugcuccugcggccucuacaagcagccgggggugcccgugcgguggaagcgcugaggacuagucccuguucccagagcccacuuuuuuuucuuuuuuugaaauaaaauagccugucuuucagaucucaaaggcucuuuucagagccaccaaaaaaaaaaaaaaaaaaaaaaaaaaaaaaaaaaaaaaaaaaaaaaaaaaaaaaaaaaaaaaaaagaauu

SEQ ID NO: 38410 - RNA, 1714 nt, Artificial Sequence
  mRNA product Design a-1 (hSL-A64-N5) comprising derived and/or modified sequence from LASV(Togo/2016/7082;Clade VI)__AMR44577__GPCmut11 (opt1)
aggagagucccgcagucggcguccagcggcucugcuuguucgugugugugucguugcaggccuuauucaagcuuaccaugggccagaucaucaccuucuuccaggaggugccccacgucaucgaggaggugaugaacaucgugcugaucgcccucagccugcuggccauccucaagggggucuacaacguggcgaccugcggcaucaucgggcuggugacguuccuguuccucugcggccgcuccugcagccugaucuacaagggguccuacgagcugcagacccucgagcugaacauggagacccugaacaugaccaugccgcucagcugcacgaagaacuccagccaccacuacauccgggucggcaacgagaccggccuggagcugacccucaccaacacguccaucaucaaccacaaguucugcaaccugagcgacgcccacaagcgcaaccuguacgaccacgcccucauguccauccugagcaccuuccaccuguccauccccaacuucaaccaguacgaggccaugagcugcgacuucaacgggggcaagaucuccgugcaguacaaccucagccacgccuacgcgguggacgccgccgagcacugcgggaccgucgccaacggcgugcugcagaccuucaugcggauggcguggggcggguccuacaucgcccuggacagcggccgcgggaacugggacugcaucaugacguccuaccaguaccucaucauccagaacaccaccugggaggaccacugccaguucagccggcccucccccaucggcuaccuggggcugcucagccagcgcacccgggacaucuacaucagccgccggcugcugggcacguucaccuggacccucuccgacagcgagggcaacgagacccccgggggcuacugccugacgcgcuggaugcugaucgaggccgagcucaagugcuucgggaacaccgccguggccaagugcaacgagaagcacgacgaggaguucugcgacaugcugcggcuguucgacuucaacaagcaggcgauccagcgccucaaguccgaggcccagaugagcauccagcugaucaacaaggccgucaacgcccugaucaacgaccagcucaucaugaagaaccaccuccgggacaugaugggcauccccuacugcaacuacuccaaguacugcuaccugaaccacaccagcuccgggcgcaccagccugcccaagugcugccugguguccaacggcagcuaccugaacgagacgcacuucuccgacgacaucgagcagcaggccgacaacaugaucaccgagaugcuccagaaggaguacaucgaccggcagggcaagaccccgcuggggcugguggaccuguucgucuucagcaccuccuucuaccucaucagcaucuuccugcaccugaucaagaucccgacgcaccgccacaucgugggcaagcccugccccaagccccaccggcucaaccacauggggaucugcuccugcggccuguacaagcagccgggggugcccacccgcuggaagcggugaggacuagucccuguucccagagcccacuuuuuuuucuuuuuuugaaauaaaauagccugucuuucagaucucaaaggcucuuuucagagccaccaaaaaaaaaaaaaaaaaaaaaaaaaaaaaaaaaaaaaaaaaaaaaaaaaaaaaaaaaaaaaaaaagaauu

SEQ ID NO: 38411 - RNA, 1714 nt, Artificial Sequence
  mRNA product Design a-1 (hSL-A64-N5) comprising derived and/or modified sequence from LASV(KAK-428;Clade n.d. (VII))__ANH09740__GPCmut11 (opt1)
aggagagucccgcagucggcguccagcggcucugcuuguucgugugugugucguugcaggccuuauucaagcuuaccaugggccagaucgugaccuucuuccaggaggucccccacgugaucgaggaggugaugaacaucguccugaucgcccucagccugcuggccauccucaaggggcuguacaacuucgcgaccugcggcgugaucgggcugaucacguuccuccugcugugcggccgcuccugcagcgccaccuacaaggggcaguacgagcuccagacccuggagcugaacauggagucccucaacaugaccaugccgcugagcugcacgaagaacaacucccaccacuacauccgggccggcaacaacaccggccuggagcucacccugaccaacacgagcaucaucucccacaaguucugcaaccugagcgacgcccacaagaagaaccucuacgaccacacccugauguccaucaucaccaccuuccaccugagcauccccaacuucaaccaguacgaggccauguccugcgacuucaacgggggcaagaucagcauccaguacaaccucucccacagcuacgcgggggacgccgcccagcacugcggcacgguggccaacgggguccugcagaccuucaugcgcauggcguggggcggcuccuaccuggcccucgacagcgggcggcgcggcugggacugcaucaucuccagcuaccaguaccugaucauccagaacaccaccugggacgaccacugccaguucucccggcccagccccaucggguaccugggcuucgugagccagaagacgcgcgacaucuacaucucccggcgccuccugggcaccuucaccuggacccugagcgacuccgaggggcacgacaugccgggcggguacugccucacgcgguggaugcugaucgaggccgaccugaagugcuucggcaacaccgccguggccaagugcaacgagaagcacgacgaggaguucugcgacauguggcgccucuucgacuucaacaagcaggcgauccagcggcugaaggccgaggcccagaugaacauccagcugaucaacaaggccgucaacgcccucaucaacgaccagcugaugaugaagaaccaccuccgcgacaucauggggauccccuacugcaacuacagcaaguucugcuaccugaacaacaccaccacgggccggaccucccugccccgcugcugccugaucagcaacggcuccuaccucaacgagacccacuucagcgacgacaucgagcagcaggcggacaacaugaucaccgagaugcugcagaaggaguacauggaccggcaggggaagacgccccugggccucguggaccuguucguguucuccaccagcuucuaccugaucaccaucuuccugcaccucgucaagaucccgacccaccgccacaucguggggaagcccugccccaagccccaccggcugaaccacaugggcaucugcuccugcgggcuguacaagcagccgggcgugcccguccgcuggaagcggugaggacuagucccuguucccagagcccacuuuuuuuucuuuuuuugaaauaaaauagccugucuuucagaucucaaaggcucuuuucagagccaccaaaaaaaaaaaaaaaaaaaaaaaaaaaaaaaaaaaaaaaaaaaaaaaaaaaaaaaaaaaaaaaaagaauu

SEQ ID NO: 38412 - RNA, 1714 nt, Artificial Sequence; identical to SEQ ID NO: 38406
  mRNA product Design a-1 (hSL-A64-N5) comprising derived and/or modified sequence from LASV(Pinneo-NIG-1969;Clade I)__AIT17836__GPCmut11 (opt1)

SEQ ID NO: 38413 - RNA, 1714 nt, Artificial Sequence
  mRNA product Design a-1 (hSL-A64-N5) comprising derived and/or modified sequence from LASV(ISTH0009-NIG-2011;Clade II)__AIT17404__GPCmut11 (opt1)
aggagagucccgcagucggcguccagcggcucugcuuguucgugugugugucguugcaggccuuauucaagcuuaccaugggccagaucaucaccuucuuccaggaggugccccacgucaucgaggaggugaugaacaucgugcugaucgcccucagccugcuggccauccucaaggggaucuacaacgucgcgaccugcggccuguucgggcugguguccuuccuccugcugugcggccgcagcugcuccacgaccuacaaggggguguacgagcuccagacccuggagcuggacauggccagccucaacaugaccaugccgcuguccugcacgaagaacaacagccaccacuacaucauggucggcaacgagaccggccuggagcucacccugaccaacacguccaucaucaaccacaaguucugcaaccugagcgacgcccacaagaagaaccucuacgaccacgcccugauguccaucaucagcaccuuccaccuguccauccccaacuucaaccaguacgaggccaugagcugcgacuucaacgggggcaagaucuccgugcaguacaaccucagccacgcguacgccguggacgccgccaaccacugcgggaccaucgcgaacggcguccugcagaccuucaugcggauggccuggggcggguccuacaucgcccuggacagcggcaagggguccugggacugcaucaugacgagcuaccaguaccucaucauccagaacaccaccugggaggaccacugccaguucucccgccccagccccaucggcuaccuggggcugcucagccagcggacccgcgacaucuacaucucccggcgccugcugggcacguucaccuggacccucagcgacuccgagggcaacgagacccccgggggcuacugccugacgcgguggaugcugaucgaggccgagcucaagugcuucgggaacaccgccguggcgaagugcaacgagaagcacgacgaggaguucugcgacaugcugcgccuguucgacuucaacaagcaggccauccggcgccucaagaccgaggcccagaugagcauccagcugaucaacaaggccgugaacgcccugaucaacgaccagcucaucaugaagaaccaccuccgggacaucaugggcaucccguacugcaacuacuccaaguacugcuaccugaaccacaccgucacggggaagaccagccugccccgcugcugccugguguccaacggcagcuaccugaacgagacccacuucuccgacgacaucgagcagcaggcggacaacaugaucaccgagcuccugcagaaggaguacauggaccggcagggcaagacgccccuggggcugguggaccucuucgucuucagcaccuccuucuaccugaucagcaucuuccugcaccucaucaagaucccgacccaccgccacaucaccggcaagcccugccccaagccccaccggcugaaccacauggggaucugcuccugcggccuguacaagcacccgggggugcccgugaaguggaagcgcugaggacuagucccuguucccagagcccacuuuuuuuucuuuuuuugaaauaaaauagccugucuuucagaucucaaaggcucuuuucagagccaccaaaaaaaaaaaaaaaaaaaaaaaaaaaaaaaaaaaaaaaaaaaaaaaaaaaaaaaaaaaaaaaaagaauu

SEQ ID NO: 38414 - RNA, 1714 nt, Artificial Sequence
  mRNA product Design a-1 (hSL-A64-N5) comprising derived and/or modified sequence from LASV(ISTH2010-NIG-2012;Clade II)__AIT17482__GPCmut11 (opt1)
aggagagucccgcagucggcguccagcggcucugcuuguucgugugugugucguugcaggccuuauucaagcuuaccaugggccagaucaucaccuucuuccaggaggugccccacgucaucgaggaggugaugaacaucgugcugaucgcccucagccugcuggccauccucaaggggaucuacaacgucgcgaccugcggccuguucgggcugguguccuuccuccugcugugcggccgcagcugcuccacgaccuacaaggggguguacgagcuccagacccuggagcuggacauggccagccucaacaugaccaugccgcuguccugcacgaagaacaacagccaccacuacaucauggucggcaacgagaccggccuggagcucacccugaccaacacguccaucaucaaccacaaguucugcaaccugagcgacgcccacaagaagaaccucuacgaccacgcccugauguccaucaucagcaccuuccaccuguccauccccaacuucaaccaguacgaggccaugagcugcgacuucaacgggggcaagaucuccgugcaguacaaccucagccacgcguacgccguggacgccgccaaccacugcgggaccaucgcgaacggcguccugcagaccuucaugcggauggccuggggcggguccuacaucgcccuggacagcggcaagggguccugggacugcaucaugacgagcuaccaguaccucaucauccagaacaucaccugggaggaccacugccaguucucccgccccagccccaucggcuaccuggggcugcucagccagcggacccgcgacaucuacaucucccggcgccugcugggcaccuucacguggacccucagcgacuccgagggcaacgagacccccgggggcuacugccugacccgguggaugcugaucgaggccgagcucaagugcuucgggaacacggccguggcgaagugcaacgagaagcacgacgaggaguucugcgacaugcugcgccuguucgacuucaacaagcaggccauccggcgccucaagaccgaggcccagaugagcauccagcugaucaacaaggccgugaacgcccugaucaacgaccagcucaucaugaagaaccaccuccgggacaucaugggcauccccuacugcaacuacuccaaguacugcuaccugaaccacaccgucaccgggaagacgagccugccccgcugcugccugguguccaacggcagcuaccugaacgagacccacuucuccgacgacaucgagcagcaggcggacaacaugaucaccgagcuccugcagaaggaguacaucgaccggcagggcaagaccccgcuggggcugguggaccucuucgucuucagcacguccuucuaccugaucagcaucuuccugcaccucgugaagaucccgacccaccgccacguggucggcaagcccugccccaagccccaccggcugaaccacauggggaucugcuccugcggccuguacaagcacccgggggugcccgugaaguggaagcgcugaggacuagucccuguucccagagcccacuuuuuuuucuuuuuuugaaauaaaauagccugucuuucagaucucaaaggcucuuuucagagccaccaaaaaaaaaaaaaaaaaaaaaaaaaaaaaaaaaaaaaaaaaaaaaaaaaaaaaaaaaaaaaaaaagaauu

SEQ ID NO: 38415 - RNA, 1714 nt, Artificial Sequence
  mRNA product Design a-1 (hSL-A64-N5) comprising derived and/or modified sequence from LASV(Lassa virus/H.sapiens-wt/NGA/2015/ISTH_0543;Clade II)__AVO03639__GPCmut11 (opt1)
aggagagucccgcagucggcguccagcggcucugcuuguucgugugugugucguugcaggccuuauucaagcuuaccaugggccagaucaucaccuucuuccaggaggugccccacgucaucgaggaggugaugaacaucgugcugaucgcccucagccugcuggccauccucaaggggaucuacaacgucgcgaccugcggccuguucgggcugguguccuuccuccugcugugcggccgcagcugcuccacgaccuacaaggggguguacgagcuccagacccuggagcuggacauggccaaccucaacaugaccaugccgcugagcugcacgaagaacaacucccaccacuacaucauggucggcaacgagaccggccuggagcucacccugaccaacacgagcaucaucaaccacaaguucugcaaccuguccgacgcccacaagaagaaccucuacgaccacgcccugaugagcaucaucuccaccuuccaccugagcauccccaacuucaaccaguacgaggccauguccugcgacuucaacgggggcaagaucagcgugcaguacaaccucucccacaccuacgcgguggacgccgccaaccacugcgggaccaucgccaacggcguccugcagacguucaugcggauggcguggggcgggagcuacaucgcccuggacuccggcaaggggagcugggacugcaucaugaccuccuaccaguaccucgugauccagaacaccaccugggaggaccacugccaguucagccgccccucccccaucggcuaccuggggcugcucagccagcggacgcgcgacaucuacaucagccggcgccugcugggcaccuucaccuggacccucuccgacagcgagggcaacgagacgcccgggggcuacugccugacccgguggaugcugaucgaggccgagcucaagugcuucgggaacaccgccguggccaagugcaacgagaagcacgacgaggaguucugcgacaugcugcgccuguucgacuucaacaagcaggcgauccggcgccucaagaccgaggcccagauguccauccagcugaucaacaaggccgucaacgcccugaucaacgaccagcucaucaugaagaaccaccuccgggacaucaugggcauccccuacugcaacuacagcaaguacugcuaccugaaccacacggugaccgggaagaccucccugccccgcugcugccuggugagcaacggcuccuaccugaacgagacccacuucagcgacgacaucgagcagcaggccgacaacaugaucacggagcuccugcagaaggaguacaucgaccggcagggcaagaccccgcuggggcuggucgaccucuucguguucuccaccagcuucuaccugaucuccaucuuccugcaccucgugaagaucccgacccaccgccacaucacgggcaagcccugccccaagccccaccggcugaaccacauggggaucugcagcugcggccuguacaagcacccggggguccccgugaaguggaagcgcugaggacuagucccuguucccagagcccacuuuuuuuucuuuuuuugaaauaaaauagccugucuuucagaucucaaaggcucuuuucagagccaccaaaaaaaaaaaaaaaaaaaaaaaaaaaaaaaaaaaaaaaaaaaaaaaaaaaaaaaaaaaaaaaaagaauu

SEQ ID NO: 38416 - RNA, 1714 nt, Artificial Sequence
  mRNA product Design a-1 (hSL-A64-N5) comprising derived and/or modified sequence from LASV(Lassa virus/H.sapiens-wt/NGA/2016/ISTH_0009;Clade II)__AVO03571__GPCmut11 (opt1)
aggagagucccgcagucggcguccagcggcucugcuuguucgugugugugucguugcaggccuuauucaagcuuaccaugggccagaucaucaccuucuuccaggaggugccccacgucaucgaggaggugaugaacaucgugcugaucgcccucagccugcuggccauccucaaggggaucuacaacgucgcgaccugcggccugcuggggcucguguccuuccugcugcucugcggccgcagcugcuccacgaccuacaaggggguguacgagcugcagacccuggagcucgacauggccagccugaacaugaccaugccgcuguccugcacgaagaacaacagccaccacuacaucauggucggcaacgagaccggccucgagcugacccugaccaacacguccaucaucaaccacaaguucugcaaccucagcgacgcccacaagaagaaccuguacgaccacgcccugauguccaucaucagcaccuuccaccucuccauccccaacuucaaccaguacgaggccaugagcugcgacuucaacgggggccggaucuccgugcaguacaaccugagccacuccuacgcgguggacgccgccaaccacugcgggaccaucgccaacggcguccugcagaccuucaugcgcauggcguggggcgggagcuacaucgcccucgacuccggcaaggggagcugggacugcaucaugacguccuaccaguaccugaucauccagaacaccaccugggaggaccacugccaguucagccggcccagccccaucggcuaccuggggcuccugucccagcgcacccgggacaucuacaucagccgccggcugcucggcacguucaccuggacccuguccgacagcgagggcaacgagacccccgggggcuacugccugacgcgcuggaugcucaucgaggccgagcugaagugcuucgggaacaccgccguggccaagugcaacgagaagcacgacgaggaguucugcgacaugcugcggcuguucgacuucaacaagcaggcgauccgccggcugaagaccgaggcccagauguccauccagcugaucaacaaggccgugaacgcccucaucaacgaccagcugaucaugaagaaccaccuccgcgacaucaugggcaucccguacugcaacuacagcaaguacugcuaccucaaccacaccgucacggggaagaccucccugccccggugcugccuggugagcaacggcuccuaccucaacgagacccacuucagcgacgacaucgagcagcaggccgacaacaugaucaccgagcugcugcagaaggaguacaucgaccgccagggcaagacgccccuggggcucguggaccuguucgucuucuccaccagcuucuaccugaucuccaucuuccuccaccuggugaagaucccgacccaccggcacaucaccggcaagcccugccccaagccccaccgccugaaccacauggggaucugcagcugcggccucuacaaccacccgggggugcccgucaaguggaagcggugaggacuagucccuguucccagagcccacuuuuuuuucuuuuuuugaaauaaaauagccugucuuucagaucucaaaggcucuuuucagagccaccaaaaaaaaaaaaaaaaaaaaaaaaaaaaaaaaaaaaaaaaaaaaaaaaaaaaaaaaaaaaaaaaagaauu

SEQ ID NO: 38417 - RNA, 1714 nt, Artificial Sequence
  mRNA product Design a-1 (hSL-A64-N5) comprising derived and/or modified sequence from LASV(Lassa virus/H.sapiens-wt/NGA/2016/ISTH_0017;Clade II)__AVO03567__GPCmut11 (opt1)
aggagagucccgcagucggcguccagcggcucugcuuguucgugugugugucguugcaggccuuauucaagcuuaccaugggccagaucaucaccuucuuccaggaggugccccacgucaucgaggaggugaugaacaucgugcugaucgcccucagccugcuggccauccucaaggggaucuacaacgucgcgaccugcggccuguucgggcugguguccuuccuccugcugugcggccgcagcugcuccacgaccuacaaggggguguacgagcuccagacccuggagcuggacauggccagccucaacaugaccaugccgcuguccugcacgaagaacaacagccaccacuacaucauggucggcaacgagaccggccuggagcucacccugaccaacacguccaucaucaaccacaaguucugcaaccugagcgacgcccacaagaagaaccucuacgaccacgcccugauguccaucaucagcaccuuccaccuguccauccccaacuucaaccaguacgaggccaugagcugcgacuucaacgggggcaagaucuccgugcaguacaaccucagccacaccuacgcgaucgacgccgccaaccacugcgggaccaucgccaacggcgugcugcagacguucaugcggauggcguggggcggguccuacaucgcccuggacagcggcaagggguccugggacugcaucaugaccagcuaccaguaccucaucauccagaacaccaccugggaggaccacugccaguucucccgccccagccccaucggcuaccuggggcugcucagccagcggacgcgcgacaucuacaucucccggcgccugcugggcaccuucaccuggacccucagcgacuccgagggcaacgagacgcccgggggcuacugccugacccgguggaugcugaucgaggccgagcucaagugcuucgggaacaccgccgucgccaagugcaacgagaagcacgacgaggaguucugcgacaugcugcgccuguucgacuucaacaagcaggcgauccggcgccucaagaccgaggcccagaugagcauccagcugaucaacaaggccgugaacgcccugaucaacgaccagcucaucaugaagaaccaccuccgggacaucaugggcauccccuacugcaacuacuccaaguacugcuaccugaaccacacggugaccgggaagaccagccugccccgcugcugccuggucuccaacggcagcuaccugaacgagacccacuucuccgacgacaucgagcagcaggccgacaacaugaucacggagcuccugcagaaggaguacauggaccggcagggcaagaccccgcuggggcugguggaccucuucguguucagcaccuccuucuaccugaucagcaucuuccugcaccucguccgcaucccgacccaccggcacgugaucggcaagcccugccccaagccccaccgccugaaccacauggggaucugcuccugcggccuguacaagcacccgggggugcccgucaaguggaagcggugaggacuagucccuguucccagagcccacuuuuuuuucuuuuuuugaaauaaaauagccugucuuucagaucucaaaggcucuuuucagagccaccaaaaaaaaaaaaaaaaaaaaaaaaaaaaaaaaaaaaaaaaaaaaaaaaaaaaaaaaaaaaaaaaagaauu

SEQ ID NO: 38418 - RNA, 1714 nt, Artificial Sequence
  mRNA product Design a-1 (hSL-A64-N5) comprising derived and/or modified sequence from LASV(Lassa virus/H.sapiens-wt/NGA/2018/ISTH_0959;Clade II)__AVV65099__GPCmut11 (opt1)
aggagagucccgcagucggcguccagcggcucugcuuguucgugugugugucguugcaggccuuauucaagcuuaccaugggccagaucaucaccuucuuccaggaggugccccacgucaucgaggaggugaugaacaucgugcugaucgcccucagccugcuggccauccucaaggggaucuacaacgucgugaccugcggccuguucgggcugguguccuuccuccugcugugcggccgcagcugcuccacgaccuacaagggggucuacgagcuccagacccuggagcuggacauggcgagccucaacaugaccaugccgcuguccugcacgaagaacaacagccaccacuacaucauggugggcaacgagaccggccuggagcucacccugaccaacacguccaucaucaaccacaaguucugcaaccugagcgacgcccacaagaagaaccucuacgaccacgcccugauguccaucaucagcaccuuccaccuguccauccccaacuucaaccaguacgaggccaugagcugcgacuucaacgggggcaagaucuccgugcaguacaaccucagccacgccuacgcgaucgacgccgccaaccacugcgggaccaucgccaacggcguccugcagaccuucaugcggauggcguggggcggguccuacaucgcccuggacagcggcaagggguccugggacugcaucaugacgagcuaccaguaccucaucauccagaacaccaccugggaggaccacugccaguucucccgccccagccccaucggcuaccuggggcugcucagccagcggacccgcgacaucuacaucucccggcgccugcugggcacguucaccuggacccucagcgacuccgagggcaacgagacccccgggggcuacugccugacgcgguggaugcugaucgaggccgagcucaagugcuucgggaacaccgccguggccaagugcaacgagaagcacgacgaggaguucugcgacaugcugcgccuguucgacuucaacaagcaggcgauccggcgccucaagaccgaggcccagaugagcauccagcugaucaacaaggccgugaacgcccugaucaacgaccagcucaucaugaagaaccaccuccgggacaucaugggcaucccguacugcaacuacuccaaguacugcuaccugaaccacaccgucacggggaagaccagccugccccgcugcugccugguguccaacggcagcuaccugaacgagacccacuucuccgacgacaucgagcagcaggccgacaacaugaucaccgagcuccugcagaaggaguacaucgaccggcagggcaagacgccccuggggcugguggaccucuucgucuucagcaccuccuucuaccugaucagcaucuuccugcaccucgugaagaucccgacccaccgccacgugaucggcaagcccugccccaagccccaccggcugaaccacauggggaucugcuccugcggccuguacaagcacccggggguccccgugaaguggaagcgcugaggacuagucccuguucccagagcccacuuuuuuuucuuuuuuugaaauaaaauagccugucuuucagaucucaaaggcucuuuucagagccaccaaaaaaaaaaaaaaaaaaaaaaaaaaaaaaaaaaaaaaaaaaaaaaaaaaaaaaaaaaaaaaaaagaauu

SEQ ID NO: 38419 - RNA, 1714 nt, Artificial Sequence
  mRNA product Design a-1 (hSL-A64-N5) comprising derived and/or modified sequence from LASV(LASV003-NIG-2008;Clade II)__AIT17580__GPCmut11 (opt1)
aggagagucccgcagucggcguccagcggcucugcuuguucgugugugugucguugcaggccuuauucaagcuuaccaugggccagaucaucaccuucuuccaggaggugccccacgucaucgaggaggugaugaacaucgugcugaucgcccucagccugcuggccauccucaaggggaucuacaacgucgcgaccugcggccuguucgggcugguguccuuccuccugcugugcggccgcagcugcuccacgaccuacaaggggguguacgagcuccagacccuggagcuggacauggccagccucaacaugaccaugccgcuguccugcacgaagaacaacagccaccacuacaucauggucggcaacgagaccggccuggagcucacccugaccaacacguccaucaucaaccacaaguucugcaaccugagcgacgcccacaagaagaaccucuacgaccacgcccugauguccaucaucagcaccuuccaccuguccauccccaacuucaaccaguacgaggccaugagcugcgacuucaacgggggcaagaucuccgugcaguacaaccucagccacaccuacgcgguggacgccgccaaccacugcgggaccaucgccaacggcguccugcagacguucaugcggauggcguggggcggguccuacaucgcccuggacagcggcaagggguccugggacugcaucaugaccagcuaccaguaccucaucauccagaacaccaccugggaggaccacugccaguucucccgccccagccccaucggcuaccuggggcugcucagccagcggacgcgcgacaucuacaucucccggcgccugcugggcaccuucaccuggacccucagcgacuccgagagcaacgagacgccgggcggguacugccugacccgguggaugcugaucgaggccgagcucaagugcuucggcaacaccgccguggccaagugcaacgagaagcacgacgaggaguucugcgacaugcugcgccuguucgacuucaacaagcaggcgauccggcgccucaaggccgaggcccagauguccauccagcugaucaacaaggccgugaacgcccugaucaacgaccagcucaucaugaagaaccaccuccgggacaucauggggauccccuacugcaacuacagcaaguacugcuaccugaaccacaccgucacgggccgcaccucccugccccggugcugccuggugagcaacggguccuaccugaacgagacccacuucagcgacgacaucgagcagcaggcggacaacaugaucaccgagcuccugcagaaggaguacauggaccgccagggcaagacgccccugggccugguggaccucuucgucuucuccaccagcuucuaccugaucuccaucuuccugcaccucgugaagaucccgacccaccggcacgugaucgggaagcccugccccaagccccaccgccugaaccacaugggcaucugcagcugcgggcuguacaagcacccgggcguccccgugaaguggaagcggugaggacuagucccuguucccagagcccacuuuuuuuucuuuuuuugaaauaaaauagccugucuuucagaucucaaaggcucuuuucagagccaccaaaaaaaaaaaaaaaaaaaaaaaaaaaaaaaaaaaaaaaaaaaaaaaaaaaaaaaaaaaaaaaaagaauu

SEQ ID NO: 38420 - RNA, 1714 nt, Artificial Sequence
  mRNA product Design a-1 (hSL-A64-N5) comprising derived and/or modified sequence from LASV(LASV035-NIG-2009;Clade II)__AIT17588__GPCmut11 (opt1)
aggagagucccgcagucggcguccagcggcucugcuuguucgugugugugucguugcaggccuuauucaagcuuaccaugggccagaucaucaccuucuuccaggaggugccccacgucaucgaggaggugaugaacaucgugcugaucgcccucagccugcuggccauccucaaggggaucuacaacgucgcgaccugcggccuguucgggcugguguccuuccuccugcugugcggccgcagcugcuccacgaccuacaaggggguguacgagcuccagacccuggagcuggacauggccagccucaacaugaccaugccgcuguccugcacgaagaacaacagccaccacuacaucauggucggcaacgagaccggccuggagcucacccugaccaacacguccaucaucaaccacaaguucugcaaccugagcgacgcccacaagaagaaccucuacgaccacgcccugauguccaucaucagcaccuuccaccuguccauccccaacuucaaccaguacgaggccaugagcugcgacuucaacgggggcaagaucuccgugcaguacaaccucagccacgcguacgccguggacgccgccaaccacugcgggaccaucgcgaacggcguccugcagaccuucaugcggauggccuggggcggguccuacaucgcccuggacagcggcaagggguccugggacugcaucaugacgagcuaccaguaccucaucauccagaacaccaccugggaggaccacugccaguucucccgccccagccccaucggcuaccuggggcugcucagccagcggacccgcgacaucuacaucucccggcgccugcugggcacguucaccuggacccucagcgacuccgagggcaacgagacccccgggggcuacugccugacgcgguggaugcugaucgaggccgagcucaagugcuucgggaacaccgccguggcgaagugcaacgagaagcacgacgaggaguucugcgacaugcugcgccuguucgacuucaacaagcaggccauccggcgccucaaggccgaggcccagaugagcauccagcugaucaacaaggccgugaacgcgcugaucaacgaccagcucaucaugaagaaccaccuccgggacaucaugggcauccccuacugcaacuacuccaaguacugcuaccugaaccacaccgucaccgggaagacgagccugccccgcugcugccugguguccaacggcagcuaccugaacgagacccacuucuccgacgacaucgagcagcaggccgacaacaugaucaccgagcuccugcagaaggaguacaucgaccggcagggcaagaccccgcuggggcugguggaccucuucgucuucagcacguccuucuaccugaucagcaucuuccugcaccucgugaagaucccgacccaccgccacgugaucggcaagcccugccccaagccccaccggcugaaccacauggggaucugcuccugcggccuguacaagcacccggggguccccgugaaguggaagcgcugaggacuagucccuguucccagagcccacuuuuuuuucuuuuuuugaaauaaaauagccugucuuucagaucucaaaggcucuuuucagagccaccaaaaaaaaaaaaaaaaaaaaaaaaaaaaaaaaaaaaaaaaaaaaaaaaaaaaaaaaaaaaaaaaagaauu

SEQ ID NO: 38421 - RNA, 1714 nt, Artificial Sequence
  mRNA product Design a-1 (hSL-A64-N5) comprising derived and/or modified sequence from LASV(LASV1000-NIG-2009;Clade II)__AIT17782__GPCmut11 (opt1)
aggagagucccgcagucggcguccagcggcucugcuuguucgugugugugucguugcaggccuuauucaagcuuaccaugggccagaucaucaccuucuuccaggaggugccccacgucaucgaggaggugaugaacaucgugcugaucgcccucagccugcuggccauccucaaggggaucuacaacgucgcgaccugcggccuguucgggcugguguccuuccuccugcugugcggccgcagcugcuccacgaccuacaaggggguguacgagcuccagacccuggagcuggacauggccagccucaacaugaccaugccgcuguccugcacgaagaacaacagccaccacuacaucauggucggcaacgagaccggccuggagcucacccugaccaacacguccaucaucaaccacaaguucugcaaccugagcgacgcccacaagaagaaccucuacgaccacgcccugauguccaucaucagcaccuuccaccuguccauccccaacuucaaccaguacgaggccaugagcugcgacuucaacgggggcaagaucuccgugcaguacaaccucagccacaccuacgcgguggacgccgccaaccacugcgggaccaucgccaacggcguccugcagacguucaugcggauggcguggggcggguccuacaucgcccuggacagcggcaagggguccugggacugcaucaugaccagcuaccaguaccucaucauccagaacaccaccugggaggaccacugccaguucucccgccccagccccaucggcuaccuggggcugcucagccagcggacgcgcgacaucuacaucucccggcgccugcugggcaccuucaccuggacccucagcgacuccgagggcaacgagacgcccgggggcuacugccugacccgguggaugcugaucgaggccgagcucaagugcuucgggaacaccgccguggccaagugcaacgagaagcacgacgaggaguucugcgacaugcugcgccuguucgacuucaacaagcaggcgaucaagcggcucaagaccgaggcccagaugagcauccagcugaucaacaaggccgugaacgcccugaucaacgaccagcucaucaugaagaaccaccuccgcgacaucaugggcauccccuacugcaacuacuccaaguacugcuaccugaaccacacggucaccgggaagaccagccugccccggugcugccugguguccaacggcagcuaccugaacgagacccacuucuccgacgacaucgagcagcaggccgacaacaugaucacggagcuccugcagaaggaguacaucgaccgccagggcaagaccccgcuggggcugguggaccucuucgucuucagcaccuccuucuaccugaucagcaucuuccugcaccucgugaagaucccgacccaccggcacguggucggcaagcccugccccaagccccaccgccugaaccacauggggaucugcuccugcggccuguacaagcacccgggggugcccgugaaguggaagcggugaggacuagucccuguucccagagcccacuuuuuuuucuuuuuuugaaauaaaauagccugucuuucagaucucaaaggcucuuuucagagccaccaaaaaaaaaaaaaaaaaaaaaaaaaaaaaaaaaaaaaaaaaaaaaaaaaaaaaaaaaaaaaaaaagaauu

SEQ ID NO: 38422 - RNA, 1714 nt, Artificial Sequence
  mRNA product Design a-1 (hSL-A64-N5) comprising derived and/or modified sequence from LASV(LASV221-NIG-2010;Clade II)__AIT17624__GPCmut11 (opt1)
aggagagucccgcagucggcguccagcggcucugcuuguucgugugugugucguugcaggccuuauucaagcuuaccaugggccagaucaucaccuucuuccaggaggugccccacgucaucgaggaggugaugaacaucgugcugaucgcccucagccugcuggccauccucaaggggaucuacaacgucgcgaccugcggccuguucgggcugguguccuuccuccugcugugcggccgcagcugcuccacgaccuacaaggggguguacgagcuccagacccuggagcuggacauggccagccucaacaugaccaugccgcuguccugcacgaagaacaacagccaccacuacaucauggucggcaacgagaccggccuggagcucacccugaccaacacguccaucaucaaccacaaguucugcaaccugagcgacgcccacaagaagaaccucuacgaccacgcccugauguccaucaucagcaccuuccaccuguccauccccaacuucaaccaguacgaggccaugagcugcgacuucaacgggggcaagaucuccgugcaguacaaccucagccacaccuacgcgaucgacgccgccaaccacugcgggaccaucgccaacggcgugcugcagacguucaugcggauggcguggggcggguccuacaucgcccuggacagcggcaagggguccugggacugcaucaugaccagcuaccaguaccucaucauccagaacaccaccugggaggaccacugccaguucucccgccccagccccaucggcuaccuggggcugcucagccagcggacgcgcgacaucuacaucucccggcgccugcugggcaccuucaccuggacccucagcgacuccgagggcaacgagacgcccgggggcuacugccugacccgguggaugcugaucgaggccgagcucaagugcuucgggaacaccgccgucgccaagugcaacgagaagcacgacgaggaguucugcgacaugcugcgccuguucgacuucaacaagcaggcgauccggcgccucaagaccgaggcccagaugagcauccagcugaucaacaaggccgugaacgcccugaucaacgaccagcucaucaugaagaaccaccuccgggacaucaugggcauccccuacugcaacuacuccaaguacugcuaccugaaccacacggugaccgggaagaccagccugccccgcugcugccuggucuccaacggcagcuaccugaacgagacccacuucuccgacgacaucgagcagcaggccgacaacaugaucacggagaugcuccagaaggaguacauggaccggcagggcaagaccccgcuggggcugguggaccuguucguguucagcaccuccuucuaccucaucagcaucuuccugcaccuggucaagaucccgacccaccgccacgugaucggcaagcccugccccaagccccaccggcucaaccacauggggaucugcuccugcggccuguacaagcacccgggggugcccgucaaguggaagcgcugaggacuagucccuguucccagagcccacuuuuuuuucuuuuuuugaaauaaaauagccugucuuucagaucucaaaggcucuuuucagagccaccaaaaaaaaaaaaaaaaaaaaaaaaaaaaaaaaaaaaaaaaaaaaaaaaaaaaaaaaaaaaaaaaagaauu

SEQ ID NO: 38423 - RNA, 1714 nt, Artificial Sequence
  mRNA product Design a-1 (hSL-A64-N5) comprising derived and/or modified sequence from LASV(LASV237-NIG-2010;Clade II)__AIT17638__GPCmut11 (opt1)
aggagagucccgcagucggcguccagcggcucugcuuguucgugugugugucguugcaggccuuauucaagcuuaccaugggccagaucaucaccuucuuccaggaggugccccacgucaucgaggaggugaugaacaucgugcugaucgcccucagccugcuggccauccucaaggggaucuacaacgucgcgaccugcggccuguucgggcugguguccuuccuccugcugugcggccgcagcugcuccacgaccuacaaggggguguacgagcuccagacccuggagcuggacauggccagccucaacaugaccaugccgcuguccugcacgaagaacaacagccaccacuacaucauggucggcaacgagaccggccuggagcucacccugaccaacacguccaucaucaaccacaaguucugcaaccugagcgacgcccacaagaaggaccucuacgaccacgcccugauguccaucaucagcaccuuccaccuguccauccccaacuucaaccaguacgaggccaugagcugcgacuucaacgggggcaagaucuccgugcaguacaaccucagccacaccuacgcgguggacgccgccaaccacugcgggaccaucgccaacggcguccugcagacguucaugcggauggcguggggcggguccuacaucgcccuggacagcggcaagggguccugggacugcaucaugaccagcuaccaguaccucaucauccagaacaccaccugggaggaccacugccaguucucccgccccagccccaucggcuaccuggggcugcucagccagcggacgcgcgacaucuacaucucccggcgccugcugggcaccuucaccuggacccucagcgacuccgagggcaacgagacgcccgggggcuacugccugacccgguggaugcugaucgaggccgagcucaagugcuucgggaacaccgccguggccaagugcaacgagaagcacgacgaggaguucugcgacaugcugcgccuguucgacuucaacaagcaggcgauccggcgccucaagaccgaggcccagaugagcauccagcugaucaacaaggccgugaacgcccugaucaacgaccagcucaucaugaagaaccaccuccgggacaucaugggcauccccuacugcaacuacuccaaguacugcuaccugaaccacacggucaccgggaagaccagccugccccgcugcugccugguguccaacggcagcuaccugaacgagacccacuucuccgacgacaucgagcagcaggccgacaacaugaucacggagcuccugcagaaggaguacauggaccggcagggcaagaccccgcuggggcugguggaccucuucgucuucagcaccuccuucuaccugaucagcaucuuccugcaccucaucaagaucccgacccaccgccacaucacgggcaagcccugccccaagccccaccggcugaaccacauggggaucugcuccugcggccuguacaagcacccgggggugcccgugaaguggaagcgcugaggacuagucccuguucccagagcccacuuuuuuuucuuuuuuugaaauaaaauagccugucuuucagaucucaaaggcucuuuucagagccaccaaaaaaaaaaaaaaaaaaaaaaaaaaaaaaaaaaaaaaaaaaaaaaaaaaaaaaaaaaaaaaaaagaauu

SEQ ID NO: 38424 - RNA, 1714 nt, Artificial Sequence
  mRNA product Design a-1 (hSL-A64-N5) comprising derived and/or modified sequence from LASV(LASV253-NIG-2011;Clade II)__AIT17670__GPCmut11 (opt1)
aggagagucccgcagucggcguccagcggcucugcuuguucgugugugugucguugcaggccuuauucaagcuuaccaugggccagaucaucaccuucuuccaggaggugccccacgucaucgaggaggugaugaacaucgugcugaucgcccucagccugcuggccauccucaaggggaucuacaacgucgcgaccugcggccuguucgggcugguguccuuccuccugcugugcggccgcagcugcuccacgaccuacaaggggguguacgagcuccagacccuggagcuggacauggccagccucaacaugaccaugccgcuguccugcacgaagaacaacagccaccacuacaucauggucggcaacgagaccggccuggagcucacccugaccaacacguccaucaucaaccacaaguucugcaaccugagcgacgcccacaagaagaaccucuacgaccacgcccugauguccaucaucagcaccuuccaccuguccauccccaacuucaaccaguacgaggccaugagcugcgacuucaacgggggcaagaucuccgugcaguacaaccucagccacaccuacgcgguggacgccgccaaccacugcgggaccaucgccaacggcguccugcagacguucaugcggauggcguggggcggguccuacaucgcccuggacagcggcaagggguccugggacugcaucaugaccagcuaccaguaccucaucauccagaacaccaccugggaggaccacugccaguucucccgccccagccccaucggcuaccuggggcugcucagccagcggacgcgcgacaucuacaucucccggcgccugcugggcaccuucaccuggacccucagcgacuccgagggcaacgagacgcccgggggcuacugccugacccgguggaugcugaucgaggccgagcucaagugcuucgggaacaccgccguggccaagugcaacgagaagcacgacgaggaguucugcgacaugcugcgccuguucgacuucaacaagcaggcgauccggcgccucaaggccgaggcccagaugagcauccagcugaucaacaaggccgugaacgcccugaucaacgaccagcucaucaugaagaaccaccuccgggacaucaugggcaucccguacugcaacuacuccaaguacugcuaccugaaccacaccgucacggggcgcaccagccugccccggugcugccugguguccaacggcagcuaccugaacgagacccacuucuccgacgacaucgagcagcaggcggacaacaugaucaccgagcuccugcagaaggaguacaucgaccgccagggcaagacgccccuggggcugguggaccucuucgucuucagcaccuccuucuaccugaucagcaucuuccugcaccucgugaagaucccgacccaccggcacaucaucggcaagcccugccccaagccccaccgccugaaccacauggggaucugcuccugcggccuguacaagcacccgggggugcccgucaaguggaagcggugaggacuagucccuguucccagagcccacuuuuuuuucuuuuuuugaaauaaaauagccugucuuucagaucucaaaggcucuuuucagagccaccaaaaaaaaaaaaaaaaaaaaaaaaaaaaaaaaaaaaaaaaaaaaaaaaaaaaaaaaaaaaaaaaagaauu

SEQ ID NO: 38425 - RNA, 1714 nt, Artificial Sequence
  mRNA product Design a-1 (hSL-A64-N5) comprising derived and/or modified sequence from LASV(LASV254-NIG-2011;Clade II)__AIT17674__GPCmut11 (opt1)
aggagagucccgcagucggcguccagcggcucugcuuguucgugugugugucguugcaggccuuauucaagcuuaccaugggccagaucaucaccuucuuccaggaggugccccacgucaucgaggaggugaugaacaucgugcugaucgcccucagccugcuggccauccucaaggggaucuacaacgucgcgaccugcggccuguucgggcugguguccuuccuccugcugugcggccgcagcugcuccacgaccuacaaggggguguacgagcuccagacccuggagcuggacaugaccaaccucaacaugacgaugccgcugagcugcaccaagaacaacucccaccacuacaucauggucggcaacgagaccggccuggagcucacccugacgaacaccagcaucaucaaccacaaguucugcaaccuguccgacgcccacaagaagaaccucuacaaccacgcccugaugagcaucaucuccaccuuccaccugagcauccccaacuucaaccaguacgaggccauguccugcgacuucaacgggggcaagaucagcgugcaguacaaccucucccacagcuacgccguggacgcggccaaccacugcgggaccaucgccaacggcguccugcagacguucaugcggauggccuggggcggguccuacaucgcgcuggacagcggcaaggggaacugggacugcaucaugaccuccuaccaguaccucaucauccagaacaccaccugggaggaccacugccaguucagccgccccucccccaucggcuaccuggggcugcucagccagcggacgcgcgacaucuacaucagccggcgccugcugggcaccuucaccuggacccucuccgacagcgagggcaacgagacgcccgggggcuacugccugacccgguggaugcugaucgaggccgagcucaagugcuucgggaacaccgccguggccaagugcaacgagaagcacgacgaggaguucugcgacaugcugcgccuguucgacuucaacaagcaggccauccggcgccucaagaccgaggcgcaggccaacauccagcugaucaacaaggccgugaacgcccugaucaacgaccagcucaucaugaagaaccaccuccgggacaucaugggcauccccuacugcaacuacuccaaguacugcuaccugaaccacacggucaccgggaagaccagccugccccgcugcugccugguguccaacggcagcuaccugaacgagacccacuucuccgacgacaucgagcagcaggccgacaacaugaucacggagcuccugcagaaggaguacauggaccggcagggcaagaccccgcuggggcugguggaccucuucgucuucagcaccuccuucuaccugaucagcaucuuccugcaccucgugaagaucccgacccaccgccacgugaucggcaagcccugccccaagccccaccggcugaaccacauggggaucugcuccugcggccuguacaagcacccggggguccccgugaaguggaagcgcugaggacuagucccuguucccagagcccacuuuuuuuucuuuuuuugaaauaaaauagccugucuuucagaucucaaaggcucuuuucagagccaccaaaaaaaaaaaaaaaaaaaaaaaaaaaaaaaaaaaaaaaaaaaaaaaaaaaaaaaaaaaaaaaaagaauu

SEQ ID NO: 38426 - RNA, 1714 nt, Artificial Sequence
  mRNA product Design a-1 (hSL-A64-N5) comprising derived and/or modified sequence from LASV(Nig08-A19;Clade III)__ADU56618__GPCmut11 (opt1)
aggagagucccgcagucggcguccagcggcucugcuuguucgugugugugucguugcaggccuuauucaagcuuaccaugggccagaucgugaccuucuuccaggaggucccccacgugaucgaggaggugaugaacaucguccugaucgcccucagcauccuggccauccugaaggggcucuacaacaucgcgaccugcggccugaucgggcuggugacguuccuccugcuguccggccgcagcugcuccaugaccuacaaggggguguacgagcuccagacccuggagcugaacaugaacacccucaacaugacgaugccgcugagcugcaccaagaacaacucccaccacuacaucauggucggcaacgagaccggccuggagcucacccugacgaacaccagccugcuccaccacaaguucugcaaccuguccgacgcccacaagaagaaccuguacgaccacacccucaugagcaucaucuccaccuuccaccugagcauccccaacuucaaccaguacgaggccauguccugcgacuucaacgggggcaagaucacggugcaguacaaccugagccacuccuacgccaucgacgccgcgaaccacugcgggaccguggccaacggcguccuccagaccuucaugcggauggccuggggcgggagcuacaucgcccuggacuccggccgcgggaagugggacugcaucaugaccagcuaccaguaccugaucauccagaacacgaccugggaggaccacugccaguucucccggcccagccccaucggcuaccucgggcugcugucccagcgcacccgggacaucuacaucagccgccggcuccugggcaccuucacguggacccugagcgacuccgagggcaacgagacccccgggggcuacugccucacccgcuggaugcugaucgaggcggagcugaagugcuucgggaacacggccguggccaagugcaacgagaagcacgacgaggaguucugcgacaugcuccggcuguucgacuucaacaagcaggccauccgccggcugaaggccgaggcgcagaugagcauccagcucaucaacaaggccgugaacgcccugaucaacgaccagcugaucaugaagaaccaccuccgcgacaucaugggcauccccuacugcaacuacuccaaguacugcuaccugaaccacaccagcaccgggcggaccucccugccccgcugcugccucgucagcaacggcuccuaccugaacgagacgcacuucagcgacgacaucgagcagcaggccgacaacaugaucaccgagaugcugcagaaggaguaccuggaccggcagggcaagaccccgcucgggcugguggaccuguucguguucuccaccagcuucuaccucaucuccaucuuccugcaccuggucaagaucccgacgcaccgccacaucgugggcaagcccugccccaagccccaccggcucaaccacauggggaucugcagcugcggccuguacaagcagccgggggugcccguccgcuggaagcggugaggacuagucccuguucccagagcccacuuuuuuuucuuuuuuugaaauaaaauagccugucuuucagaucucaaaggcucuuuucagagccaccaaaaaaaaaaaaaaaaaaaaaaaaaaaaaaaaaaaaaaaaaaaaaaaaaaaaaaaaaaaaaaaaagaauu

SEQ ID NO: 38427 - RNA, 1717 nt, Artificial Sequence
  mRNA product Design a-1 (hSL-A64-N5) comprising derived and/or modified sequence from LASV(G1180-SLE-2010;Clade IV)__AIT17168__GPCmut11 (opt1)
aggagagucccgcagucggcguccagcggcucugcuuguucgugugugugucguugcaggccuuauucaagcuuaccaugggccagaucgugaccuucuuccaggaggucccccacgugaucgaggaggugaugaacaucguccugaucgcccucagcauccuggccgugcugaaggggcucuacaacuucgcgaccugcggccugguggggcugcucaccuuccugcugcucugcggccgcuccugcaccgccagccgguacaagggggucuacgagcugcagacccuggagcucaacauggagacccugaacaugacgaugccgcuguccugcaccaagaacaacagccaccacuacaucauggugggcaacgagaccggccucgagcugacccugacgaacaccuccaucaucaaccacaaguucugcaaccucagcgacgcccacaagaagaaccuguacgaccacgcccugauguccaucaucagcaccuuccaccucuccauccccaacuucaaccaguacgaggccaugagcugcgacuucaacgggggcaagaucuccgugcaguacaaccugagccacuccuacgcgggggacgccgccaaccacugcggcaccgucgccaacggggugcugcagacguucaugcgcauggcguggggcggcagcuacaucgcccucgacuccgggcacggcagcugggacugcaucaugaccuccuaccaguaccugaucauccagaacaccaccugggaggaccacugccaguucagccggcccucccccaucggguaccugggccuccugagccagcgcacgcgggacaucuacaucagccgccggcugcucggcaccuucaccuggacccuguccgacagcgaggggaaggacacgccgggcggguacugccugacccgcuggaugcucaucgaggccgagcugaagugcuucggcaacaccgccguggccaagugcaacgagaagcacgacgaggaguucugcgacaugcugcggcuguucgacuucaacaagcaggcgauccagcgccugaaggccgaggcccagauguccauccagcugaucaacaaggccgucaacgcccucaucaacgaccagcugaucaugaagaaccaccuccgggacaucauggggauccccuacugcaacuacagcaaguacugcuaccucaaccacaccacgaccggcaagaccucccugcccaagugcugccuggugagcaacggcuccuaccucaacgagacccacuucagcgacgacaucgagcagcaggcggacaacaugaucacggagaugcugcagaaggaguacauggagcgccaggggaagacgccccugggccugguggaccucuucgucuucuccaccagcuucuaccugaucuccaucuuccugcaccucgugaagaucccgacccaccggcacaucgugggcaagagcugccccaagccccaccgccugaaccacauggggaucugcuccugcgggcuguacaagcagcccggcgucccggugaaguggaagcggugaggacuagucccuguucccagagcccacuuuuuuuucuuuuuuugaaauaaaauagccugucuuucagaucucaaaggcucuuuucagagccaccaaaaaaaaaaaaaaaaaaaaaaaaaaaaaaaaaaaaaaaaaaaaaaaaaaaaaaaaaaaaaaaaagaauu

SEQ ID NO: 38428 - RNA, 1717 nt, Artificial Sequence
  mRNA product Design a-1 (hSL-A64-N5) comprising derived and/or modified sequence from LASV(G1442-SLE-2011;Clade IV)__AIT17180__GPCmut11 (opt1)
aggagagucccgcagucggcguccagcggcucugcuuguucgugugugugucguugcaggccuuauucaagcuuaccaugggccagaucgugaccuucuuccaggaggucccccacgugaucgaggaggugaugaacaucguccugaucgcccucagcauccuggccgugcugaaggggcucuacaacguggcgaccugcggccugaucgggcuggucacguuccuccugcugugcggccgcuccugcaccaccacccucuacaaggggguguacgagcugcagacgcuggagcucaacauggagacccugaacaugaccaugccgcugagcugcaccaagaacaacucccaccacuacauccgggugggcaacgagacgggccucgagcugacccugaccaacaccagcaucaucaaccacaaguucugcaaccucuccgacgcccacaagaagaaccuguacgaccacgcccugaugagcaucaucuccacguuccaccucagcauccccaacuucaaccaguacgaggccauguccugcgacuucaacgggggcaagaucagcguccaguacaaccugucccacagcuacgccggggacgcggccaaccacugcggcaccguggccaacggggugcugcagaccuucaugcgcauggccuggggcggcuccuacaucgcgcucgacagcgggcggggcaacugggacugcaucaugaccuccuaccaguaccugaucauccagaacacgaccugggacgaccacugccaguucagccgccccucccccaucggguaccugggccuccugagccagcggacccgcgacgucuacaucucccggcgccugcucggcaccuucacguggacccugagcgacagcgaggggaaggacaccccgggcggguacugccugacccgguggaugcucaucgaggccgagcugaagugcuucggcaacacggccguggccaagugcaacgagaagcacgacgaggaguucugcgacaugcugcgccucuucgacuucaacaagcaggccauccagcggcugaaggcggaggcccagauguccauccagcugaucaacaaggccgugaacgcccucaucaacgaccagcugaucaugaagaaccaccuccgcgacaucauggggauccccuacugcaacuacagcaaguacugcuaccugaacaacaccgccaccggcaagaccucccugcccaagugcugccugaucagcaacggcuccuaccucaacgagacgcacuucagcgacgacaucgagcaggaggcggacaacaugaucaccgagaugcugcagaaggaguacauggagcggcaggggaagacgccccugggccuggucgaccucuucguguucuccaccagcuucuaccugaucuccaucuuccugcaccucgugaagaucccgacccaccgccacaucgucggcaagagcugccccaagccccaccggcugaaccacauggggaucugcuccugcgggcuguacaagcagcccggcgugccggugcgcuggaagcggugaggacuagucccuguucccagagcccacuuuuuuuucuuuuuuugaaauaaaauagccugucuuucagaucucaaaggcucuuuucagagccaccaaaaaaaaaaaaaaaaaaaaaaaaaaaaaaaaaaaaaaaaaaaaaaaaaaaaaaaaaaaaaaaaagaauu

SEQ ID NO: 38429 - RNA, 1717 nt, Artificial Sequence
  mRNA product Design a-1 (hSL-A64-N5) comprising derived and/or modified sequence from LASV(G3010-SLE-2013;Clade IV)__AIT17344__GPCmut11 (opt1)
aggagagucccgcagucggcguccagcggcucugcuuguucgugugugugucguugcaggccuuauucaagcuuaccaugggccagaucgugaccuucuuccaggaggucccccacgugaucgaggaggugaugaacaucguccugaucgcccucagcauccuggccgugcugaaggggcucuacaacuucgcgaccugcggccugguggggcuggucacguuccuccugcugugcggccgcuccugcaccaccagccucuacaaggggguguacgagcugcagacccuggagcucaacauggagacgcugaacaugaccaugccgcuguccugcaccaagaacaacagccaccacuacaucauggugggcaacgagaccggccucgagcugacgcugaccaacaccuccaucaucaaccacaaguucugcaaccucagcgacgcccacaagaagaaccuguacaaccacgcccugauguccaucaucagcaccuuccaccucuccauccccaacuucaaccaguacgaggccaugagcugcgacuucaacgggggcaagaucuccguccaguacaaccugagccacuccuacgccggggacgcggccagccacugcggcacgguggccaacggggugcugcagaccuucaugcggauggccuggggcggcuccuacaucgcgcucgacagcggguacggcaagugggacugcaucaugaccuccuaccaguaccugaucauccagaacaccacgugggaggaccacugccaguucagccgccccucccccaucggguaccugggccuccugagccagcggacccgcgacaucuacaucagccggcgccugcucggcaccuucaccuggacgcuguccgacagcgaggggaaggacaccccgggcggguacugccugacccgguggaugcucaucgaggccgagcugaagugcuucggcaacaccgccgucgccaagugcaacgagaagcacgacgaggaguucugcgacaugcugcgccucuucgacuucaacaagcaggccauccagcggcugaagacggaggcgcagauguccauccagcugaucaacaaggccgugaacgcccucaucaacgaccagcugaucaugaagaaccaccuccgcgacaucauggggauccccuacugcaacuacagcaaguacugcuaccugaaccacaccaccaccggcaagacgucccugcccaagugcugccuggugagcaacggcuccuaccucaacgagacccacuucagcgacgacaucgagcagcaggccgacaacaugaucaccgagaugcugcagaaggaguacauggagcggcaggggaagacgccccugggccuggucgaccucuucguguucuccaccagcuucuaccugaucuccaucuuccugcaccucgugaagaucccgacccaccgccacaucgucggcaagagcugccccaagccccaccggcugaaccacauggggaucugcuccugcgggcuguacaagcagcccggcgugccggugcgcuggaagcggugaggacuagucccuguucccagagcccacuuuuuuuucuuuuuuugaaauaaaauagccugucuuucagaucucaaaggcucuuuucagagccaccaaaaaaaaaaaaaaaaaaaaaaaaaaaaaaaaaaaaaaaaaaaaaaaaaaaaaaaaaaaaaaaaagaauu

SEQ ID NO: 38430 - RNA, 1717 nt, Artificial Sequence
  mRNA product Design a-1 (hSL-A64-N5) comprising derived and/or modified sequence from LASV(G502-SLE-2009;Clade IV)__AIT17126__GPCmut11 (opt1)
aggagagucccgcagucggcguccagcggcucugcuuguucgugugugugucguugcaggccuuauucaagcuuaccaugggccagaucgugaccuucuuccaggaggucccccacgugaucgaggaggugaugaacaucguccugaucgcccucagcauccuggccgugcugaaggggcucuacaacuucgcgaccugcggccugguggggcugcucacguuccugcugcucugcggccgcuccugcaccaccgggcuguacaagggcgucuacgagcugcagacccucgagcugaacauggagacgcugaacaugaccaugccgcucagcugcaccaagaacaacucccaccacuacaucauggugggcaacgagaccgggcuggagcugacgcucaccaacaccagcaucaucaaccacaaguucugcaaccuguccgacgcccacaagaagaaccuguacgaccacgcccucaugagcaucaucuccaccuuccaccugagcauccccaacuucaaccaguacgaggccauguccugcgacuucaacggcgggaagaucagcgugcaguacaaccugucccacagcuacgccggcgacgcggccgaccacugcgggacggucgccaacggcgugcuccagaccuucaugcggauggccuggggcggguccuacaucgcgcuggacagcggccgcgggcggugggacugcaucaugaccuccuaccaguaccugaucauccagaacaccacgugggaggaccacugccaguucagccgccccucccccaucggcuaccucggccugcugagccagcggacccgcgacaucuacaucucccggcgccuccuggggaccuucaccuggacgcugagcgacagcgagggcaaggacacccccgggggcuacugccucacccgguggaugcugaucgaggccgagcugaagugcuucgggaacaccgccguggccaagugcaacgagaagcacgacgaggaguucugcgacaugcuccgccuguucgacuucaacaagcaggccauccagcggcugaaggcggaggcccagauguccauccagcucaucaacaaggccgucaacgcccugaucaacgaccagcuggugaugaagaaccaccuccgcgacaucaugggcauccccuacugcaacuacagccgguacugcuaccugaaccacacgaccaccggccgcaccucccugcccaagugcugccucgugagcaacggguccuaccugaacgagacgcacuucagcgacgacaucgagcagcaggccgacaacaugaucaccgagaugcugcagaaggaguacauggagcggcagggcaagaccccgcuggggcucgucgaccuguucguguucuccaccagcuucuaccugaucuccaucuuccuccaccuggugaagaucccgacgcaccgccacaucgucggcaagagcugccccaagccccaccggcugaaccacauggggaucugcuccugcggccucuacaagcagcccggcgugccggugaaguggaagcgcugaggacuagucccuguucccagagcccacuuuuuuuucuuuuuuugaaauaaaauagccugucuuucagaucucaaaggcucuuuucagagccaccaaaaaaaaaaaaaaaaaaaaaaaaaaaaaaaaaaaaaaaaaaaaaaaaaaaaaaaaaaaaaaaaagaauu

SEQ ID NO: 38431 - RNA, 1717 nt, Artificial Sequence
  mRNA product Design a-1 (hSL-A64-N5) comprising derived and/or modified sequence from LASV(G733-SLE-2010;Clade IV)__AIT17154__GPCmut11 (opt1)
aggagagucccgcagucggcguccagcggcucugcuuguucgugugugugucguugcaggccuuauucaagcuuaccaugggccagaucgugaccuucuuccaggaggucccccacgugaucgaggaggugaugaacaucguccugaucgcccucagcauccuggccgugcugaaggggcucuacaacuucgcgaccugcggcaucguggggcuggucuccuuccugcuccugugcggccgcagcugcacgaccucccuguacaaggggguguacgagcuccagacccuggagcugaacauggagacccucaacaugacgaugccgcugagcugcaccaagaacaacucccaccacuacaucauggugggcaacgagaccggccuggagcucacccugacgaacaccagcaucaucaaccacaaguucugcaaccuguccgacgcccacaagaagaaccucuacgaccacgcccugaugagcaucaucuccaccuuccaccugagcauccccaacuucaaccaguacgaggccauguccugcgacuucaacgggggcaagaucagcguccaguacaaccucucccacagcuacgccggggacgcggccaaccacugcggcaccaucgccaacggggugcugcagacguucaugcggauggccuggggcggcuccuacaucgcgcuggacagcgggcgcgaccggugggacugcaucaugaccuccuaccaguaccucaucauccagaacaccaccugggaggaccacugccaguucagccgccccucccccaucggcuaccuggggcugcucagccagcggacgcgcgacaucuacaucagccggcgccugcugggcaccuucaccuggacccucuccgacagcgagggcaaggacacgcccgggggcuacugccugacccgguggaugcugaucgaggccgagcucaagugcuucgggaacaccgccguggccaagugcaacgagaagcacgacgaggaguucugcgacaugcugcgccuguucgacuucaacaagcaggccauccagcggcucaaggcggaggcccagauguccauccagcugaucaacaaggccgucaacgcccugaucaacgaccagcucaucaugaagaaccaccuccgcgacaucaugggcauccccuacugcaacuacagcaaguacugcuaccugaaccacaccacgaccgggaagaccucccugcccaagugcugccuggugagcaacggcuccuaccugaacgagacccacuucagcgacgacaucgagcagcaggccgacaacaugaucacggagaugcuccagaaggaguacauggagcggcagggcaagaccccgcuggggcugguggaccuguucgucuucuccaccagcuucuaccucaucuccaucuuccugcaccuggugaagaucccgacccaccgccacguggucggcaagagcugccccaagccccaccggcucaaccacauggggaucugcuccugcggccuguacgggcagcccggcgugccggugaaguggaagcgcugaggacuagucccuguucccagagcccacuuuuuuuucuuuuuuugaaauaaaauagccugucuuucagaucucaaaggcucuuuucagagccaccaaaaaaaaaaaaaaaaaaaaaaaaaaaaaaaaaaaaaaaaaaaaaaaaaaaaaaaaaaaaaaaaagaauu

SEQ ID NO: 38432 - RNA, 1717 nt, Artificial Sequence
  mRNA product Design a-1 (hSL-A64-N5) comprising derived and/or modified sequence from MOPV/LASV reassortant(IGS-1;Clade IV)__AFY05576__GPCmut11 (opt1)
aggagagucccgcagucggcguccagcggcucugcuuguucgugugugugucguugcaggccuuauucaagcuuaccaugggccagaucgugaccuucuuccaggaggucccccacgugaucgaggaggugaugaacaucguccugaucgcccucagcgugcuggccgugcugaaggggcucuacaacuucgcgaccugcggccuggucgggcuggugacguuccuccugcugugcggccgcuccugcaccaccagccucuacaaggggguguacgagcugcagacccuggagcucaacauggagacgcugaacaugaccaugccgcuguccugcaccaagaacaacagccaccacuacaucauggucggcaacgagaccggccucgagcugacgcugaccaacaccuccaucaucaaccacaaguucugcaaccucagcgacgcccacaagaagaaccuguacgaccacgcccugauguccaucaucagcaccuuccaccucuccauccccaacuucaaccaguacgaggccaugagcugcgacuucaacgggggcaagaucuccgugcaguacaaccugagccacuccuacgccggggacgcggccaaccacugcggcacgguggccaacgggguccugcagaccuucaugcggauggccuggggcggcagcuacaucgcgcucgacuccgggcgcggcaacugggacugcaucaugaccagcuaccaguaccugaucauccagaacaccacgugggaggaccacugccaguucucccggcccagccccaucggguaccugggccuccugucccagcgcacccgggacaucuacaucagccgccggcugcucggcaccuucaccuggacgcugagcgacuccgagggggaggacaccccgggcggguacugccugacccgcuggaugcucaucgaggccgagcugaagugcuucggcaacaccgccguggccaagugcaacgagaagcacgacgaggaguucugcgacaugcugcggcuguucgacuucaacaagcaggccauccagcgccugaaggcggaggcccagaugagcauccagcugaucaacaaggccgugaacgcccucaucaacgaccagcugaucaugaagaaccaccuccgggacaucauggggauccccuacugcaacuacuccaaguacugcuaccucaaccacacgaccaccggccgcaccagccugcccaagugcugccuggucuccaacggcagcuaccucaacgagacgcacuucuccgacgacaucgagcagcaggccgacaacaugaucaccgagaugcugcagaaggaguacauggagcggcaggggaagacgccccugggccugguggaccucuucguguucagcaccuccuucuaccugaucagcaucuuccugcaccucgucaagaucccgacccaccgccacaucguggggaaguccugccccaagccccaccggcugaaccacaugggcaucugcagcugcgggcuguacaagcagcccggcgugccggucaaguggaagcgcugaggacuagucccuguucccagagcccacuuuuuuuucuuuuuuugaaauaaaauagccugucuuucagaucucaaaggcucuuuucagagccaccaaaaaaaaaaaaaaaaaaaaaaaaaaaaaaaaaaaaaaaaaaaaaaaaaaaaaaaaaaaaaaaaagaauu

SEQ ID NO: 38433 - RNA, 1717 nt, Artificial Sequence
  mRNA product Design a-1 (hSL-A64-N5) comprising derived and/or modified sequence from LASV(LM765-SLE-2012;Clade IV)__AIT17814__GPCmut11 (opt1)
aggagagucccgcagucggcguccagcggcucugcuuguucgugugugugucguugcaggccuuauucaagcuuaccaugggccagaucgugaccuucuuccaggaggucccccacgugaucgaggaggugaugaacaucguccugaucgcccucagcauccuggccgugcugaaggggcucuacaacuucgcgaccugcggccugguggggcuggucacguuccuccugcugugcggccgcuccugcaccaccagccucuacaaggggguguacgagcugcagacccuggagcucaacauggagacgcugaacaugaccaugccgcuguccugcaccaagaacaacagccaccacuacaucauggugggcaacgagaccggccucgagcugacgcugaccaacaccuccaucaucgaccacaaguucugcaaccucagcgacgcccaccggaagaaccuguacgaccacgcccugauguccaucaucagcaccuuccaccucuccauccccaacuucaaccaguacgaggccaugagcugcgacuucaacgggggcaagaucuccguccaguacaaccugagccacuccuacgccaaggacgcggccgaccacugcgggacgguggccaacggcgugcugcagaccuucaugcgcauggccuggggcgggagcuacaucgcgcucgacuccggccgggggcgcugggacugcaucaugaccagcuaccaguaccugaucauccagaacaccacgugggaggaccacugccaguucucccggcccagccccaucggcuaccuggggcuccugucccagcgcacccgggacaucuacaucagccgccggcugcucggcaccuucaccuggacgcugagcgacuccgagggcaaggacacccccgggggcuacugccugacccgcuggaugcucaucgaggccgagcugaagugcuucgggaacaccgccgucgccaagugcaacgagaagcacgacgaggaguucugcgacaugcugcggcuguucgacuucaacaagcaggccauccagcgccugaaggcggaggcccagaugagcauccagcugaucaacaaggccgugaacgcccucaucaacgaccagcugaucaugaagaaccaccuccgggacaucaugggcauccccuacugcaacuacuccaaguacugcuaccucaaccacacgaccaccgggaagaccagccugcccaagugcugccugguguccaacggcagcuaccucaacgagacgcacuucuccgacgacaucgagcagcaggccgacaacaugaucaccgagaugcugcagaaggaguacauggagcgccagggcaagaccccgcuggggcuggucgaccucuucguguucagcaccuccuucuaccugaucagcaucuuccugcaccucgugaagaucccgacgcaccggcacaucgucggcaagcccugccccaagccccaccgccugaaccacauggggaucugcuccugcggccuguacaagcagccgggggugcccgugaaguggaagcggugaggacuagucccuguucccagagcccacuuuuuuuucuuuuuuugaaauaaaauagccugucuuucagaucucaaaggcucuuuucagagccaccaaaaaaaaaaaaaaaaaaaaaaaaaaaaaaaaaaaaaaaaaaaaaaaaaaaaaaaaaaaaaaaaagaauu

SEQ ID NO: 38434 - RNA, 1717 nt, Artificial Sequence
  mRNA product Design a-1 (hSL-A64-N5) comprising derived and/or modified sequence from LASV(LM776-SLE-2012;Clade IV)__AIT17824__GPCmut11 (opt1)
aggagagucccgcagucggcguccagcggcucugcuuguucgugugugugucguugcaggccuuauucaagcuuaccaugggccagaucgugaccuucuuccaggaggucccccacgugaucgaggaggugaugaacaucguccugaucgcccucagcauccuggccgugcugaaggggcucuacaacuucgcgaccugcggccugguggggcuggucacguuccuccugcugugcggccgcuccugcaccaccagcguguacaaggggguguacgagcuccagacccuggagcugaacauggagacgcucaacaugaccaugccgcuguccugcaccaagaacaacagccaccacuacaucauggucggcaacgagaccggccuggagcucacgcugaccaacaccuccaucaucaaccacaaguucugcaaccugagcgacgcccacaagaagaaccucuacgaccacgcccugauguccaucaucagcaccuuccaccuguccauccccaacuucaaccaguacgaggccaugagcugcgacuucaacgggggcaagaucuccgugcaguacaaccucagccacuccuacgccggggacgcggccaaccacugcggcacgguggccaacgggguccugcagaccuucaugcggauggccuggggcggcagcuacaucgcgcuggacuccgggcacggcaagugggacugcaucaugaccagcuaccaguaccucaucauccagaacaccacgugggaggaccacugccaguucucccgccccagccccaucggguaccugggccugcucucccagcggacccgcgacaucuacaucagccggcgccugcugggcaccuucaccuggacgcucagcgacuccgaggggaaggacaccccgggcggguacugccugacccgguggaugcugaucgaggccgagcucaagugcuucggcaacaccgccguggccaagugcaacgagaagcacgacgaggaguucugcgacaugcugcgccuguucgacuucaacaagcaggccauccagcggcucaaggcggaggcccagaugagcauccagcugaucaacaaggccgugaacgcccugaucaacgaccagcucaucaugaagaaccaccuccgcgacaucauggggauccccuacugcaacuacuccaaguacugcuaccugaaccacacgaccaccggcaagaccagccugcccaagugcugccuggucuccaacggcagcuaccugaacgagacgcacuucuccgacgacaucgagcagcaggccgacaacaugaucaccgagaugcuccagaaggaguacauggagcggcaggggaagacgccccugggccugguggaccuguucguguucagcaccuccuucuaccucaucagcaucuuccugcaccuggucaagaucccgacccaccgccacaucguggggaaguccugccccaagccccaccggcucaaccacaugggcaucugcagcugcgggcuguacaagcagcccggcgugccgguccgcuggaagcggugaggacuagucccuguucccagagcccacuuuuuuuucuuuuuuugaaauaaaauagccugucuuucagaucucaaaggcucuuuucagagccaccaaaaaaaaaaaaaaaaaaaaaaaaaaaaaaaaaaaaaaaaaaaaaaaaaaaaaaaaaaaaaaaaagaauu

SEQ ID NO: 38435 - RNA, 1717 nt, Artificial Sequence
  mRNA product Design a-1 (hSL-A64-N5) comprising derived and/or modified sequence from LASV(Mad39;Clade IV)__ANH09722__GPCmut11 (opt1)
aggagagucccgcagucggcguccagcggcucugcuuguucgugugugugucguugcaggccuuauucaagcuuaccaugggccagaucgugaccuucuuccaggaggucccccacgugaucgaggaggugaugaacaucguccugaucgcccucagcauccuggccgugcugaaggggcucuacaacguggcgaccugcggccugaucgggcuggucacguuccuccugcugugcggccgcuccugcaccaccacccucuacaaggggguguacgagcugcaggcccuggagcucaacauggagacgcugaacaugaccaugccgcugagcugcaccaagaacaacucccaccacuacauccgggugggcaacgagaccggccucgagcugacgcugaccaacaccagccucaucaaccacaaguucugcaaccuguccgacgcccacaagaagaaccuguacgaccacgcccucaugagcaucaucuccaccuuccaccugagcauccccaacuucaaccaguacgaggccauguccugcgacuucaacgacgggaagaucagcguccaguacaaccugucccacacguacgcgggcgacaccgccaaccacugcgggaccguggccaacggcgugcuccagaccuucaugcgcauggccuggggcgggagcuacaucgcgcuggacuccggccgcgggggcugggacugcaucaugacgagcuaccaguaccugaucauccagaacaccaccugggaggaccacugccaguucucccggcccagccccaucggguaccucggccugcugucccagcggacccgcgacaucuacaucagccggcgccuccugggcacguucaccuggacccuguccgacagcgaggggaaggacaccccgggcggguacugccucacgcgguggaugcugaucgaggccgagcugaagugcuucggcaacaccgccgucgccaagugcaacgagaagcacgacgaggaguucugcgacaugcuccgccuguucgacuucaacaagcaggccauccagcggcugaaggcggaggcccagaugagcauccagcucaucaacaaggccgugaacgcccugaucaacgaccagcugaucaugaagaaccaccuccgcgacaucauggggauccccuacugcaacuacuccaaguacugcuaccugaaccacaccgugaccggcaagacgagccugcccaagugcugccucgucuccaacggcagcuaccugaacgagacccacuucuccgacgacaucgagcagcaggccgacaacaugaucaccgagaugcugcagaaggaguacauggagcggcaggggaagacgccccugggccucguggaccuguucguguucagcaccuccuucuaccugaucagcaucuuccuccaccuggucaagaucccgacccaccgccacgugguggggaagcccugccccaagccccaccggcugaaccacaugggcaucugcuccugcggguucuacaagcagccgggcguccccgugcgcuggaagcggugaggacuagucccuguucccagagcccacuuuuuuuucuuuuuuugaaauaaaauagccugucuuucagaucucaaaggcucuuuucagagccaccaaaaaaaaaaaaaaaaaaaaaaaaaaaaaaaaaaaaaaaaaaaaaaaaaaaaaaaaaaaaaaaaagaauu

SEQ ID NO: 38436 - RNA, 1717 nt, Artificial Sequence
  mRNA product Design a-1 (hSL-A64-N5) comprising derived and/or modified sequence from LASV(Z0947-SLE-2011;Clade IV)__AIT17840__GPCmut11 (opt1)
aggagagucccgcagucggcguccagcggcucugcuuguucgugugugugucguugcaggccuuauucaagcuuaccaugggccagaucgugaccuucuuccaggaggucccccacgugaucgaggaggugaugaacaucguccugaucgcccucagcauccuggccgugcugaaggggcucuacaacuucgcgaccugcggccugguggggcuggucacguuccuccugcugugcggccgcuccugcaccaucagccucuacaaggggguguacgagcugcagacccuggagcucaacauggagacccugaacaugacgaugccgcuguccugcaccaagaacaacagccaccacuacaucauggugggcaacgagaccggccucgagcugacccugacgaacaccuccaucaucaaccacaaguucugcaaccucagcgacgcccacaagaagaaccuguacgaccacgcccugauguccaucaucagcaccuuccaccucuccauccccaacuucaaccaguacgaggccaugagcugcgacuucaacgggggcaagaucuccguccaguacaaccugagccacuccuacgccggggacgcggccaaccacugcggcaccguggccaacggggugcugcagacguucaugcggauggccuggggcggcagcuacaucgcgcucgacuccgggcgcgaccggugggacugcaucaugaccagcuaccaguaccugaucauccagaacaccaccugggaggaccacugccaguucucccgccccagccccaucggcuaccuggggcuccugucccagcggacgcgcgacaucuacaucagccggcgccugcucggcaccuucaccuggacccugagcgacuccgagggcaaggacacgcccgggggcuacugccugacccgguggaugcucaucgaggccgagcugaagugcuucgggaacaccgccgucgccaagugcaacgagaagcacgacgaggaguucugcgacaugcugcgccucuucgacuucaacaagcaggccauccagcggcugaaggcggaggcccagaugagcauccagcugaucaacaaggccgugaacgcccucaucaacgaccagcugaucaugaagaaccaccuccgcgacaucaugggcauccccuacugcaacuacuccaaguacugcuaccugaaccacaccacgaccgggaagaccagccugcccaagugcugccugguguccaacggcagcuaccucaacgagacccacuucuccgacgacaucgagcagcaggccgacaacaugaucacggagaugcugcagaaggaguacauggagcggcagggcaagaccccgcuggggcuggucgaccucuucguguucagcaccuccuucuaccugaucagcaucuuccugcaccucgugaagaucccgacccaccgccacaucgucggcaagcccugccccaagccccaccggcugaaccacauggggaucugcuccugcggccuguacaagcagccgggggugcccgugaaguggaagcgcugaggacuagucccuguucccagagcccacuuuuuuuucuuuuuuugaaauaaaauagccugucuuucagaucucaaaggcucuuuucagagccaccaaaaaaaaaaaaaaaaaaaaaaaaaaaaaaaaaaaaaaaaaaaaaaaaaaaaaaaaaaaaaaaaagaauu

SEQ ID NO: 38437 - RNA, 1717 nt, Artificial Sequence
  mRNA product Design a-1 (hSL-A64-N5) comprising derived and/or modified sequence from LASV(Josiah;Clade IV)__NP_694870__GPCmut11 (opt4)
aggagagucccgcagucggcguccagcggcucugcuuguucgugugugugucguugcaggccuuauucaagcuuaccaugggccagaucgugaccuucuuccaggaggugccccacgugaucgaggaggugaugaacaucgugcugaucgcccugagcgugcuggccgugcugaagggccuguacaacuucgccaccugcggccuggugggccuggugaccuuccugcugcugugcggcagaagcugcaccaccagccuguacaagggcguguacgagcugcagacccuggagcugaacauggagacccugaacaugaccaugccccugagcugcaccaagaacaacagccaccacuacaucauggugggcaacgagaccggccuggagcugacccugaccaacaccagcaucaucaaccacaaguucugcaaccugagcgacgcccacaagaagaaccuguacgaccacgcccugaugagcaucaucagcaccuuccaccugagcauccccaacuucaaccaguacgaggccaugagcugcgacuucaacggcggcaagaucagcgugcaguacaaccugagccacagcuacgccggcgacgccgccaaccacugcggcaccguggccaacggcgugcugcagaccuucaugagaauggccuggggcggcagcuacaucgcccuggacagcggcagaggcaacugggacugcaucaugaccagcuaccaguaccugaucauccagaacaccaccugggaggaccacugccaguucagcagacccagccccaucggcuaccugggccugcugagccagagaaccagagacaucuacaucagcagaagacugcugggcaccuucaccuggacccugagcgacagcgagggcaaggacacccccggcggcuacugccugaccagauggaugcugaucgaggccgagcugaagugcuucggcaacaccgccguggccaagugcaacgagaagcacgacgaggaguucugcgacaugcugagacuguucgacuucaacaagcaggccauccagagacugaaggccgaggcccagaugagcauccagcugaucaacaaggccgugaacgcccugaucaacgaccagcugaucaugaagaaccaccugagagacaucaugggcauccccuacugcaacuacagcaaguacugcuaccugaaccacaccaccaccggcagaaccagccugcccaagugcugccuggugagcaacggcagcuaccugaacgagacccacuucagcgacgacaucgagcagcaggccgacaacaugaucaccgagaugcugcagaaggaguacauggagagacagggcaagaccccccugggccugguggaccuguucguguucagcaccagcuucuaccugaucagcaucuuccugcaccuggugaagauccccacccacagacacaucgugggcaagagcugccccaagccccacagacugaaccacaugggcaucugcagcugcggccuguacaagcagcccggcgugcccgugaaguggaagagaugaggacuagucccuguucccagagcccacuuuuuuuucuuuuuuugaaauaaaauagccugucuuucagaucucaaaggcucuuuucagagccaccaaaaaaaaaaaaaaaaaaaaaaaaaaaaaaaaaaaaaaaaaaaaaaaaaaaaaaaaaaaaaaaaagaauu

SEQ ID NO: 38438 - RNA, 1714 nt, Artificial Sequence
  mRNA product Design a-1 (hSL-A64-N5) comprising derived and/or modified sequence from LASV(LP;Clade I)__AAF86701__GPCmut11 (opt4)
aggagagucccgcagucggcguccagcggcucugcuuguucgugugugugucguugcaggccuuauucaagcuuaccaugggccagaucaucaccuucuuccaggaggugccccacgugaucgaggaggugaugaacaucgugcugaucgcccugagccugcuggccauccugaagggccuguacaacaucgccaccugcggcaucaucggccugguggccuuccuguuccugugcggcaagagcugcagccugacccugaagggcggcuacgagcugcagacccuggagcugaacauggagacccugaacaugaccaugccccugagcugcaccaagaacagcagccaccacuacaucagagugggcaacgagaccggccuggagcugacccugaccaacaccagcaucaucaaccacaaguucugcaaccugagcgacgcccacaagaagaaccuguacgaccacgcccugaugagcaucaucagcaccuuccaccugagcauccccaacuucaaccaguacgaggccaugagcugcgacuucaacggcggcaagaucagcgugcaguacaaccugagccacagcuacgccggcgacgccgccgagcacugcggcaccguggccaacggcgugcugcagaccuucaugagaauggccuggggcggcagauacaucgcccuggacagcggcaagggcaacugggacugcaucaugaccagcuaccaguaccugaucauccagaacaccaccugggaggaccacugccaguucagcagacccagccccaucggcuaccugggccugcugagccagagaaccagagacaucuacaucagcagaagacugcugggcaccuucaccuggacccugagcgacagcgagggcaacgagacccccggcggcuacugccugaccagauggaugcugaucgaggccgagcugaagugcuucggcaacaccgccguggccaagugcaacgagaagcacgacgaggaguucugcgacaugcugagacuguucgacuucaacaagcaggccaucagaagacugaaggccgaggcccagaugagcauccagcugaucaacaaggccgugaacgcccugaucaacgaccagcugaucaugaagaaccaccugagagacaucaugggcauccccuacugcaacuacagcaaguacugcuaccugaaccacaccagcagcggcagaaccagccugcccaagugcugccugaucagcaacggcagcuaccugaacgagacccaguucagcgacgacaucgagcagcaggccgacaacaugaucaccgagaugcugcagaaggaguacaucgagagacagggcaagaccccccugggccugguggacaucuucaucuucagcaccagcuucuaccugaucagcaucuuccugcaccugaucaagauccccacccacagacacaucgugggcaagcccugccccaagccccacagacugaaccacaugggcgugugcagcugcggccuguacaagcaccccggcgugcccaccaaguggaagagaugaggacuagucccuguucccagagcccacuuuuuuuucuuuuuuugaaauaaaauagccugucuuucagaucucaaaggcucuuuucagagccaccaaaaaaaaaaaaaaaaaaaaaaaaaaaaaaaaaaaaaaaaaaaaaaaaaaaaaaaaaaaaaaaaagaauu

SEQ ID NO: 38439 - RNA, 1714 nt, Artificial Sequence
  mRNA product Design a-1 (hSL-A64-N5) comprising derived and/or modified sequence from LASV(803213;Clade II)__AAF86703__GPCmut11 (opt4)
aggagagucccgcagucggcguccagcggcucugcuuguucgugugugugucguugcaggccuuauucaagcuuaccaugggccagaucaucaccuucuuccaggaggugccccacgugaucgaggaggugaugaacaucgugcugaucgcccugagccugcuggccauccugaagggcaucuacaacguggccaccugcggccuguucggccugaucagcuuccugcugcugugcggcagaagcugcagcgugaccuacaagggcguguacgagcugcagacccuggagcugaacauggccaaccugaacaugaccaugccccugagcugcaccaagaacaacagccaccacuacaucauggugggcaacgagaccggccuggagcugacccugaccaacaccagcaucaucaaccacaaguucugcaaccugagcgacgcccacaagaagaaccuguacgaccacgcccugaugagcaucaucagcaccuuccaccugagcauccccaacuucaaccaguacgaggccaugagcugcgacuucaacggcggcaagaucagcgugcaguacaaccugagccacagcuucgccguggacgccgccaaccacugcggcaccaucgccaacggcgugcugcagaccuucaugagaauggccuggggcggcagcuacaucgcccuggacagcggcaagggcaacugggacugcaucaugaccagcuaccaguaccugaucauccagaacaccaccugggaggaccacugccaguucagcagacccagccccaucggcuaccugggccugcugagccagagaaccagagacaucuacaucagcagaagacugcugggcaccuucaccuggacccugagcgacagcgagggcaacgaggcccccggcggcuacugccugaccagauggaugcugaucgaggccgagcugaagugcuucggcaacaccgccguggccaagugcaacgagaagcacgacgaggaguucugcgacaugcugagacuguucgacuucaacaagcaggccaucaagagacugaagaccgaggcccagaugagcauccagcugaucaacaaggccgugaacgcccugaucaacgaccagcugaucaugaagaaccaccugagagacaucaugggcauccccuacugcaacuacagcagauacugcuaccugaaccacaccgugaccggcaagaccagccugcccagaugcugccuggugagcaacggcagcuaccugaacgagacccacuucagcgacgacaucgagcagcaggccgacaacaugaucaccgagaugcugcagaaggaguacauggacagacagggcaagaccccccugggccugguggaccuguucguguucagcaccagcuucuaccugaucagcaucuuccugcaccuggugaagauccccacccacagacacaucgugggcaagcccugccccaagccccacagacugaaccacaugggcaucugcagcugcggccuguacaagcaccccggcgugcccgugaaguggaagagaugaggacuagucccuguucccagagcccacuuuuuuuucuuuuuuugaaauaaaauagccugucuuucagaucucaaaggcucuuuucagagccaccaaaaaaaaaaaaaaaaaaaaaaaaaaaaaaaaaaaaaaaaaaaaaaaaaaaaaaaaaaaaaaaaagaauu

SEQ ID NO: 38440 - RNA, 1714 nt, Artificial Sequence
  mRNA product Design a-1 (hSL-A64-N5) comprising derived and/or modified sequence from LASV(GA391;Clade III)__CAA36645__GPCmut11 (opt4)
aggagagucccgcagucggcguccagcggcucugcuuguucgugugugugucguugcaggccuuauucaagcuuaccaugggccagaucgugaccuucuuccaggaggugccccacgugaucgaggaggugaugaacaucgugcugaucgcccugagcauccuggccauccugaagggccuguacaacguggccaccugcggccugaucggccuggugaccuuccugcugcugagcggcagaagcugcagccugaucuacaagggcaccuacgagcugcagacccuggagcugaacauggagacccugaacaugaccaugccccugagcugcaccaagaacaacagccaccacuacaucagagugggcaacgagaccggccuggagcugacccugaccaacaccagcauccugaaccacaaguucugcaaccugagcgacgcccacaagagaaaccuguacgaccacagccugaugagcaucaucagcaccuuccaccugagcauccccaacuucaaccaguacgaggccaugagcugcgacuucaacggcggcaagaucaccgugcaguacaaccugagccacagcuucgccguggacgccgccggccacugcggcacccuggccaacggcgugcugcagaccuucaugagaauggccuggggcggcagcuacaucgcccuggacagcggcagaggcaacugggacugcaucaugaccagcuaccaguaccugaucauccagaacaccaccugggacgaccacugccaguucagcagacccagccccaucggcuaccugggccugcugagccagagaaccagagacaucuacaucagcagaagacugcugggcaccuucaccuggacccugagcgacagcgagggcaacgagacccccggcggcuacugccugaccagauggaugcugaucgaggccgagcugaagugcuucggcaacaccgccguggccaagugcaacgagaagcacgacgaggaguucugcgacaugcugagacuguucgacuucaacaagcaggccaucagaagacugaagaccgaggcccagaugagcauccagcugaucaacaaggccgugaacgcccugaucaacgaccagcugaucaugaagaaccaccugagagacaucaugggcauccccuacugcaacuacagcagauacugcuaccugaaccacaccagcaccggcaagaccagccugcccagaugcugccugaucagcaacggcagcuaccugaacgagaccaaguucagcgacgacaucgagcagcaggccgacaacaugaucaccgagaugcugcagaaggaguacaucgacagacagggcaagaccccccugggccugguggaccuguucguguucagcaccagcuucuaccugaucagcaucuuccugcaccuggugaagauccccacccacagacacaucgugggcaagcccugccccaagccccacagacugaaccacaugggcaucugcagcugcggccuguacaagcagcccggcgugcccgugagauggaagagaugaggacuagucccuguucccagagcccacuuuuuuuucuuuuuuugaaauaaaauagccugucuuucagaucucaaaggcucuuuucagagccaccaaaaaaaaaaaaaaaaaaaaaaaaaaaaaaaaaaaaaaaaaaaaaaaaaaaaaaaaaaaaaaaaagaauu

SEQ ID NO: 38441 - RNA, 1717 nt, Artificial Sequence
  mRNA product Design a-1 (hSL-A64-N5) comprising derived and/or modified sequence from LASV(AV;Clade V)__CCA30314__GPCmut11 (opt4)
aggagagucccgcagucggcguccagcggcucugcuuguucgugugugugucguugcaggccuuauucaagcuuaccaugggccagaucgugaccuucuuccaggaggugccccacgugaucgaggaggugaugaacaucgugcugaucgcccugagcauccuggccgugcugaagggccuguacaacaucgccaccugcggccugaucggccugaucaccuuccugcugcugugcggcagaagcugcagcagcaaccuguacaagggcguguacgagcugcagagccuggaccugaacauggagacccugaacaugaccaugccccugagcugcaccaagaacaacagccaccacuacaucagagugggcaacgacaccggccuggagcugacccugaccaacaccagcauccugaaccacaaguucugcaaccugagcgacgcccacaagaaggaccuguacgaccacgcccugaugagcaucaucagcaccuuccaccugagcauccccaacuucaaccaguacgaggccaugagcugcgacuucaacggcggcaagaucagcgugcaguacaaccugagccacagcuacgccaucgacgccgccaaccacugcggcaccguggccaacggcauccugcagaccuucaugagaauggccuggggcggcagcuacaucgcccuggacagcggcagaggcaacugggacugcaucaugaccagcuaccaguaccugaucauccagaacaccaccugggagaaccacugccaguucagcagacccagccccaucggcuaccugggccugcugagccagagaaccagagacaucuacaucagcagaagacugcugggcaccuucaccuggacccugagcgacagcgagggcaacgccacccccggcggcuacugccugaccagauggaugcugaucgaggccgagcugaagugcuucggcaacaccgccguggccaagugcaacgagaagcacgacgaggaguucugcgacaugcugagacuguucgacuucaacaagcaggccaucagcagacugaagagcgaggcccagaugagcauccagcugaucaacaaggccgugaacgcccugaucaacgaccagcugaucaugaagaaccaccugagagacaucaugggcauccccuacugcaacuacagcaaguacugcuaccugaaccacaccaucaccggcaagaccagccugcccaagugcugccuggugagcaacggcagcuaccugaacgagacccacuucagcgacgacaucgagcagcaggccgacaacaugaucaccgagaugcugcagaaggaguacauggagagacagggcaagaccccccugggccugguggaccuguucguguucagcaccagcuucuaccugaucagcaucuuccugagacuggugaagauccccacccacagacacaucgugggcaagcccugccccaagccccacagacugaaccacaugggcaucugcagcugcggccuguacaagcagcccggcgugcccgugagauggaagagaugaggacuagucccuguucccagagcccacuuuuuuuucuuuuuuugaaauaaaauagccugucuuucagaucucaaaggcucuuuucagagccaccaaaaaaaaaaaaaaaaaaaaaaaaaaaaaaaaaaaaaaaaaaaaaaaaaaaaaaaaaaaaaaaaagaauu

SEQ ID NO: 38442 - RNA, 1714 nt, Artificial Sequence
  mRNA product Design a-1 (hSL-A64-N5) comprising derived and/or modified sequence from LASV(Togo/2016/7082;Clade VI)__AMR44577__GPCmut11 (opt4)
aggagagucccgcagucggcguccagcggcucugcuuguucgugugugugucguugcaggccuuauucaagcuuaccaugggccagaucaucaccuucuuccaggaggugccccacgugaucgaggaggugaugaacaucgugcugaucgcccugagccugcuggccauccugaagggcguguacaacguggccaccugcggcaucaucggccuggugaccuuccuguuccugugcggcagaagcugcagccugaucuacaagggcagcuacgagcugcagacccuggagcugaacauggagacccugaacaugaccaugccccugagcugcaccaagaacagcagccaccacuacaucagagugggcaacgagaccggccuggagcugacccugaccaacaccagcaucaucaaccacaaguucugcaaccugagcgacgcccacaagagaaaccuguacgaccacgcccugaugagcauccugagcaccuuccaccugagcauccccaacuucaaccaguacgaggccaugagcugcgacuucaacggcggcaagaucagcgugcaguacaaccugagccacgccuacgccguggacgccgccgagcacugcggcaccguggccaacggcgugcugcagaccuucaugagaauggccuggggcggcagcuacaucgcccuggacagcggcagaggcaacugggacugcaucaugaccagcuaccaguaccugaucauccagaacaccaccugggaggaccacugccaguucagcagacccagccccaucggcuaccugggccugcugagccagagaaccagagacaucuacaucagcagaagacugcugggcaccuucaccuggacccugagcgacagcgagggcaacgagacccccggcggcuacugccugaccagauggaugcugaucgaggccgagcugaagugcuucggcaacaccgccguggccaagugcaacgagaagcacgacgaggaguucugcgacaugcugagacuguucgacuucaacaagcaggccauccagagacugaagagcgaggcccagaugagcauccagcugaucaacaaggccgugaacgcccugaucaacgaccagcugaucaugaagaaccaccugagagacaugaugggcauccccuacugcaacuacagcaaguacugcuaccugaaccacaccagcagcggcagaaccagccugcccaagugcugccuggugagcaacggcagcuaccugaacgagacccacuucagcgacgacaucgagcagcaggccgacaacaugaucaccgagaugcugcagaaggaguacaucgacagacagggcaagaccccccugggccugguggaccuguucguguucagcaccagcuucuaccugaucagcaucuuccugcaccugaucaagauccccacccacagacacaucgugggcaagcccugccccaagccccacagacugaaccacaugggcaucugcagcugcggccuguacaagcagcccggcgugcccaccagauggaagagaugaggacuagucccuguucccagagcccacuuuuuuuucuuuuuuugaaauaaaauagccugucuuucagaucucaaaggcucuuuucagagccaccaaaaaaaaaaaaaaaaaaaaaaaaaaaaaaaaaaaaaaaaaaaaaaaaaaaaaaaaaaaaaaaaagaauu

SEQ ID NO: 38443 - RNA, 1714 nt, Artificial Sequence
  mRNA product Design a-1 (hSL-A64-N5) comprising derived and/or modified sequence from LASV(KAK-428;Clade n.d. (VII))__ANH09740__GPCmut11 (opt4)
aggagagucccgcagucggcguccagcggcucugcuuguucgugugugugucguugcaggccuuauucaagcuuaccaugggccagaucgugaccuucuuccaggaggugccccacgugaucgaggaggugaugaacaucgugcugaucgcccugagccugcuggccauccugaagggccuguacaacuucgccaccugcggcgugaucggccugaucaccuuccugcugcugugcggcagaagcugcagcgccaccuacaagggccaguacgagcugcagacccuggagcugaacauggagagccugaacaugaccaugccccugagcugcaccaagaacaacagccaccacuacaucagagccggcaacaacaccggccuggagcugacccugaccaacaccagcaucaucagccacaaguucugcaaccugagcgacgcccacaagaagaaccuguacgaccacacccugaugagcaucaucaccaccuuccaccugagcauccccaacuucaaccaguacgaggccaugagcugcgacuucaacggcggcaagaucagcauccaguacaaccugagccacagcuacgccggcgacgccgcccagcacugcggcaccguggccaacggcgugcugcagaccuucaugagaauggccuggggcggcagcuaccuggcccuggacagcggcagaagaggcugggacugcaucaucagcagcuaccaguaccugaucauccagaacaccaccugggacgaccacugccaguucagcagacccagccccaucggcuaccugggcuucgugagccagaagaccagagacaucuacaucagcagaagacugcugggcaccuucaccuggacccugagcgacagcgagggccacgacaugcccggcggcuacugccugaccagauggaugcugaucgaggccgaccugaagugcuucggcaacaccgccguggccaagugcaacgagaagcacgacgaggaguucugcgacauguggagacuguucgacuucaacaagcaggccauccagagacugaaggccgaggcccagaugaacauccagcugaucaacaaggccgugaacgcccugaucaacgaccagcugaugaugaagaaccaccugagagacaucaugggcauccccuacugcaacuacagcaaguucugcuaccugaacaacaccaccaccggcagaaccagccugcccagaugcugccugaucagcaacggcagcuaccugaacgagacccacuucagcgacgacaucgagcagcaggccgacaacaugaucaccgagaugcugcagaaggaguacauggacagacagggcaagaccccccugggccugguggaccuguucguguucagcaccagcuucuaccugaucaccaucuuccugcaccuggugaagauccccacccacagacacaucgugggcaagcccugccccaagccccacagacugaaccacaugggcaucugcagcugcggccuguacaagcagcccggcgugcccgugagauggaagagaugaggacuagucccuguucccagagcccacuuuuuuuucuuuuuuugaaauaaaauagccugucuuucagaucucaaaggcucuuuucagagccaccaaaaaaaaaaaaaaaaaaaaaaaaaaaaaaaaaaaaaaaaaaaaaaaaaaaaaaaaaaaaaaaaagaauu

SEQ ID NO: 38444 - RNA, 1714 nt, Artificial Sequence; identical to SEQ ID NO: 38438
  mRNA product Design a-1 (hSL-A64-N5) comprising derived and/or modified sequence from LASV(Pinneo-NIG-1969;Clade I)__AIT17836__GPCmut11 (opt4)

SEQ ID NO: 38445 - RNA, 1714 nt, Artificial Sequence
  mRNA product Design a-1 (hSL-A64-N5) comprising derived and/or modified sequence from LASV(ISTH0009-NIG-2011;Clade II)__AIT17404__GPCmut11 (opt4)
aggagagucccgcagucggcguccagcggcucugcuuguucgugugugugucguugcaggccuuauucaagcuuaccaugggccagaucaucaccuucuuccaggaggugccccacgugaucgaggaggugaugaacaucgugcugaucgcccugagccugcuggccauccugaagggcaucuacaacguggccaccugcggccuguucggccuggugagcuuccugcugcugugcggcagaagcugcagcaccaccuacaagggcguguacgagcugcagacccuggagcuggacauggccagccugaacaugaccaugccccugagcugcaccaagaacaacagccaccacuacaucauggugggcaacgagaccggccuggagcugacccugaccaacaccagcaucaucaaccacaaguucugcaaccugagcgacgcccacaagaagaaccuguacgaccacgcccugaugagcaucaucagcaccuuccaccugagcauccccaacuucaaccaguacgaggccaugagcugcgacuucaacggcggcaagaucagcgugcaguacaaccugagccacgccuacgccguggacgccgccaaccacugcggcaccaucgccaacggcgugcugcagaccuucaugagaauggccuggggcggcagcuacaucgcccuggacagcggcaagggcagcugggacugcaucaugaccagcuaccaguaccugaucauccagaacaccaccugggaggaccacugccaguucagcagacccagccccaucggcuaccugggccugcugagccagagaaccagagacaucuacaucagcagaagacugcugggcaccuucaccuggacccugagcgacagcgagggcaacgagacccccggcggcuacugccugaccagauggaugcugaucgaggccgagcugaagugcuucggcaacaccgccguggccaagugcaacgagaagcacgacgaggaguucugcgacaugcugagacuguucgacuucaacaagcaggccaucagaagacugaagaccgaggcccagaugagcauccagcugaucaacaaggccgugaacgcccugaucaacgaccagcugaucaugaagaaccaccugagagacaucaugggcauccccuacugcaacuacagcaaguacugcuaccugaaccacaccgugaccggcaagaccagccugcccagaugcugccuggugagcaacggcagcuaccugaacgagacccacuucagcgacgacaucgagcagcaggccgacaacaugaucaccgagcugcugcagaaggaguacauggacagacagggcaagaccccccugggccugguggaccuguucguguucagcaccagcuucuaccugaucagcaucuuccugcaccugaucaagauccccacccacagacacaucaccggcaagcccugccccaagccccacagacugaaccacaugggcaucugcagcugcggccuguacaagcaccccggcgugcccgugaaguggaagagaugaggacuagucccuguucccagagcccacuuuuuuuucuuuuuuugaaauaaaauagccugucuuucagaucucaaaggcucuuuucagagccaccaaaaaaaaaaaaaaaaaaaaaaaaaaaaaaaaaaaaaaaaaaaaaaaaaaaaaaaaaaaaaaaaagaauu

SEQ ID NO: 38446 - RNA, 1714 nt, Artificial Sequence
  mRNA product Design a-1 (hSL-A64-N5) comprising derived and/or modified sequence from LASV(ISTH2010-NIG-2012;Clade II)__AIT17482__GPCmut11 (opt4)
aggagagucccgcagucggcguccagcggcucugcuuguucgugugugugucguugcaggccuuauucaagcuuaccaugggccagaucaucaccuucuuccaggaggugccccacgugaucgaggaggugaugaacaucgugcugaucgcccugagccugcuggccauccugaagggcaucuacaacguggccaccugcggccuguucggccuggugagcuuccugcugcugugcggcagaagcugcagcaccaccuacaagggcguguacgagcugcagacccuggagcuggacauggccagccugaacaugaccaugccccugagcugcaccaagaacaacagccaccacuacaucauggugggcaacgagaccggccuggagcugacccugaccaacaccagcaucaucaaccacaaguucugcaaccugagcgacgcccacaagaagaaccuguacgaccacgcccugaugagcaucaucagcaccuuccaccugagcauccccaacuucaaccaguacgaggccaugagcugcgacuucaacggcggcaagaucagcgugcaguacaaccugagccacgccuacgccguggacgccgccaaccacugcggcaccaucgccaacggcgugcugcagaccuucaugagaauggccuggggcggcagcuacaucgcccuggacagcggcaagggcagcugggacugcaucaugaccagcuaccaguaccugaucauccagaacaucaccugggaggaccacugccaguucagcagacccagccccaucggcuaccugggccugcugagccagagaaccagagacaucuacaucagcagaagacugcugggcaccuucaccuggacccugagcgacagcgagggcaacgagacccccggcggcuacugccugaccagauggaugcugaucgaggccgagcugaagugcuucggcaacaccgccguggccaagugcaacgagaagcacgacgaggaguucugcgacaugcugagacuguucgacuucaacaagcaggccaucagaagacugaagaccgaggcccagaugagcauccagcugaucaacaaggccgugaacgcccugaucaacgaccagcugaucaugaagaaccaccugagagacaucaugggcauccccuacugcaacuacagcaaguacugcuaccugaaccacaccgugaccggcaagaccagccugcccagaugcugccuggugagcaacggcagcuaccugaacgagacccacuucagcgacgacaucgagcagcaggccgacaacaugaucaccgagcugcugcagaaggaguacaucgacagacagggcaagaccccccugggccugguggaccuguucguguucagcaccagcuucuaccugaucagcaucuuccugcaccuggugaagauccccacccacagacacguggugggcaagcccugccccaagccccacagacugaaccacaugggcaucugcagcugcggccuguacaagcaccccggcgugcccgugaaguggaagagaugaggacuagucccuguucccagagcccacuuuuuuuucuuuuuuugaaauaaaauagccugucuuucagaucucaaaggcucuuuucagagccaccaaaaaaaaaaaaaaaaaaaaaaaaaaaaaaaaaaaaaaaaaaaaaaaaaaaaaaaaaaaaaaaaagaauu

SEQ ID NO: 38447 - RNA, 1714 nt, Artificial Sequence
  mRNA product Design a-1 (hSL-A64-N5) comprising derived and/or modified sequence from LASV(Lassa virus/H.sapiens-wt/NGA/2015/ISTH_0543;Clade II)__AVO03639__GPCmut11 (opt4)
aggagagucccgcagucggcguccagcggcucugcuuguucgugugugugucguugcaggccuuauucaagcuuaccaugggccagaucaucaccuucuuccaggaggugccccacgugaucgaggaggugaugaacaucgugcugaucgcccugagccugcuggccauccugaagggcaucuacaacguggccaccugcggccuguucggccuggugagcuuccugcugcugugcggcagaagcugcagcaccaccuacaagggcguguacgagcugcagacccuggagcuggacauggccaaccugaacaugaccaugccccugagcugcaccaagaacaacagccaccacuacaucauggugggcaacgagaccggccuggagcugacccugaccaacaccagcaucaucaaccacaaguucugcaaccugagcgacgcccacaagaagaaccuguacgaccacgcccugaugagcaucaucagcaccuuccaccugagcauccccaacuucaaccaguacgaggccaugagcugcgacuucaacggcggcaagaucagcgugcaguacaaccugagccacaccuacgccguggacgccgccaaccacugcggcaccaucgccaacggcgugcugcagaccuucaugagaauggccuggggcggcagcuacaucgcccuggacagcggcaagggcagcugggacugcaucaugaccagcuaccaguaccuggugauccagaacaccaccugggaggaccacugccaguucagcagacccagccccaucggcuaccugggccugcugagccagagaaccagagacaucuacaucagcagaagacugcugggcaccuucaccuggacccugagcgacagcgagggcaacgagacccccggcggcuacugccugaccagauggaugcugaucgaggccgagcugaagugcuucggcaacaccgccguggccaagugcaacgagaagcacgacgaggaguucugcgacaugcugagacuguucgacuucaacaagcaggccaucagaagacugaagaccgaggcccagaugagcauccagcugaucaacaaggccgugaacgcccugaucaacgaccagcugaucaugaagaaccaccugagagacaucaugggcauccccuacugcaacuacagcaaguacugcuaccugaaccacaccgugaccggcaagaccagccugcccagaugcugccuggugagcaacggcagcuaccugaacgagacccacuucagcgacgacaucgagcagcaggccgacaacaugaucaccgagcugcugcagaaggaguacaucgacagacagggcaagaccccccugggccugguggaccuguucguguucagcaccagcuucuaccugaucagcaucuuccugcaccuggugaagauccccacccacagacacaucaccggcaagcccugccccaagccccacagacugaaccacaugggcaucugcagcugcggccuguacaagcaccccggcgugcccgugaaguggaagagaugaggacuagucccuguucccagagcccacuuuuuuuucuuuuuuugaaauaaaauagccugucuuucagaucucaaaggcucuuuucagagccaccaaaaaaaaaaaaaaaaaaaaaaaaaaaaaaaaaaaaaaaaaaaaaaaaaaaaaaaaaaaaaaaaagaauu

SEQ ID NO: 38448 - RNA, 1714 nt, Artificial Sequence
  mRNA product Design a-1 (hSL-A64-N5) comprising derived and/or modified sequence from LASV(Lassa virus/H.sapiens-wt/NGA/2016/ISTH_0009;Clade II)__AVO03571__GPCmut11 (opt4)
aggagagucccgcagucggcguccagcggcucugcuuguucgugugugugucguugcaggccuuauucaagcuuaccaugggccagaucaucaccuucuuccaggaggugccccacgugaucgaggaggugaugaacaucgugcugaucgcccugagccugcuggccauccugaagggcaucuacaacguggccaccugcggccugcugggccuggugagcuuccugcugcugugcggcagaagcugcagcaccaccuacaagggcguguacgagcugcagacccuggagcuggacauggccagccugaacaugaccaugccccugagcugcaccaagaacaacagccaccacuacaucauggugggcaacgagaccggccuggagcugacccugaccaacaccagcaucaucaaccacaaguucugcaaccugagcgacgcccacaagaagaaccuguacgaccacgcccugaugagcaucaucagcaccuuccaccugagcauccccaacuucaaccaguacgaggccaugagcugcgacuucaacggcggcagaaucagcgugcaguacaaccugagccacagcuacgccguggacgccgccaaccacugcggcaccaucgccaacggcgugcugcagaccuucaugagaauggccuggggcggcagcuacaucgcccuggacagcggcaagggcagcugggacugcaucaugaccagcuaccaguaccugaucauccagaacaccaccugggaggaccacugccaguucagcagacccagccccaucggcuaccugggccugcugagccagagaaccagagacaucuacaucagcagaagacugcugggcaccuucaccuggacccugagcgacagcgagggcaacgagacccccggcggcuacugccugaccagauggaugcugaucgaggccgagcugaagugcuucggcaacaccgccguggccaagugcaacgagaagcacgacgaggaguucugcgacaugcugagacuguucgacuucaacaagcaggccaucagaagacugaagaccgaggcccagaugagcauccagcugaucaacaaggccgugaacgcccugaucaacgaccagcugaucaugaagaaccaccugagagacaucaugggcauccccuacugcaacuacagcaaguacugcuaccugaaccacaccgugaccggcaagaccagccugcccagaugcugccuggugagcaacggcagcuaccugaacgagacccacuucagcgacgacaucgagcagcaggccgacaacaugaucaccgagcugcugcagaaggaguacaucgacagacagggcaagaccccccugggccugguggaccuguucguguucagcaccagcuucuaccugaucagcaucuuccugcaccuggugaagauccccacccacagacacaucaccggcaagcccugccccaagccccacagacugaaccacaugggcaucugcagcugcggccuguacaaccaccccggcgugcccgugaaguggaagagaugaggacuagucccuguucccagagcccacuuuuuuuucuuuuuuugaaauaaaauagccugucuuucagaucucaaaggcucuuuucagagccaccaaaaaaaaaaaaaaaaaaaaaaaaaaaaaaaaaaaaaaaaaaaaaaaaaaaaaaaaaaaaaaaaagaauu

SEQ ID NO: 38449 - RNA, 1714 nt, Artificial Sequence
  mRNA product Design a-1 (hSL-A64-N5) comprising derived and/or modified sequence from LASV(Lassa virus/H.sapiens-wt/NGA/2016/ISTH_0017;Clade II)__AVO03567__GPCmut11 (opt4)
aggagagucccgcagucggcguccagcggcucugcuuguucgugugugugucguugcaggccuuauucaagcuuaccaugggccagaucaucaccuucuuccaggaggugccccacgugaucgaggaggugaugaacaucgugcugaucgcccugagccugcuggccauccugaagggcaucuacaacguggccaccugcggccuguucggccuggugagcuuccugcugcugugcggcagaagcugcagcaccaccuacaagggcguguacgagcugcagacccuggagcuggacauggccagccugaacaugaccaugccccugagcugcaccaagaacaacagccaccacuacaucauggugggcaacgagaccggccuggagcugacccugaccaacaccagcaucaucaaccacaaguucugcaaccugagcgacgcccacaagaagaaccuguacgaccacgcccugaugagcaucaucagcaccuuccaccugagcauccccaacuucaaccaguacgaggccaugagcugcgacuucaacggcggcaagaucagcgugcaguacaaccugagccacaccuacgccaucgacgccgccaaccacugcggcaccaucgccaacggcgugcugcagaccuucaugagaauggccuggggcggcagcuacaucgcccuggacagcggcaagggcagcugggacugcaucaugaccagcuaccaguaccugaucauccagaacaccaccugggaggaccacugccaguucagcagacccagccccaucggcuaccugggccugcugagccagagaaccagagacaucuacaucagcagaagacugcugggcaccuucaccuggacccugagcgacagcgagggcaacgagacccccggcggcuacugccugaccagauggaugcugaucgaggccgagcugaagugcuucggcaacaccgccguggccaagugcaacgagaagcacgacgaggaguucugcgacaugcugagacuguucgacuucaacaagcaggccaucagaagacugaagaccgaggcccagaugagcauccagcugaucaacaaggccgugaacgcccugaucaacgaccagcugaucaugaagaaccaccugagagacaucaugggcauccccuacugcaacuacagcaaguacugcuaccugaaccacaccgugaccggcaagaccagccugcccagaugcugccuggugagcaacggcagcuaccugaacgagacccacuucagcgacgacaucgagcagcaggccgacaacaugaucaccgagcugcugcagaaggaguacauggacagacagggcaagaccccccugggccugguggaccuguucguguucagcaccagcuucuaccugaucagcaucuuccugcaccuggugagaauccccacccacagacacgugaucggcaagcccugccccaagccccacagacugaaccacaugggcaucugcagcugcggccuguacaagcaccccggcgugcccgugaaguggaagagaugaggacuagucccuguucccagagcccacuuuuuuuucuuuuuuugaaauaaaauagccugucuuucagaucucaaaggcucuuuucagagccaccaaaaaaaaaaaaaaaaaaaaaaaaaaaaaaaaaaaaaaaaaaaaaaaaaaaaaaaaaaaaaaaaagaauu

SEQ ID NO: 38450 - RNA, 1714 nt, Artificial Sequence
  mRNA product Design a-1 (hSL-A64-N5) comprising derived and/or modified sequence from LASV(Lassa virus/H.sapiens-wt/NGA/2018/ISTH_0959;Clade II)__AVV65099__GPCmut11 (opt4)
aggagagucccgcagucggcguccagcggcucugcuuguucgugugugugucguugcaggccuuauucaagcuuaccaugggccagaucaucaccuucuuccaggaggugccccacgugaucgaggaggugaugaacaucgugcugaucgcccugagccugcuggccauccugaagggcaucuacaacguggugaccugcggccuguucggccuggugagcuuccugcugcugugcggcagaagcugcagcaccaccuacaagggcguguacgagcugcagacccuggagcuggacauggccagccugaacaugaccaugccccugagcugcaccaagaacaacagccaccacuacaucauggugggcaacgagaccggccuggagcugacccugaccaacaccagcaucaucaaccacaaguucugcaaccugagcgacgcccacaagaagaaccuguacgaccacgcccugaugagcaucaucagcaccuuccaccugagcauccccaacuucaaccaguacgaggccaugagcugcgacuucaacggcggcaagaucagcgugcaguacaaccugagccacgccuacgccaucgacgccgccaaccacugcggcaccaucgccaacggcgugcugcagaccuucaugagaauggccuggggcggcagcuacaucgcccuggacagcggcaagggcagcugggacugcaucaugaccagcuaccaguaccugaucauccagaacaccaccugggaggaccacugccaguucagcagacccagccccaucggcuaccugggccugcugagccagagaaccagagacaucuacaucagcagaagacugcugggcaccuucaccuggacccugagcgacagcgagggcaacgagacccccggcggcuacugccugaccagauggaugcugaucgaggccgagcugaagugcuucggcaacaccgccguggccaagugcaacgagaagcacgacgaggaguucugcgacaugcugagacuguucgacuucaacaagcaggccaucagaagacugaagaccgaggcccagaugagcauccagcugaucaacaaggccgugaacgcccugaucaacgaccagcugaucaugaagaaccaccugagagacaucaugggcauccccuacugcaacuacagcaaguacugcuaccugaaccacaccgugaccggcaagaccagccugcccagaugcugccuggugagcaacggcagcuaccugaacgagacccacuucagcgacgacaucgagcagcaggccgacaacaugaucaccgagcugcugcagaaggaguacaucgacagacagggcaagaccccccugggccugguggaccuguucguguucagcaccagcuucuaccugaucagcaucuuccugcaccuggugaagauccccacccacagacacgugaucggcaagcccugccccaagccccacagacugaaccacaugggcaucugcagcugcggccuguacaagcaccccggcgugcccgugaaguggaagagaugaggacuagucccuguucccagagcccacuuuuuuuucuuuuuuugaaauaaaauagccugucuuucagaucucaaaggcucuuuucagagccaccaaaaaaaaaaaaaaaaaaaaaaaaaaaaaaaaaaaaaaaaaaaaaaaaaaaaaaaaaaaaaaaaagaauu

SEQ ID NO: 38451 - RNA, 1714 nt, Artificial Sequence
  mRNA product Design a-1 (hSL-A64-N5) comprising derived and/or modified sequence from LASV(LASV003-NIG-2008;Clade II)__AIT17580__GPCmut11 (opt4)
aggagagucccgcagucggcguccagcggcucugcuuguucgugugugugucguugcaggccuuauucaagcuuaccaugggccagaucaucaccuucuuccaggaggugccccacgugaucgaggaggugaugaacaucgugcugaucgcccugagccugcuggccauccugaagggcaucuacaacguggccaccugcggccuguucggccuggugagcuuccugcugcugugcggcagaagcugcagcaccaccuacaagggcguguacgagcugcagacccuggagcuggacauggccagccugaacaugaccaugccccugagcugcaccaagaacaacagccaccacuacaucauggugggcaacgagaccggccuggagcugacccugaccaacaccagcaucaucaaccacaaguucugcaaccugagcgacgcccacaagaagaaccuguacgaccacgcccugaugagcaucaucagcaccuuccaccugagcauccccaacuucaaccaguacgaggccaugagcugcgacuucaacggcggcaagaucagcgugcaguacaaccugagccacaccuacgccguggacgccgccaaccacugcggcaccaucgccaacggcgugcugcagaccuucaugagaauggccuggggcggcagcuacaucgcccuggacagcggcaagggcagcugggacugcaucaugaccagcuaccaguaccugaucauccagaacaccaccugggaggaccacugccaguucagcagacccagccccaucggcuaccugggccugcugagccagagaaccagagacaucuacaucagcagaagacugcugggcaccuucaccuggacccugagcgacagcgagagcaacgagacccccggcggcuacugccugaccagauggaugcugaucgaggccgagcugaagugcuucggcaacaccgccguggccaagugcaacgagaagcacgacgaggaguucugcgacaugcugagacuguucgacuucaacaagcaggccaucagaagacugaaggccgaggcccagaugagcauccagcugaucaacaaggccgugaacgcccugaucaacgaccagcugaucaugaagaaccaccugagagacaucaugggcauccccuacugcaacuacagcaaguacugcuaccugaaccacaccgugaccggcagaaccagccugcccagaugcugccuggugagcaacggcagcuaccugaacgagacccacuucagcgacgacaucgagcagcaggccgacaacaugaucaccgagcugcugcagaaggaguacauggacagacagggcaagaccccccugggccugguggaccuguucguguucagcaccagcuucuaccugaucagcaucuuccugcaccuggugaagauccccacccacagacacgugaucggcaagcccugccccaagccccacagacugaaccacaugggcaucugcagcugcggccuguacaagcaccccggcgugcccgugaaguggaagagaugaggacuagucccuguucccagagcccacuuuuuuuucuuuuuuugaaauaaaauagccugucuuucagaucucaaaggcucuuuucagagccaccaaaaaaaaaaaaaaaaaaaaaaaaaaaaaaaaaaaaaaaaaaaaaaaaaaaaaaaaaaaaaaaaagaauu

SEQ ID NO: 38452 - RNA, 1714 nt, Artificial Sequence
  mRNA product Design a-1 (hSL-A64-N5) comprising derived and/or modified sequence from LASV(LASV035-NIG-2009;Clade II)__AIT17588__GPCmut11 (opt4)
aggagagucccgcagucggcguccagcggcucugcuuguucgugugugugucguugcaggccuuauucaagcuuaccaugggccagaucaucaccuucuuccaggaggugccccacgugaucgaggaggugaugaacaucgugcugaucgcccugagccugcuggccauccugaagggcaucuacaacguggccaccugcggccuguucggccuggugagcuuccugcugcugugcggcagaagcugcagcaccaccuacaagggcguguacgagcugcagacccuggagcuggacauggccagccugaacaugaccaugccccugagcugcaccaagaacaacagccaccacuacaucauggugggcaacgagaccggccuggagcugacccugaccaacaccagcaucaucaaccacaaguucugcaaccugagcgacgcccacaagaagaaccuguacgaccacgcccugaugagcaucaucagcaccuuccaccugagcauccccaacuucaaccaguacgaggccaugagcugcgacuucaacggcggcaagaucagcgugcaguacaaccugagccacgccuacgccguggacgccgccaaccacugcggcaccaucgccaacggcgugcugcagaccuucaugagaauggccuggggcggcagcuacaucgcccuggacagcggcaagggcagcugggacugcaucaugaccagcuaccaguaccugaucauccagaacaccaccugggaggaccacugccaguucagcagacccagccccaucggcuaccugggccugcugagccagagaaccagagacaucuacaucagcagaagacugcugggcaccuucaccuggacccugagcgacagcgagggcaacgagacccccggcggcuacugccugaccagauggaugcugaucgaggccgagcugaagugcuucggcaacaccgccguggccaagugcaacgagaagcacgacgaggaguucugcgacaugcugagacuguucgacuucaacaagcaggccaucagaagacugaaggccgaggcccagaugagcauccagcugaucaacaaggccgugaacgcccugaucaacgaccagcugaucaugaagaaccaccugagagacaucaugggcauccccuacugcaacuacagcaaguacugcuaccugaaccacaccgugaccggcaagaccagccugcccagaugcugccuggugagcaacggcagcuaccugaacgagacccacuucagcgacgacaucgagcagcaggccgacaacaugaucaccgagcugcugcagaaggaguacaucgacagacagggcaagaccccccugggccugguggaccuguucguguucagcaccagcuucuaccugaucagcaucuuccugcaccuggugaagauccccacccacagacacgugaucggcaagcccugccccaagccccacagacugaaccacaugggcaucugcagcugcggccuguacaagcaccccggcgugcccgugaaguggaagagaugaggacuagucccuguucccagagcccacuuuuuuuucuuuuuuugaaauaaaauagccugucuuucagaucucaaaggcucuuuucagagccaccaaaaaaaaaaaaaaaaaaaaaaaaaaaaaaaaaaaaaaaaaaaaaaaaaaaaaaaaaaaaaaaaagaauu

SEQ ID NO: 38453 - RNA, 1714 nt, Artificial Sequence
  mRNA product Design a-1 (hSL-A64-N5) comprising derived and/or modified sequence from LASV(LASV1000-NIG-2009;Clade II)__AIT17782__GPCmut11 (opt4)
aggagagucccgcagucggcguccagcggcucugcuuguucgugugugugucguugcaggccuuauucaagcuuaccaugggccagaucaucaccuucuuccaggaggugccccacgugaucgaggaggugaugaacaucgugcugaucgcccugagccugcuggccauccugaagggcaucuacaacguggccaccugcggccuguucggccuggugagcuuccugcugcugugcggcagaagcugcagcaccaccuacaagggcguguacgagcugcagacccuggagcuggacauggccagccugaacaugaccaugccccugagcugcaccaagaacaacagccaccacuacaucauggugggcaacgagaccggccuggagcugacccugaccaacaccagcaucaucaaccacaaguucugcaaccugagcgacgcccacaagaagaaccuguacgaccacgcccugaugagcaucaucagcaccuuccaccugagcauccccaacuucaaccaguacgaggccaugagcugcgacuucaacggcggcaagaucagcgugcaguacaaccugagccacaccuacgccguggacgccgccaaccacugcggcaccaucgccaacggcgugcugcagaccuucaugagaauggccuggggcggcagcuacaucgcccuggacagcggcaagggcagcugggacugcaucaugaccagcuaccaguaccugaucauccagaacaccaccugggaggaccacugccaguucagcagacccagccccaucggcuaccugggccugcugagccagagaaccagagacaucuacaucagcagaagacugcugggcaccuucaccuggacccugagcgacagcgagggcaacgagacccccggcggcuacugccugaccagauggaugcugaucgaggccgagcugaagugcuucggcaacaccgccguggccaagugcaacgagaagcacgacgaggaguucugcgacaugcugagacuguucgacuucaacaagcaggccaucaagagacugaagaccgaggcccagaugagcauccagcugaucaacaaggccgugaacgcccugaucaacgaccagcugaucaugaagaaccaccugagagacaucaugggcauccccuacugcaacuacagcaaguacugcuaccugaaccacaccgugaccggcaagaccagccugcccagaugcugccuggugagcaacggcagcuaccugaacgagacccacuucagcgacgacaucgagcagcaggccgacaacaugaucaccgagcugcugcagaaggaguacaucgacagacagggcaagaccccccugggccugguggaccuguucguguucagcaccagcuucuaccugaucagcaucuuccugcaccuggugaagauccccacccacagacacguggugggcaagcccugccccaagccccacagacugaaccacaugggcaucugcagcugcggccuguacaagcaccccggcgugcccgugaaguggaagagaugaggacuagucccuguucccagagcccacuuuuuuuucuuuuuuugaaauaaaauagccugucuuucagaucucaaaggcucuuuucagagccaccaaaaaaaaaaaaaaaaaaaaaaaaaaaaaaaaaaaaaaaaaaaaaaaaaaaaaaaaaaaaaaaaagaauu

SEQ ID NO: 38454 - RNA, 1714 nt, Artificial Sequence
  mRNA product Design a-1 (hSL-A64-N5) comprising derived and/or modified sequence from LASV(LASV221-NIG-2010;Clade II)__AIT17624__GPCmut11 (opt4)
aggagagucccgcagucggcguccagcggcucugcuuguucgugugugugucguugcaggccuuauucaagcuuaccaugggccagaucaucaccuucuuccaggaggugccccacgugaucgaggaggugaugaacaucgugcugaucgcccugagccugcuggccauccugaagggcaucuacaacguggccaccugcggccuguucggccuggugagcuuccugcugcugugcggcagaagcugcagcaccaccuacaagggcguguacgagcugcagacccuggagcuggacauggccagccugaacaugaccaugccccugagcugcaccaagaacaacagccaccacuacaucauggugggcaacgagaccggccuggagcugacccugaccaacaccagcaucaucaaccacaaguucugcaaccugagcgacgcccacaagaagaaccuguacgaccacgcccugaugagcaucaucagcaccuuccaccugagcauccccaacuucaaccaguacgaggccaugagcugcgacuucaacggcggcaagaucagcgugcaguacaaccugagccacaccuacgccaucgacgccgccaaccacugcggcaccaucgccaacggcgugcugcagaccuucaugagaauggccuggggcggcagcuacaucgcccuggacagcggcaagggcagcugggacugcaucaugaccagcuaccaguaccugaucauccagaacaccaccugggaggaccacugccaguucagcagacccagccccaucggcuaccugggccugcugagccagagaaccagagacaucuacaucagcagaagacugcugggcaccuucaccuggacccugagcgacagcgagggcaacgagacccccggcggcuacugccugaccagauggaugcugaucgaggccgagcugaagugcuucggcaacaccgccguggccaagugcaacgagaagcacgacgaggaguucugcgacaugcugagacuguucgacuucaacaagcaggccaucagaagacugaagaccgaggcccagaugagcauccagcugaucaacaaggccgugaacgcccugaucaacgaccagcugaucaugaagaaccaccugagagacaucaugggcauccccuacugcaacuacagcaaguacugcuaccugaaccacaccgugaccggcaagaccagccugcccagaugcugccuggugagcaacggcagcuaccugaacgagacccacuucagcgacgacaucgagcagcaggccgacaacaugaucaccgagaugcugcagaaggaguacauggacagacagggcaagaccccccugggccugguggaccuguucguguucagcaccagcuucuaccugaucagcaucuuccugcaccuggugaagauccccacccacagacacgugaucggcaagcccugccccaagccccacagacugaaccacaugggcaucugcagcugcggccuguacaagcaccccggcgugcccgugaaguggaagagaugaggacuagucccuguucccagagcccacuuuuuuuucuuuuuuugaaauaaaauagccugucuuucagaucucaaaggcucuuuucagagccaccaaaaaaaaaaaaaaaaaaaaaaaaaaaaaaaaaaaaaaaaaaaaaaaaaaaaaaaaaaaaaaaaagaauu

SEQ ID NO: 38455 - RNA, 1714 nt, Artificial Sequence
  mRNA product Design a-1 (hSL-A64-N5) comprising derived and/or modified sequence from LASV(LASV237-NIG-2010;Clade II)__AIT17638__GPCmut11 (opt4)
aggagagucccgcagucggcguccagcggcucugcuuguucgugugugugucguugcaggccuuauucaagcuuaccaugggccagaucaucaccuucuuccaggaggugccccacgugaucgaggaggugaugaacaucgugcugaucgcccugagccugcuggccauccugaagggcaucuacaacguggccaccugcggccuguucggccuggugagcuuccugcugcugugcggcagaagcugcagcaccaccuacaagggcguguacgagcugcagacccuggagcuggacauggccagccugaacaugaccaugccccugagcugcaccaagaacaacagccaccacuacaucauggugggcaacgagaccggccuggagcugacccugaccaacaccagcaucaucaaccacaaguucugcaaccugagcgacgcccacaagaaggaccuguacgaccacgcccugaugagcaucaucagcaccuuccaccugagcauccccaacuucaaccaguacgaggccaugagcugcgacuucaacggcggcaagaucagcgugcaguacaaccugagccacaccuacgccguggacgccgccaaccacugcggcaccaucgccaacggcgugcugcagaccuucaugagaauggccuggggcggcagcuacaucgcccuggacagcggcaagggcagcugggacugcaucaugaccagcuaccaguaccugaucauccagaacaccaccugggaggaccacugccaguucagcagacccagccccaucggcuaccugggccugcugagccagagaaccagagacaucuacaucagcagaagacugcugggcaccuucaccuggacccugagcgacagcgagggcaacgagacccccggcggcuacugccugaccagauggaugcugaucgaggccgagcugaagugcuucggcaacaccgccguggccaagugcaacgagaagcacgacgaggaguucugcgacaugcugagacuguucgacuucaacaagcaggccaucagaagacugaagaccgaggcccagaugagcauccagcugaucaacaaggccgugaacgcccugaucaacgaccagcugaucaugaagaaccaccugagagacaucaugggcauccccuacugcaacuacagcaaguacugcuaccugaaccacaccgugaccggcaagaccagccugcccagaugcugccuggugagcaacggcagcuaccugaacgagacccacuucagcgacgacaucgagcagcaggccgacaacaugaucaccgagcugcugcagaaggaguacauggacagacagggcaagaccccccugggccugguggaccuguucguguucagcaccagcuucuaccugaucagcaucuuccugcaccugaucaagauccccacccacagacacaucaccggcaagcccugccccaagccccacagacugaaccacaugggcaucugcagcugcggccuguacaagcaccccggcgugcccgugaaguggaagagaugaggacuagucccuguucccagagcccacuuuuuuuucuuuuuuugaaauaaaauagccugucuuucagaucucaaaggcucuuuucagagccaccaaaaaaaaaaaaaaaaaaaaaaaaaaaaaaaaaaaaaaaaaaaaaaaaaaaaaaaaaaaaaaaaagaauu

SEQ ID NO: 38456 - RNA, 1714 nt, Artificial Sequence
  mRNA product Design a-1 (hSL-A64-N5) comprising derived and/or modified sequence from LASV(LASV253-NIG-2011;Clade II)__AIT17670__GPCmut11 (opt4)
aggagagucccgcagucggcguccagcggcucugcuuguucgugugugugucguugcaggccuuauucaagcuuaccaugggccagaucaucaccuucuuccaggaggugccccacgugaucgaggaggugaugaacaucgugcugaucgcccugagccugcuggccauccugaagggcaucuacaacguggccaccugcggccuguucggccuggugagcuuccugcugcugugcggcagaagcugcagcaccaccuacaagggcguguacgagcugcagacccuggagcuggacauggccagccugaacaugaccaugccccugagcugcaccaagaacaacagccaccacuacaucauggugggcaacgagaccggccuggagcugacccugaccaacaccagcaucaucaaccacaaguucugcaaccugagcgacgcccacaagaagaaccuguacgaccacgcccugaugagcaucaucagcaccuuccaccugagcauccccaacuucaaccaguacgaggccaugagcugcgacuucaacggcggcaagaucagcgugcaguacaaccugagccacaccuacgccguggacgccgccaaccacugcggcaccaucgccaacggcgugcugcagaccuucaugagaauggccuggggcggcagcuacaucgcccuggacagcggcaagggcagcugggacugcaucaugaccagcuaccaguaccugaucauccagaacaccaccugggaggaccacugccaguucagcagacccagccccaucggcuaccugggccugcugagccagagaaccagagacaucuacaucagcagaagacugcugggcaccuucaccuggacccugagcgacagcgagggcaacgagacccccggcggcuacugccugaccagauggaugcugaucgaggccgagcugaagugcuucggcaacaccgccguggccaagugcaacgagaagcacgacgaggaguucugcgacaugcugagacuguucgacuucaacaagcaggccaucagaagacugaaggccgaggcccagaugagcauccagcugaucaacaaggccgugaacgcccugaucaacgaccagcugaucaugaagaaccaccugagagacaucaugggcauccccuacugcaacuacagcaaguacugcuaccugaaccacaccgugaccggcagaaccagccugcccagaugcugccuggugagcaacggcagcuaccugaacgagacccacuucagcgacgacaucgagcagcaggccgacaacaugaucaccgagcugcugcagaaggaguacaucgacagacagggcaagaccccccugggccugguggaccuguucguguucagcaccagcuucuaccugaucagcaucuuccugcaccuggugaagauccccacccacagacacaucaucggcaagcccugccccaagccccacagacugaaccacaugggcaucugcagcugcggccuguacaagcaccccggcgugcccgugaaguggaagagaugaggacuagucccuguucccagagcccacuuuuuuuucuuuuuuugaaauaaaauagccugucuuucagaucucaaaggcucuuuucagagccaccaaaaaaaaaaaaaaaaaaaaaaaaaaaaaaaaaaaaaaaaaaaaaaaaaaaaaaaaaaaaaaaaagaauu

SEQ ID NO: 38457 - RNA, 1714 nt, Artificial Sequence
  mRNA product Design a-1 (hSL-A64-N5) comprising derived and/or modified sequence from LASV(LASV254-NIG-2011;Clade II)__AIT17674__GPCmut11 (opt4)
aggagagucccgcagucggcguccagcggcucugcuuguucgugugugugucguugcaggccuuauucaagcuuaccaugggccagaucaucaccuucuuccaggaggugccccacgugaucgaggaggugaugaacaucgugcugaucgcccugagccugcuggccauccugaagggcaucuacaacguggccaccugcggccuguucggccuggugagcuuccugcugcugugcggcagaagcugcagcaccaccuacaagggcguguacgagcugcagacccuggagcuggacaugaccaaccugaacaugaccaugccccugagcugcaccaagaacaacagccaccacuacaucauggugggcaacgagaccggccuggagcugacccugaccaacaccagcaucaucaaccacaaguucugcaaccugagcgacgcccacaagaagaaccuguacaaccacgcccugaugagcaucaucagcaccuuccaccugagcauccccaacuucaaccaguacgaggccaugagcugcgacuucaacggcggcaagaucagcgugcaguacaaccugagccacagcuacgccguggacgccgccaaccacugcggcaccaucgccaacggcgugcugcagaccuucaugagaauggccuggggcggcagcuacaucgcccuggacagcggcaagggcaacugggacugcaucaugaccagcuaccaguaccugaucauccagaacaccaccugggaggaccacugccaguucagcagacccagccccaucggcuaccugggccugcugagccagagaaccagagacaucuacaucagcagaagacugcugggcaccuucaccuggacccugagcgacagcgagggcaacgagacccccggcggcuacugccugaccagauggaugcugaucgaggccgagcugaagugcuucggcaacaccgccguggccaagugcaacgagaagcacgacgaggaguucugcgacaugcugagacuguucgacuucaacaagcaggccaucagaagacugaagaccgaggcccaggccaacauccagcugaucaacaaggccgugaacgcccugaucaacgaccagcugaucaugaagaaccaccugagagacaucaugggcauccccuacugcaacuacagcaaguacugcuaccugaaccacaccgugaccggcaagaccagccugcccagaugcugccuggugagcaacggcagcuaccugaacgagacccacuucagcgacgacaucgagcagcaggccgacaacaugaucaccgagcugcugcagaaggaguacauggacagacagggcaagaccccccugggccugguggaccuguucguguucagcaccagcuucuaccugaucagcaucuuccugcaccuggugaagauccccacccacagacacgugaucggcaagcccugccccaagccccacagacugaaccacaugggcaucugcagcugcggccuguacaagcaccccggcgugcccgugaaguggaagagaugaggacuagucccuguucccagagcccacuuuuuuuucuuuuuuugaaauaaaauagccugucuuucagaucucaaaggcucuuuucagagccaccaaaaaaaaaaaaaaaaaaaaaaaaaaaaaaaaaaaaaaaaaaaaaaaaaaaaaaaaaaaaaaaaagaauu

SEQ ID NO: 38458 - RNA, 1714 nt, Artificial Sequence
  mRNA product Design a-1 (hSL-A64-N5) comprising derived and/or modified sequence from LASV(Nig08-A19;Clade III)__ADU56618__GPCmut11 (opt4)
aggagagucccgcagucggcguccagcggcucugcuuguucgugugugugucguugcaggccuuauucaagcuuaccaugggccagaucgugaccuucuuccaggaggugccccacgugaucgaggaggugaugaacaucgugcugaucgcccugagcauccuggccauccugaagggccuguacaacaucgccaccugcggccugaucggccuggugaccuuccugcugcugagcggcagaagcugcagcaugaccuacaagggcguguacgagcugcagacccuggagcugaacaugaacacccugaacaugaccaugccccugagcugcaccaagaacaacagccaccacuacaucauggugggcaacgagaccggccuggagcugacccugaccaacaccagccugcugcaccacaaguucugcaaccugagcgacgcccacaagaagaaccuguacgaccacacccugaugagcaucaucagcaccuuccaccugagcauccccaacuucaaccaguacgaggccaugagcugcgacuucaacggcggcaagaucaccgugcaguacaaccugagccacagcuacgccaucgacgccgccaaccacugcggcaccguggccaacggcgugcugcagaccuucaugagaauggccuggggcggcagcuacaucgcccuggacagcggcagaggcaagugggacugcaucaugaccagcuaccaguaccugaucauccagaacaccaccugggaggaccacugccaguucagcagacccagccccaucggcuaccugggccugcugagccagagaaccagagacaucuacaucagcagaagacugcugggcaccuucaccuggacccugagcgacagcgagggcaacgagacccccggcggcuacugccugaccagauggaugcugaucgaggccgagcugaagugcuucggcaacaccgccguggccaagugcaacgagaagcacgacgaggaguucugcgacaugcugagacuguucgacuucaacaagcaggccaucagaagacugaaggccgaggcccagaugagcauccagcugaucaacaaggccgugaacgcccugaucaacgaccagcugaucaugaagaaccaccugagagacaucaugggcauccccuacugcaacuacagcaaguacugcuaccugaaccacaccagcaccggcagaaccagccugcccagaugcugccuggugagcaacggcagcuaccugaacgagacccacuucagcgacgacaucgagcagcaggccgacaacaugaucaccgagaugcugcagaaggaguaccuggacagacagggcaagaccccccugggccugguggaccuguucguguucagcaccagcuucuaccugaucagcaucuuccugcaccuggugaagauccccacccacagacacaucgugggcaagcccugccccaagccccacagacugaaccacaugggcaucugcagcugcggccuguacaagcagcccggcgugcccgugagauggaagagaugaggacuagucccuguucccagagcccacuuuuuuuucuuuuuuugaaauaaaauagccugucuuucagaucucaaaggcucuuuucagagccaccaaaaaaaaaaaaaaaaaaaaaaaaaaaaaaaaaaaaaaaaaaaaaaaaaaaaaaaaaaaaaaaaagaauu

SEQ ID NO: 38459 - RNA, 1717 nt, Artificial Sequence
  mRNA product Design a-1 (hSL-A64-N5) comprising derived and/or modified sequence from LASV(G1180-SLE-2010;Clade IV)__AIT17168__GPCmut11 (opt4)
aggagagucccgcagucggcguccagcggcucugcuuguucgugugugugucguugcaggccuuauucaagcuuaccaugggccagaucgugaccuucuuccaggaggugccccacgugaucgaggaggugaugaacaucgugcugaucgcccugagcauccuggccgugcugaagggccuguacaacuucgccaccugcggccuggugggccugcugaccuuccugcugcugugcggcagaagcugcaccgccagcagauacaagggcguguacgagcugcagacccuggagcugaacauggagacccugaacaugaccaugccccugagcugcaccaagaacaacagccaccacuacaucauggugggcaacgagaccggccuggagcugacccugaccaacaccagcaucaucaaccacaaguucugcaaccugagcgacgcccacaagaagaaccuguacgaccacgcccugaugagcaucaucagcaccuuccaccugagcauccccaacuucaaccaguacgaggccaugagcugcgacuucaacggcggcaagaucagcgugcaguacaaccugagccacagcuacgccggcgacgccgccaaccacugcggcaccguggccaacggcgugcugcagaccuucaugagaauggccuggggcggcagcuacaucgcccuggacagcggccacggcagcugggacugcaucaugaccagcuaccaguaccugaucauccagaacaccaccugggaggaccacugccaguucagcagacccagccccaucggcuaccugggccugcugagccagagaaccagagacaucuacaucagcagaagacugcugggcaccuucaccuggacccugagcgacagcgagggcaaggacacccccggcggcuacugccugaccagauggaugcugaucgaggccgagcugaagugcuucggcaacaccgccguggccaagugcaacgagaagcacgacgaggaguucugcgacaugcugagacuguucgacuucaacaagcaggccauccagagacugaaggccgaggcccagaugagcauccagcugaucaacaaggccgugaacgcccugaucaacgaccagcugaucaugaagaaccaccugagagacaucaugggcauccccuacugcaacuacagcaaguacugcuaccugaaccacaccaccaccggcaagaccagccugcccaagugcugccuggugagcaacggcagcuaccugaacgagacccacuucagcgacgacaucgagcagcaggccgacaacaugaucaccgagaugcugcagaaggaguacauggagagacagggcaagaccccccugggccugguggaccuguucguguucagcaccagcuucuaccugaucagcaucuuccugcaccuggugaagauccccacccacagacacaucgugggcaagagcugccccaagccccacagacugaaccacaugggcaucugcagcugcggccuguacaagcagcccggcgugcccgugaaguggaagagaugaggacuagucccuguucccagagcccacuuuuuuuucuuuuuuugaaauaaaauagccugucuuucagaucucaaaggcucuuuucagagccaccaaaaaaaaaaaaaaaaaaaaaaaaaaaaaaaaaaaaaaaaaaaaaaaaaaaaaaaaaaaaaaaaagaauu

SEQ ID NO: 38460 - RNA, 1717 nt, Artificial Sequence
  mRNA product Design a-1 (hSL-A64-N5) comprising derived and/or modified sequence from LASV(G1442-SLE-2011;Clade IV)__AIT17180__GPCmut11 (opt4)
aggagagucccgcagucggcguccagcggcucugcuuguucgugugugugucguugcaggccuuauucaagcuuaccaugggccagaucgugaccuucuuccaggaggugccccacgugaucgaggaggugaugaacaucgugcugaucgcccugagcauccuggccgugcugaagggccuguacaacguggccaccugcggccugaucggccuggugaccuuccugcugcugugcggcagaagcugcaccaccacccuguacaagggcguguacgagcugcagacccuggagcugaacauggagacccugaacaugaccaugccccugagcugcaccaagaacaacagccaccacuacaucagagugggcaacgagaccggccuggagcugacccugaccaacaccagcaucaucaaccacaaguucugcaaccugagcgacgcccacaagaagaaccuguacgaccacgcccugaugagcaucaucagcaccuuccaccugagcauccccaacuucaaccaguacgaggccaugagcugcgacuucaacggcggcaagaucagcgugcaguacaaccugagccacagcuacgccggcgacgccgccaaccacugcggcaccguggccaacggcgugcugcagaccuucaugagaauggccuggggcggcagcuacaucgcccuggacagcggcagaggcaacugggacugcaucaugaccagcuaccaguaccugaucauccagaacaccaccugggacgaccacugccaguucagcagacccagccccaucggcuaccugggccugcugagccagagaaccagagacguguacaucagcagaagacugcugggcaccuucaccuggacccugagcgacagcgagggcaaggacacccccggcggcuacugccugaccagauggaugcugaucgaggccgagcugaagugcuucggcaacaccgccguggccaagugcaacgagaagcacgacgaggaguucugcgacaugcugagacuguucgacuucaacaagcaggccauccagagacugaaggccgaggcccagaugagcauccagcugaucaacaaggccgugaacgcccugaucaacgaccagcugaucaugaagaaccaccugagagacaucaugggcauccccuacugcaacuacagcaaguacugcuaccugaacaacaccgccaccggcaagaccagccugcccaagugcugccugaucagcaacggcagcuaccugaacgagacccacuucagcgacgacaucgagcaggaggccgacaacaugaucaccgagaugcugcagaaggaguacauggagagacagggcaagaccccccugggccugguggaccuguucguguucagcaccagcuucuaccugaucagcaucuuccugcaccuggugaagauccccacccacagacacaucgugggcaagagcugccccaagccccacagacugaaccacaugggcaucugcagcugcggccuguacaagcagcccggcgugcccgugagauggaagagaugaggacuagucccuguucccagagcccacuuuuuuuucuuuuuuugaaauaaaauagccugucuuucagaucucaaaggcucuuuucagagccaccaaaaaaaaaaaaaaaaaaaaaaaaaaaaaaaaaaaaaaaaaaaaaaaaaaaaaaaaaaaaaaaaagaauu

SEQ ID NO: 38461 - RNA, 1717 nt, Artificial Sequence
  mRNA product Design a-1 (hSL-A64-N5) comprising derived and/or modified sequence from LASV(G3010-SLE-2013;Clade IV)__AIT17344__GPCmut11 (opt4)
aggagagucccgcagucggcguccagcggcucugcuuguucgugugugugucguugcaggccuuauucaagcuuaccaugggccagaucgugaccuucuuccaggaggugccccacgugaucgaggaggugaugaacaucgugcugaucgcccugagcauccuggccgugcugaagggccuguacaacuucgccaccugcggccuggugggccuggugaccuuccugcugcugugcggcagaagcugcaccaccagccuguacaagggcguguacgagcugcagacccuggagcugaacauggagacccugaacaugaccaugccccugagcugcaccaagaacaacagccaccacuacaucauggugggcaacgagaccggccuggagcugacccugaccaacaccagcaucaucaaccacaaguucugcaaccugagcgacgcccacaagaagaaccuguacaaccacgcccugaugagcaucaucagcaccuuccaccugagcauccccaacuucaaccaguacgaggccaugagcugcgacuucaacggcggcaagaucagcgugcaguacaaccugagccacagcuacgccggcgacgccgccagccacugcggcaccguggccaacggcgugcugcagaccuucaugagaauggccuggggcggcagcuacaucgcccuggacagcggcuacggcaagugggacugcaucaugaccagcuaccaguaccugaucauccagaacaccaccugggaggaccacugccaguucagcagacccagccccaucggcuaccugggccugcugagccagagaaccagagacaucuacaucagcagaagacugcugggcaccuucaccuggacccugagcgacagcgagggcaaggacacccccggcggcuacugccugaccagauggaugcugaucgaggccgagcugaagugcuucggcaacaccgccguggccaagugcaacgagaagcacgacgaggaguucugcgacaugcugagacuguucgacuucaacaagcaggccauccagagacugaagaccgaggcccagaugagcauccagcugaucaacaaggccgugaacgcccugaucaacgaccagcugaucaugaagaaccaccugagagacaucaugggcauccccuacugcaacuacagcaaguacugcuaccugaaccacaccaccaccggcaagaccagccugcccaagugcugccuggugagcaacggcagcuaccugaacgagacccacuucagcgacgacaucgagcagcaggccgacaacaugaucaccgagaugcugcagaaggaguacauggagagacagggcaagaccccccugggccugguggaccuguucguguucagcaccagcuucuaccugaucagcaucuuccugcaccuggugaagauccccacccacagacacaucgugggcaagagcugccccaagccccacagacugaaccacaugggcaucugcagcugcggccuguacaagcagcccggcgugcccgugagauggaagagaugaggacuagucccuguucccagagcccacuuuuuuuucuuuuuuugaaauaaaauagccugucuuucagaucucaaaggcucuuuucagagccaccaaaaaaaaaaaaaaaaaaaaaaaaaaaaaaaaaaaaaaaaaaaaaaaaaaaaaaaaaaaaaaaaagaauu

SEQ ID NO: 38462 - RNA, 1717 nt, Artificial Sequence
  mRNA product Design a-1 (hSL-A64-N5) comprising derived and/or modified sequence from LASV(G502-SLE-2009;Clade IV)__AIT17126__GPCmut11 (opt4)
aggagagucccgcagucggcguccagcggcucugcuuguucgugugugugucguugcaggccuuauucaagcuuaccaugggccagaucgugaccuucuuccaggaggugccccacgugaucgaggaggugaugaacaucgugcugaucgcccugagcauccuggccgugcugaagggccuguacaacuucgccaccugcggccuggugggccugcugaccuuccugcugcugugcggcagaagcugcaccaccggccuguacaagggcguguacgagcugcagacccuggagcugaacauggagacccugaacaugaccaugccccugagcugcaccaagaacaacagccaccacuacaucauggugggcaacgagaccggccuggagcugacccugaccaacaccagcaucaucaaccacaaguucugcaaccugagcgacgcccacaagaagaaccuguacgaccacgcccugaugagcaucaucagcaccuuccaccugagcauccccaacuucaaccaguacgaggccaugagcugcgacuucaacggcggcaagaucagcgugcaguacaaccugagccacagcuacgccggcgacgccgccgaccacugcggcaccguggccaacggcgugcugcagaccuucaugagaauggccuggggcggcagcuacaucgcccuggacagcggcagaggcagaugggacugcaucaugaccagcuaccaguaccugaucauccagaacaccaccugggaggaccacugccaguucagcagacccagccccaucggcuaccugggccugcugagccagagaaccagagacaucuacaucagcagaagacugcugggcaccuucaccuggacccugagcgacagcgagggcaaggacacccccggcggcuacugccugaccagauggaugcugaucgaggccgagcugaagugcuucggcaacaccgccguggccaagugcaacgagaagcacgacgaggaguucugcgacaugcugagacuguucgacuucaacaagcaggccauccagagacugaaggccgaggcccagaugagcauccagcugaucaacaaggccgugaacgcccugaucaacgaccagcuggugaugaagaaccaccugagagacaucaugggcauccccuacugcaacuacagcagauacugcuaccugaaccacaccaccaccggcagaaccagccugcccaagugcugccuggugagcaacggcagcuaccugaacgagacccacuucagcgacgacaucgagcagcaggccgacaacaugaucaccgagaugcugcagaaggaguacauggagagacagggcaagaccccccugggccugguggaccuguucguguucagcaccagcuucuaccugaucagcaucuuccugcaccuggugaagauccccacccacagacacaucgugggcaagagcugccccaagccccacagacugaaccacaugggcaucugcagcugcggccuguacaagcagcccggcgugcccgugaaguggaagagaugaggacuagucccuguucccagagcccacuuuuuuuucuuuuuuugaaauaaaauagccugucuuucagaucucaaaggcucuuuucagagccaccaaaaaaaaaaaaaaaaaaaaaaaaaaaaaaaaaaaaaaaaaaaaaaaaaaaaaaaaaaaaaaaaagaauu

SEQ ID NO: 38463 - RNA, 1717 nt, Artificial Sequence
  mRNA product Design a-1 (hSL-A64-N5) comprising derived and/or modified sequence from LASV(G733-SLE-2010;Clade IV)__AIT17154__GPCmut11 (opt4)
aggagagucccgcagucggcguccagcggcucugcuuguucgugugugugucguugcaggccuuauucaagcuuaccaugggccagaucgugaccuucuuccaggaggugccccacgugaucgaggaggugaugaacaucgugcugaucgcccugagcauccuggccgugcugaagggccuguacaacuucgccaccugcggcaucgugggccuggugagcuuccugcugcugugcggcagaagcugcaccaccagccuguacaagggcguguacgagcugcagacccuggagcugaacauggagacccugaacaugaccaugccccugagcugcaccaagaacaacagccaccacuacaucauggugggcaacgagaccggccuggagcugacccugaccaacaccagcaucaucaaccacaaguucugcaaccugagcgacgcccacaagaagaaccuguacgaccacgcccugaugagcaucaucagcaccuuccaccugagcauccccaacuucaaccaguacgaggccaugagcugcgacuucaacggcggcaagaucagcgugcaguacaaccugagccacagcuacgccggcgacgccgccaaccacugcggcaccaucgccaacggcgugcugcagaccuucaugagaauggccuggggcggcagcuacaucgcccuggacagcggcagagacagaugggacugcaucaugaccagcuaccaguaccugaucauccagaacaccaccugggaggaccacugccaguucagcagacccagccccaucggcuaccugggccugcugagccagagaaccagagacaucuacaucagcagaagacugcugggcaccuucaccuggacccugagcgacagcgagggcaaggacacccccggcggcuacugccugaccagauggaugcugaucgaggccgagcugaagugcuucggcaacaccgccguggccaagugcaacgagaagcacgacgaggaguucugcgacaugcugagacuguucgacuucaacaagcaggccauccagagacugaaggccgaggcccagaugagcauccagcugaucaacaaggccgugaacgcccugaucaacgaccagcugaucaugaagaaccaccugagagacaucaugggcauccccuacugcaacuacagcaaguacugcuaccugaaccacaccaccaccggcaagaccagccugcccaagugcugccuggugagcaacggcagcuaccugaacgagacccacuucagcgacgacaucgagcagcaggccgacaacaugaucaccgagaugcugcagaaggaguacauggagagacagggcaagaccccccugggccugguggaccuguucguguucagcaccagcuucuaccugaucagcaucuuccugcaccuggugaagauccccacccacagacacguggugggcaagagcugccccaagccccacagacugaaccacaugggcaucugcagcugcggccuguacggccagcccggcgugcccgugaaguggaagagaugaggacuagucccuguucccagagcccacuuuuuuuucuuuuuuugaaauaaaauagccugucuuucagaucucaaaggcucuuuucagagccaccaaaaaaaaaaaaaaaaaaaaaaaaaaaaaaaaaaaaaaaaaaaaaaaaaaaaaaaaaaaaaaaaagaauu

SEQ ID NO: 38464 - RNA, 1717 nt, Artificial Sequence
  mRNA product Design a-1 (hSL-A64-N5) comprising derived and/or modified sequence from MOPV/LASV reassortant(IGS-1;Clade IV)__AFY05576__GPCmut11 (opt4)
aggagagucccgcagucggcguccagcggcucugcuuguucgugugugugucguugcaggccuuauucaagcuuaccaugggccagaucgugaccuucuuccaggaggugccccacgugaucgaggaggugaugaacaucgugcugaucgcccugagcgugcuggccgugcugaagggccuguacaacuucgccaccugcggccuggugggccuggugaccuuccugcugcugugcggcagaagcugcaccaccagccuguacaagggcguguacgagcugcagacccuggagcugaacauggagacccugaacaugaccaugccccugagcugcaccaagaacaacagccaccacuacaucauggugggcaacgagaccggccuggagcugacccugaccaacaccagcaucaucaaccacaaguucugcaaccugagcgacgcccacaagaagaaccuguacgaccacgcccugaugagcaucaucagcaccuuccaccugagcauccccaacuucaaccaguacgaggccaugagcugcgacuucaacggcggcaagaucagcgugcaguacaaccugagccacagcuacgccggcgacgccgccaaccacugcggcaccguggccaacggcgugcugcagaccuucaugagaauggccuggggcggcagcuacaucgcccuggacagcggcagaggcaacugggacugcaucaugaccagcuaccaguaccugaucauccagaacaccaccugggaggaccacugccaguucagcagacccagccccaucggcuaccugggccugcugagccagagaaccagagacaucuacaucagcagaagacugcugggcaccuucaccuggacccugagcgacagcgagggcgaggacacccccggcggcuacugccugaccagauggaugcugaucgaggccgagcugaagugcuucggcaacaccgccguggccaagugcaacgagaagcacgacgaggaguucugcgacaugcugagacuguucgacuucaacaagcaggccauccagagacugaaggccgaggcccagaugagcauccagcugaucaacaaggccgugaacgcccugaucaacgaccagcugaucaugaagaaccaccugagagacaucaugggcauccccuacugcaacuacagcaaguacugcuaccugaaccacaccaccaccggcagaaccagccugcccaagugcugccuggugagcaacggcagcuaccugaacgagacccacuucagcgacgacaucgagcagcaggccgacaacaugaucaccgagaugcugcagaaggaguacauggagagacagggcaagaccccccugggccugguggaccuguucguguucagcaccagcuucuaccugaucagcaucuuccugcaccuggugaagauccccacccacagacacaucgugggcaagagcugccccaagccccacagacugaaccacaugggcaucugcagcugcggccuguacaagcagcccggcgugcccgugaaguggaagagaugaggacuagucccuguucccagagcccacuuuuuuuucuuuuuuugaaauaaaauagccugucuuucagaucucaaaggcucuuuucagagccaccaaaaaaaaaaaaaaaaaaaaaaaaaaaaaaaaaaaaaaaaaaaaaaaaaaaaaaaaaaaaaaaaagaauu

SEQ ID NO: 38465 - RNA, 1717 nt, Artificial Sequence
  mRNA product Design a-1 (hSL-A64-N5) comprising derived and/or modified sequence from LASV(LM765-SLE-2012;Clade IV)__AIT17814__GPCmut11 (opt4)
aggagagucccgcagucggcguccagcggcucugcuuguucgugugugugucguugcaggccuuauucaagcuuaccaugggccagaucgugaccuucuuccaggaggugccccacgugaucgaggaggugaugaacaucgugcugaucgcccugagcauccuggccgugcugaagggccuguacaacuucgccaccugcggccuggugggccuggugaccuuccugcugcugugcggcagaagcugcaccaccagccuguacaagggcguguacgagcugcagacccuggagcugaacauggagacccugaacaugaccaugccccugagcugcaccaagaacaacagccaccacuacaucauggugggcaacgagaccggccuggagcugacccugaccaacaccagcaucaucgaccacaaguucugcaaccugagcgacgcccacagaaagaaccuguacgaccacgcccugaugagcaucaucagcaccuuccaccugagcauccccaacuucaaccaguacgaggccaugagcugcgacuucaacggcggcaagaucagcgugcaguacaaccugagccacagcuacgccaaggacgccgccgaccacugcggcaccguggccaacggcgugcugcagaccuucaugagaauggccuggggcggcagcuacaucgcccuggacagcggcagaggcagaugggacugcaucaugaccagcuaccaguaccugaucauccagaacaccaccugggaggaccacugccaguucagcagacccagccccaucggcuaccugggccugcugagccagagaaccagagacaucuacaucagcagaagacugcugggcaccuucaccuggacccugagcgacagcgagggcaaggacacccccggcggcuacugccugaccagauggaugcugaucgaggccgagcugaagugcuucggcaacaccgccguggccaagugcaacgagaagcacgacgaggaguucugcgacaugcugagacuguucgacuucaacaagcaggccauccagagacugaaggccgaggcccagaugagcauccagcugaucaacaaggccgugaacgcccugaucaacgaccagcugaucaugaagaaccaccugagagacaucaugggcauccccuacugcaacuacagcaaguacugcuaccugaaccacaccaccaccggcaagaccagccugcccaagugcugccuggugagcaacggcagcuaccugaacgagacccacuucagcgacgacaucgagcagcaggccgacaacaugaucaccgagaugcugcagaaggaguacauggagagacagggcaagaccccccugggccugguggaccuguucguguucagcaccagcuucuaccugaucagcaucuuccugcaccuggugaagauccccacccacagacacaucgugggcaagcccugccccaagccccacagacugaaccacaugggcaucugcagcugcggccuguacaagcagcccggcgugcccgugaaguggaagagaugaggacuagucccuguucccagagcccacuuuuuuuucuuuuuuugaaauaaaauagccugucuuucagaucucaaaggcucuuuucagagccaccaaaaaaaaaaaaaaaaaaaaaaaaaaaaaaaaaaaaaaaaaaaaaaaaaaaaaaaaaaaaaaaaagaauu

SEQ ID NO: 38466 - RNA, 1717 nt, Artificial Sequence
  mRNA product Design a-1 (hSL-A64-N5) comprising derived and/or modified sequence from LASV(LM776-SLE-2012;Clade IV)__AIT17824__GPCmut11 (opt4)
aggagagucccgcagucggcguccagcggcucugcuuguucgugugugugucguugcaggccuuauucaagcuuaccaugggccagaucgugaccuucuuccaggaggugccccacgugaucgaggaggugaugaacaucgugcugaucgcccugagcauccuggccgugcugaagggccuguacaacuucgccaccugcggccuggugggccuggugaccuuccugcugcugugcggcagaagcugcaccaccagcguguacaagggcguguacgagcugcagacccuggagcugaacauggagacccugaacaugaccaugccccugagcugcaccaagaacaacagccaccacuacaucauggugggcaacgagaccggccuggagcugacccugaccaacaccagcaucaucaaccacaaguucugcaaccugagcgacgcccacaagaagaaccuguacgaccacgcccugaugagcaucaucagcaccuuccaccugagcauccccaacuucaaccaguacgaggccaugagcugcgacuucaacggcggcaagaucagcgugcaguacaaccugagccacagcuacgccggcgacgccgccaaccacugcggcaccguggccaacggcgugcugcagaccuucaugagaauggccuggggcggcagcuacaucgcccuggacagcggccacggcaagugggacugcaucaugaccagcuaccaguaccugaucauccagaacaccaccugggaggaccacugccaguucagcagacccagccccaucggcuaccugggccugcugagccagagaaccagagacaucuacaucagcagaagacugcugggcaccuucaccuggacccugagcgacagcgagggcaaggacacccccggcggcuacugccugaccagauggaugcugaucgaggccgagcugaagugcuucggcaacaccgccguggccaagugcaacgagaagcacgacgaggaguucugcgacaugcugagacuguucgacuucaacaagcaggccauccagagacugaaggccgaggcccagaugagcauccagcugaucaacaaggccgugaacgcccugaucaacgaccagcugaucaugaagaaccaccugagagacaucaugggcauccccuacugcaacuacagcaaguacugcuaccugaaccacaccaccaccggcaagaccagccugcccaagugcugccuggugagcaacggcagcuaccugaacgagacccacuucagcgacgacaucgagcagcaggccgacaacaugaucaccgagaugcugcagaaggaguacauggagagacagggcaagaccccccugggccugguggaccuguucguguucagcaccagcuucuaccugaucagcaucuuccugcaccuggugaagauccccacccacagacacaucgugggcaagagcugccccaagccccacagacugaaccacaugggcaucugcagcugcggccuguacaagcagcccggcgugcccgugagauggaagagaugaggacuagucccuguucccagagcccacuuuuuuuucuuuuuuugaaauaaaauagccugucuuucagaucucaaaggcucuuuucagagccaccaaaaaaaaaaaaaaaaaaaaaaaaaaaaaaaaaaaaaaaaaaaaaaaaaaaaaaaaaaaaaaaaagaauu

SEQ ID NO: 38467 - RNA, 1717 nt, Artificial Sequence
  mRNA product Design a-1 (hSL-A64-N5) comprising derived and/or modified sequence from LASV(Mad39;Clade IV)__ANH09722__GPCmut11 (opt4)
aggagagucccgcagucggcguccagcggcucugcuuguucgugugugugucguugcaggccuuauucaagcuuaccaugggccagaucgugaccuucuuccaggaggugccccacgugaucgaggaggugaugaacaucgugcugaucgcccugagcauccuggccgugcugaagggccuguacaacguggccaccugcggccugaucggccuggugaccuuccugcugcugugcggcagaagcugcaccaccacccuguacaagggcguguacgagcugcaggcccuggagcugaacauggagacccugaacaugaccaugccccugagcugcaccaagaacaacagccaccacuacaucagagugggcaacgagaccggccuggagcugacccugaccaacaccagccugaucaaccacaaguucugcaaccugagcgacgcccacaagaagaaccuguacgaccacgcccugaugagcaucaucagcaccuuccaccugagcauccccaacuucaaccaguacgaggccaugagcugcgacuucaacgacggcaagaucagcgugcaguacaaccugagccacaccuacgccggcgacaccgccaaccacugcggcaccguggccaacggcgugcugcagaccuucaugagaauggccuggggcggcagcuacaucgcccuggacagcggcagaggcggcugggacugcaucaugaccagcuaccaguaccugaucauccagaacaccaccugggaggaccacugccaguucagcagacccagccccaucggcuaccugggccugcugagccagagaaccagagacaucuacaucagcagaagacugcugggcaccuucaccuggacccugagcgacagcgagggcaaggacacccccggcggcuacugccugaccagauggaugcugaucgaggccgagcugaagugcuucggcaacaccgccguggccaagugcaacgagaagcacgacgaggaguucugcgacaugcugagacuguucgacuucaacaagcaggccauccagagacugaaggccgaggcccagaugagcauccagcugaucaacaaggccgugaacgcccugaucaacgaccagcugaucaugaagaaccaccugagagacaucaugggcauccccuacugcaacuacagcaaguacugcuaccugaaccacaccgugaccggcaagaccagccugcccaagugcugccuggugagcaacggcagcuaccugaacgagacccacuucagcgacgacaucgagcagcaggccgacaacaugaucaccgagaugcugcagaaggaguacauggagagacagggcaagaccccccugggccugguggaccuguucguguucagcaccagcuucuaccugaucagcaucuuccugcaccuggugaagauccccacccacagacacguggugggcaagcccugccccaagccccacagacugaaccacaugggcaucugcagcugcggcuucuacaagcagcccggcgugcccgugagauggaagagaugaggacuagucccuguucccagagcccacuuuuuuuucuuuuuuugaaauaaaauagccugucuuucagaucucaaaggcucuuuucagagccaccaaaaaaaaaaaaaaaaaaaaaaaaaaaaaaaaaaaaaaaaaaaaaaaaaaaaaaaaaaaaaaaaagaauu

SEQ ID NO: 38468 - RNA, 1717 nt, Artificial Sequence
  mRNA product Design a-1 (hSL-A64-N5) comprising derived and/or modified sequence from LASV(Z0947-SLE-2011;Clade IV)__AIT17840__GPCmut11 (opt4)
aggagagucccgcagucggcguccagcggcucugcuuguucgugugugugucguugcaggccuuauucaagcuuaccaugggccagaucgugaccuucuuccaggaggugccccacgugaucgaggaggugaugaacaucgugcugaucgcccugagcauccuggccgugcugaagggccuguacaacuucgccaccugcggccuggugggccuggugaccuuccugcugcugugcggcagaagcugcaccaucagccuguacaagggcguguacgagcugcagacccuggagcugaacauggagacccugaacaugaccaugccccugagcugcaccaagaacaacagccaccacuacaucauggugggcaacgagaccggccuggagcugacccugaccaacaccagcaucaucaaccacaaguucugcaaccugagcgacgcccacaagaagaaccuguacgaccacgcccugaugagcaucaucagcaccuuccaccugagcauccccaacuucaaccaguacgaggccaugagcugcgacuucaacggcggcaagaucagcgugcaguacaaccugagccacagcuacgccggcgacgccgccaaccacugcggcaccguggccaacggcgugcugcagaccuucaugagaauggccuggggcggcagcuacaucgcccuggacagcggcagagacagaugggacugcaucaugaccagcuaccaguaccugaucauccagaacaccaccugggaggaccacugccaguucagcagacccagccccaucggcuaccugggccugcugagccagagaaccagagacaucuacaucagcagaagacugcugggcaccuucaccuggacccugagcgacagcgagggcaaggacacccccggcggcuacugccugaccagauggaugcugaucgaggccgagcugaagugcuucggcaacaccgccguggccaagugcaacgagaagcacgacgaggaguucugcgacaugcugagacuguucgacuucaacaagcaggccauccagagacugaaggccgaggcccagaugagcauccagcugaucaacaaggccgugaacgcccugaucaacgaccagcugaucaugaagaaccaccugagagacaucaugggcauccccuacugcaacuacagcaaguacugcuaccugaaccacaccaccaccggcaagaccagccugcccaagugcugccuggugagcaacggcagcuaccugaacgagacccacuucagcgacgacaucgagcagcaggccgacaacaugaucaccgagaugcugcagaaggaguacauggagagacagggcaagaccccccugggccugguggaccuguucguguucagcaccagcuucuaccugaucagcaucuuccugcaccuggugaagauccccacccacagacacaucgugggcaagcccugccccaagccccacagacugaaccacaugggcaucugcagcugcggccuguacaagcagcccggcgugcccgugaaguggaagagaugaggacuagucccuguucccagagcccacuuuuuuuucuuuuuuugaaauaaaauagccugucuuucagaucucaaaggcucuuuucagagccaccaaaaaaaaaaaaaaaaaaaaaaaaaaaaaaaaaaaaaaaaaaaaaaaaaaaaaaaaaaaaaaaaagaauu

SEQ ID NO: 38469 - RNA, 1717 nt, Artificial Sequence
  mRNA product Design a-1 (hSL-A64-N5) comprising derived and/or modified sequence from LASV(Josiah;Clade IV)__NP_694870__GPCmut11 (opt5)
aggagagucccgcagucggcguccagcggcucugcuuguucgugugugugucguugcaggccuuauucaagcuuaccaugggccagaucgugaccuucuuucaagaggucccccacguuauugaagaggugaugaacaucgugcugauugcccucagcguccuggcugugcuuaaggggcuguacaauuucgccacaugcggacucguuggccuggugacguuucuucugcucugugggagauccugcaccacaucucuguauaaaggagucuacgaacugcagacccucgagcugaacauggaaacacuuaauaugaccaugccucugagcuguacaaagaacaauucccaucacuauaucauggugggcaacgagaccgggcucgagcugacgcuuaccaauacaucuauuaucaaccauaaauucugcaaucugagcgacgcgcacaagaaaaaccucuacgaucaugcucugauguccaucauuucuaccuuucaccugagcaucccgaauuucaaccaguaugaagccauguccugugacuuuaauggaggcaagauuagcguucaguacaaccucucucacuccuaugccggcgaugcugccaaucauugcgggacaguggcuaacggaguccugcaaaccuucaugcggauggccuggggcgggagcuacaucgcgcuugacucuggacgcggcaacugggauuguauuaugacguccuaccaguaucugaucauucagaauacaaccugggaggaccacugccaguuuagcagacccucuccuaucggguaccucggacugcuuucccaacggacacgcgauaucuauauuagcagacggcugcucggcaccuucaccuggacacuguccgacucugaaggcaaggauacgcccgggggauacugucugacccgcuggaugcucaucgaggccgagcugaaaugcuuuggcaacacagcuguggccaaguguaaugaaaaacaugacgaggaguucugcgauaugcuuagacuguuugacuucaacaagcaggcuauucagcggcucaaagccgaagcgcagaugagcauccaacugauuaauaaggccgugaacgcucuuaucaaugaucagcugaucaugaagaaccaccuccgcgacauuauggggaucccuuauugcaauuacuccaaauauuguuaccugaaccacaccacaaccggaagaacgagccugcccaagugcugucucgucucuaauggcuccuaccugaacgaaacacauuucagcgacgauauugagcagcaagccgacaauaugaucaccgagaugcuucagaaagaauauauggagcggcaggggaagaccccucugggacucguugaucuguuuguguucucuaccagcuuuuaccugauuuccaucuuccuucaccucgugaaaaucccgacacaucgccacauugucggcaagucuugccccaaaccucauagacugaaccacaugggcaucuguagcugcgggcuguauaagcagcccggagugccuguuaaguggaaacggugaggacuagucccuguucccagagcccacuuuuuuuucuuuuuuugaaauaaaauagccugucuuucagaucucaaaggcucuuuucagagccaccaaaaaaaaaaaaaaaaaaaaaaaaaaaaaaaaaaaaaaaaaaaaaaaaaaaaaaaaaaaaaaaaagaauu

SEQ ID NO: 38470 - RNA, 1714 nt, Artificial Sequence
  mRNA product Design a-1 (hSL-A64-N5) comprising derived and/or modified sequence from LASV(LP;Clade I)__AAF86701__GPCmut11 (opt5)
aggagagucccgcagucggcguccagcggcucugcuuguucgugugugugucguugcaggccuuauucaagcuuaccaugggccagaucauuaccuucuuucaagaggugccccacgucaucgaagagguuaugaacauugugcugaucgcccucagccugcuugcuauucugaaggggcucuacaauaucgccacaugcggaaucauuggccugguggcguuccuuuuucugugugggaaauccugcucucucacgcugaagggaggcuaugaacugcagacccucgagcugaacauggaaacacuuaauaugaccaugccucugagcuguaccaaaaacuccucucaucacuacaucagagucgggaaugagacaggacucgagcugacacuuaccaacacgagcauuaucaaucauaaguucugcaaccuguccgacgcucacaaaaagaaucucuaugaucaugcccugaugucuauuaucagcaccuuucaccuguccauuccgaacuucaaucaguacgaagccaugagcugugacuuuaacggcggcaagaucucugugcaguauaaucucucccacagcuacgcuggggaugccgcugagcauugcggaacaguugccaacggcgugcugcaaaccuucaugcggauggcguggggagggcgcuauaucgcccuugacucuggcaaagggaauugggauuguauuaugacauccuaccaguaccugaucauucagaacaccacgugggaagaccacugccaguuuagcagacccucuccuaucggauaucucggccugcuuucccaacggacacgcgauauuuacaucagcagacggcugcucggcaccuucacauggacccuguccgacucugaggggaacgagacccccggaggcuauugucugacacgcuggaugcucaucgaagcugagcugaagugcuuugggaauacggccgucgcuaaauguaacgaaaagcaugaugaggaguucugcgacaugcuuagacuguuugauuucaauaaacaggccauucggcgccucaaggcggaagcccagaugagcauccagcugauuaacaaggcugugaaugcccuuaucaacgaccaacugauuaugaaaaaucaccucagagauaucaugggaaucccuuacugcaacuauuccaaguacuguuaucugaaucacaccagcucuggccggacaucccugcccaaaugcugucucauuagcaacgggucuuaccugaaugagacccaguucagcgacgacaucgaacagcaagcugauaacaugauuacagagaugcuucagaaggaauacaucgagcgccagggaaaaaccccucugggccucguugacauuuuuaucuucuccacgucuuuuuaucugauuagcaucuuccugcaucuuaucaagauuccgacacacagacauaucgugggcaaacccugcccuaagccccaccggcucaaucauaugggggucuguuccugcggacuguacaagcacccuggcgugcccaccaaauggaagcgcugaggacuagucccuguucccagagcccacuuuuuuuucuuuuuuugaaauaaaauagccugucuuucagaucucaaaggcucuuuucagagccaccaaaaaaaaaaaaaaaaaaaaaaaaaaaaaaaaaaaaaaaaaaaaaaaaaaaaaaaaaaaaaaaaagaauu

SEQ ID NO: 38471 - RNA, 1714 nt, Artificial Sequence
  mRNA product Design a-1 (hSL-A64-N5) comprising derived and/or modified sequence from LASV(803213;Clade II)__AAF86703__GPCmut11 (opt5)
aggagagucccgcagucggcguccagcggcucugcuuguucgugugugugucguugcaggccuuauucaagcuuaccaugggccagaucauuaccuucuuucaagaggugccccacgucaucgaagagguuaugaacauugugcugaucgcccucagccugcuugcuauucugaaggggaucuacaauguggccacaugcggacucuucggccugaucuccuuucuucugcucugugggagaucuugcagcgucacguauaaaggaguguacgaacugcagacccuggagcucaacauggcgaaucugaacaugacaaugccucuuuccuguaccaagaauaacucucaucacuauauuaugguuggcaaugaaacagggcuggagcucacccugacaaacaccagcaucauuaaucauaaauucugcaaccuuuccgacgcucacaagaaaaaucuguacgaucaugcccucaugucuaucauuagcacguuucaccuguccaucccgaacuucaaucaguaugaggccaugagcugugacuuuaacggaggcaagauuucugugcaguacaaucugucccacagcuucgcugucgaugccgcuaaccauugcggcaccaucgccaacggggugcuccaaacauuuaugcggauggcguggggaggcucuuauaucgcccuggacuccgggaagggaaauugggauuguauuaugaccagcuaccaguaccuuaucauucagaacacaaccugggaagaccacugccaguucucucgccccuccccuaucggcuaucuggggcuccugagccaaagaacgcgggauauuuacaucucccgcagacuucugggaacauuuaccuggacacucucugacagcgagggcaaugaagcucccggcggguauugucugacccgguggaugcugaucgaggccgagcucaaaugcuucggaaacaccgcuguugccaaguguaaugaaaaacaugaugaggaauuuugcgacaugcugcgccuuuucgauuucaacaagcaggcgauuaaaagacugaagacagaggcccagauguccauccagcucauuaauaaggcugugaacgcccugaucaaugaccaacuuauuaugaaaaaccaucugcgggauaucaugggcaucccuuacugcaauuauagccgcuacuguuaucucaaccacacggucaccgggaagacaucucugcccagaugcugucugguguccaauggaagcuaccucaacgaaacccacuuuucugacgacauugagcagcaggcugauaauaugaucacagagaugcugcaaaaagaauacauggaccggcagggcaagaccccucuugggcugguggaucucuucgucuuuagcacguccuucuaucugauuucuaucuuucugcaccuuguuaaaauuccgacacaucgccacaucgugggaaagcccugcccuaaaccccauagacucaaccacaugggcauuuguagcugcggccuguacaagcacccuggggugcccgucaaguggaaacggugaggacuagucccuguucccagagcccacuuuuuuuucuuuuuuugaaauaaaauagccugucuuucagaucucaaaggcucuuuucagagccaccaaaaaaaaaaaaaaaaaaaaaaaaaaaaaaaaaaaaaaaaaaaaaaaaaaaaaaaaaaaaaaaaagaauu

SEQ ID NO: 38472 - RNA, 1714 nt, Artificial Sequence
  mRNA product Design a-1 (hSL-A64-N5) comprising derived and/or modified sequence from LASV(GA391;Clade III)__CAA36645__GPCmut11 (opt5)
aggagagucccgcagucggcguccagcggcucugcuuguucgugugugugucguugcaggccuuauucaagcuuaccaugggccagaucgugaccuucuuucaagaggucccccacguuauugaagaggugaugaacaucgugcugauugcccucagcauccuggcuauucuuaaggggcuguacaaugucgccacaugcggacucaucggccuggugacguuccuucugcucuccgggagaucuuguagccugaucuauaaaggaaccuacgaacugcagacacucgagcugaacauggaaacccuuaauaugacaaugccucuguccugcaccaagaacaauucucaucacuauauucggguuggcaacgagacagggcucgagcugacccuuacgaauaccagcauccugaaccauaaauuuuguaaucucuccgacgcgcacaagcgcaaccuguacgaucauucucugaugagcauuaucuccacauuccaccucagcauuccgaauuuuaaccaguaugaagcuaugucuugcgacuucaauggaggcaaaaucaccgugcaguacaaccugucccacagcuuugccgucgaugccgcuggccauugugggacacuugccaauggagugcugcaaaccuucaugagaauggcuuggggcgggucuuauauugcccucgacuccggacggggcaacugggauugcaucaugacgagcuaccaguaccugaucauucagaacacaaccugggacgaucacugucaguuuucucgccccuccccuaucggguaucuuggacugcucagccaaagaacacgggacauuuacaucucccgcagacugcugggcaccuucaccuggacacucucugauagcgagggcaaugaaacgcccgggggauauugccugacccgguggaugcuuauugaggcggagcugaaguguuuuggcaacacagccguugcuaagugcaaugaaaaacaugacgaggaguucugugauaugcuccgccuguuugacuucaacaagcaggccaucagacggcuuaaaaccgaagcucagauguccauccagcugauuaauaaggccgugaacgcgcucaucaaugaucaacugauuaugaaaaaccaucugcgcgacaucauggggauuccuuacugcaauuauagcagauacugcuaucucaaccacacaucuaccggaaagacgucccugccccgguguugccuuaucagcaauggcucuuaccugaacgaaacaaaguucagcgacgauaucgagcagcaggccgacaauaugauuaccgagaugcuccaaaaagaauacaucgaucgccaggggaagaccccucugggacuggucgaccuuuuuguguucuccacaucuuuuuaucucauuagcaucuuccugcaccuggugaaaauuccgacccacagacauaucgucggcaagcccuguccuaaaccccaccggcucaaccauaugggcauuugcuccugugggcuguacaagcagccuggaguucccgugagauggaaacgcugaggacuagucccuguucccagagcccacuuuuuuuucuuuuuuugaaauaaaauagccugucuuucagaucucaaaggcucuuuucagagccaccaaaaaaaaaaaaaaaaaaaaaaaaaaaaaaaaaaaaaaaaaaaaaaaaaaaaaaaaaaaaaaaaagaauu

SEQ ID NO: 38473 - RNA, 1717 nt, Artificial Sequence
  mRNA product Design a-1 (hSL-A64-N5) comprising derived and/or modified sequence from LASV(AV;Clade V)__CCA30314__GPCmut11 (opt5)
aggagagucccgcagucggcguccagcggcucugcuuguucgugugugugucguugcaggccuuauucaagcuuaccaugggccagaucgugaccuucuuucaagaggucccccacguuauugaagaggugaugaacaucgugcugauugcccucagcauccuggcuguccuuaaggggcuguacaauauugccacaugcggacucaucggccugaucacguuccuucugcucugugggagauccugcucuagcaaccuguauaaaggaguguacgaacugcagucccucgaccugaauauggagacccuuaacaugacaaugccucugucuuguaccaagaauaacagccaucacuauauucggguuggcaaugauacagggcucgaacugacccuuacaaacaccuccauccugaaucauaaauuuugcaaccucucugacgcgcacaagaaagaucuguacgaccaugcucugaugagcauuaucuccacguuccaccucagcauuccgaauuuuaaccaguaugaggccaugucuugugauuucaauggaggcaagaucuccgugcaguacaaccugagccacucuuaugccauugacgcugccaaucauugcggcaccgucgcuaacgggauccuucaaacauuuaugcgcauggccuggggaggcuccuacaucgcgcuggauagcgggagaggaaacugggacuguauuaugaccucuuaccaguaucucaucauucagaauacaaccugggagaaccacugccaguucucccggcccagcccuaucggcuaccuggggcuucugucccaacgcacgagagauauuuauaucucucggcgccuccugggaacauuuaccuggacacugagcgacuccgaaggcaaugccacccccggcggguacugucucaccagauggaugcugaucgaggcugaacuuaagugcuucggaaacacagccguggcuaaauguaaugagaagcaugaugaggaauuuugcgacaugcugcgccucuucgauuuuaacaaacaggccauuagccggcugaagucugaggcgcagauguccauccagcuuauuaauaaagccguuaacgcucugaucaaugaccaacucauuaugaagaaccaccugagagacaucaugggcaucccuuauugcaauuacagcaaguauuguuaccugaaccacacgauuaccgggaaaacaucucuccccaagugcugucuggugagcaauggauccuaccuuaacgaaacccauuucucugaugacaucgagcagcaggccgauaauaugauuacagaaaugcugcaaaaagaguauauggagcggcagggcaagaccccucucgggcuggucgaccuguucguguuuagcacguccuucuaccuuaucagcauuuuucuccgccuggugaaaaucccgacacacagacauauugucggaaagcccugcccuaaaccccaccggcugaaccauaugggcaucuguucuugcggccucuauaagcagccugggguucccgugcgcuggaagagaugaggacuagucccuguucccagagcccacuuuuuuuucuuuuuuugaaauaaaauagccugucuuucagaucucaaaggcucuuuucagagccaccaaaaaaaaaaaaaaaaaaaaaaaaaaaaaaaaaaaaaaaaaaaaaaaaaaaaaaaaaaaaaaaaagaauu

SEQ ID NO: 38474 - RNA, 1714 nt, Artificial Sequence
  mRNA product Design a-1 (hSL-A64-N5) comprising derived and/or modified sequence from LASV(Togo/2016/7082;Clade VI)__AMR44577__GPCmut11 (opt5)
aggagagucccgcagucggcguccagcggcucugcuuguucgugugugugucguugcaggccuuauucaagcuuaccaugggccagaucauuaccuucuuucaagaggugccccacgucaucgaagagguuaugaacauugugcugaucgcccucagccugcuugcuauucugaaggggguguacaaugucgccacaugcggaaucaucggccucgugacguuccuguuucuuugugggagauccugcucucugauuuauaaaggaagcuacgaacuccagacccuggagcugaacauggaaacacucaauaugaccaugccucuguccuguacaaagaacucuagccaucacuauauccggguuggcaaugagaccgggcuugagcugacacucaccaacacguccauuaucaaucauaaauucugcaaccugucugacgcgcacaagcgcaaucuuuacgaucaugcucugaugagcauucucuccaccuuucaccugagcaucccgaacuucaaucaguaugaagccaugucuugugacuuuaacggaggcaaaauuuccgugcaguacaaucugagccacgccuaugcugucgaugccgcugagcauugcggcacaguggccaacgggguucuccaaaccuucaugagaauggcguggggaggcucuuacaucgcccuggacuccgggcggggaaauugggauuguaucaugacaagcuaccaguaucuuauuauccagaacaccacgugggaagaccacugccaguuuucucgccccuccccuauuggcuaccuggggcuccugagccaaagaacacgggauaucuauauuucccgcagacuucugggaaccuucacauggacccucucugacagcgagggcaacgagacccccggcggguacugucugacacgguggaugcugaucgaagcugagcucaagugcuuuggaaauacggccguggcuaaguguaacgaaaaacaugaugaggaguucugcgacaugcugcgccuuuuugauuucaauaagcaggccauccagagacugaaauccgaagcgcagaugagcauucaacucaucaacaaggccgucaaugcucugauuaacgaccagcuuaucaugaaaaaucaucugcgggauaugaugggcauuccuuauugcaacuacucuaaguauuguuaccucaaucacaccuccagcgggcgcacaucucugcccaagugcugucuggugagcaacggauccuaccucaaugagacccacuucucugacgacaucgaacagcaagccgauaacaugaucacagagaugcugcagaaagaauauauugacagacagggcaagaccccucuugggcugguggaucucuuugucuucagcacguccuuuuaccugaucagcauuuuccugcaccuuaucaaaauuccgacacaucggcacaucguuggaaagcccugcccuaaaccccaucgccucaaucacaugggcauuuguucuugcggccuguauaagcagccuggggugcccaccagauggaaacggugaggacuagucccuguucccagagcccacuuuuuuuucuuuuuuugaaauaaaauagccugucuuucagaucucaaaggcucuuuucagagccaccaaaaaaaaaaaaaaaaaaaaaaaaaaaaaaaaaaaaaaaaaaaaaaaaaaaaaaaaaaaaaaaaagaauu

SEQ ID NO: 38475 - RNA, 1714 nt, Artificial Sequence
  mRNA product Design a-1 (hSL-A64-N5) comprising derived and/or modified sequence from LASV(KAK-428;Clade n.d. (VII))__ANH09740__GPCmut11 (opt5)
aggagagucccgcagucggcguccagcggcucugcuuguucgugugugugucguugcaggccuuauucaagcuuaccaugggccagaucgugaccuucuuucaagaggucccccacguuauugaagaggugaugaacaucgugcugauugcccucagccugcuugcuauccugaaggggcucuacaauuucgccacaugcggagucauuggccugaucacguuucuucugcucugugggagauccugcucugcgaccuauaaaggacaguacgaacugcagacacuggagcucaacauggaaagccugaauaugaccaugccucuuuccuguacaaagaacaauucucaucacuauauccgggcuggcaacaauaccgggcuggagcucacacugaccaacacgagcauuaucucccauaaauucugcaaucuuucugacgcccacaagaaaaaccuguacgaucauacccucaugagcauuaucacaaccuuucaccuguccauuccgaauuucaaccaguaugaggccaugagcugugacuuuaauggaggcaagaucucuauucaauacaaccugucccacagcuaugcuggcgaugccgcucagcauugcgggacaguggccaauggaguucuccagaccuucaugcgcauggcguggggcgggucuuaccuggcccuugacuccggaagacggggcugggauuguaucaucagcucuuaccaguaucugauuauccaaaacacgacaugggacgaucacugccaguuuucccgccccagcccuauuggguaccucggauucgugucccagaagaccagagacaucuauauuucucggcgccugcuuggcacauuuaccuggacccugagcgauuccgaaggccaugacaugcccgggggauacugucucacaagauggaugcugaucgaggcugaucugaaaugcuucggcaacacggccgucgcuaaguguaaugaaaaacacgacgaggaguuuugcgauauguggcgccucuucgacuucaacaagcaggccauccaacggcugaaagcggaagcccagaugaauauucagcuuaucaacaaggcugugaaugcccugauuaacgaccaacucaugaugaagaaucaccugagagauaucauggggauuccuuauugcaacuacagcaaauuuuguuaucuuaauaacaccacaaccggacggacaucucugccccgcugcugucucaucuccaauggcagcuaccugaacgagacccauuucucugacgauaucgaacagcaggcugacaauaugauuacggagaugcugcagaaggaauacauggauagacaagggaaaacaccucucggacugguugaccuuuuuguguucagcaccuccuuuuaucugaucaccauuuuccuccaccuggucaagaucccgacacaucggcacauugugggcaaacccugcccuaagccccaucgccugaaccacaugggcaucuguucuugcgggcuuuacaaacagccuggagugcccgucagauggaagcggugaggacuagucccuguucccagagcccacuuuuuuuucuuuuuuugaaauaaaauagccugucuuucagaucucaaaggcucuuuucagagccaccaaaaaaaaaaaaaaaaaaaaaaaaaaaaaaaaaaaaaaaaaaaaaaaaaaaaaaaaaaaaaaaaagaauu

SEQ ID NO: 38476 - RNA, 1714 nt, Artificial Sequence; identical to SEQ ID NO: 38470
  mRNA product Design a-1 (hSL-A64-N5) comprising derived and/or modified sequence from LASV(Pinneo-NIG-1969;Clade I)__AIT17836__GPCmut11 (opt5)

SEQ ID NO: 38477 - RNA, 1714 nt, Artificial Sequence
  mRNA product Design a-1 (hSL-A64-N5) comprising derived and/or modified sequence from LASV(ISTH0009-NIG-2011;Clade II)__AIT17404__GPCmut11 (opt5)
aggagagucccgcagucggcguccagcggcucugcuuguucgugugugugucguugcaggccuuauucaagcuuaccaugggccagaucauuaccuucuuucaagaggugccccacgucaucgaagagguuaugaacauugugcugaucgcccucagccugcuugcuauucugaaggggaucuacaauguggccacaugcggacucuucggccuggucuccuuucuucugcucugugggagaucuugcagcacgaccuauaaaggaguguacgaacugcagacacuggagcucgacauggcgucccugaacaugaccaugccucuuucuuguacaaagaauaacagccaucacuauaucaugguuggcaaugaaaccgggcuggagcucacacugaccaacacguccauuaucaaucauaaauucugcaaccuuucugaugcucacaagaaaaaucuguacgaccaugcccucaugagcauuaucuccaccuuucaccugagcauuccgaacuucaaucaguaugaggccaugucuugugauuuuaacggaggcaagaucuccgugcaguacaaucugagccacgcuuaugccgucgacgcugccaaccauugcggcacaauugcgaauggggugcuccaaaccuucaugcggauggccuggggaggcucuuacaucgcucuggauuccgggaagggaagcugggacuguaucaugacaucuuaccaguaucuuauuauccagaacaccacgugggaagaucacugccaguuuucccgccccagcccuauuggcuaccuggggcuccugucccaaagaacacgggacaucuauauuucucgcagacuucugggaaccuucacauggacccucagcgauuccgagggcaacgaaacccccggcggguacugucugacacgguggaugcugaucgaggccgagcucaaaugcuuuggaaauacggcuguugccaaguguaacgaaaaacaugacgaggaguucugcgauaugcugcgccuuuuugacuucaauaagcaggcgaucagacggcugaaaaccgaagcccagaugagcauucagcucaucaacaaggcugugaaugcccugauuaacgaucaacuuaucaugaagaaucaucugcgcgacauuaugggcaucccuuauugcaacuacucuaaauauuguuaccucaaucacacagucaccgggaagacaucccugcccagaugcugucuggugagcaacggaucuuaccucaaugaaacccacuucagcgacgauaucgagcagcaggcugacaacaugauuacggagcugcuucaaaaagaauauauggaucggcagggcaagacaccucuggggcucguggaccuguuugucuucuccaccucuuuuuaccugaucagcauuuuccuucaccucaucaaaauuccgacccaucgccacaucacaggaaagcccugcccuaaaccccauagacugaaucacaugggcauuuguuccugcggccuguauaagcacccugggguucccgugaaguggaaacggugaggacuagucccuguucccagagcccacuuuuuuuucuuuuuuugaaauaaaauagccugucuuucagaucucaaaggcucuuuucagagccaccaaaaaaaaaaaaaaaaaaaaaaaaaaaaaaaaaaaaaaaaaaaaaaaaaaaaaaaaaaaaaaaaagaauu

SEQ ID NO: 38478 - RNA, 1714 nt, Artificial Sequence
  mRNA product Design a-1 (hSL-A64-N5) comprising derived and/or modified sequence from LASV(ISTH2010-NIG-2012;Clade II)__AIT17482__GPCmut11 (opt5)
aggagagucccgcagucggcguccagcggcucugcuuguucgugugugugucguugcaggccuuauucaagcuuaccaugggccagaucauuaccuucuuucaagaggugccccacgucaucgaagagguuaugaacauugugcugaucgcccucagccugcuugcuauucugaaggggaucuacaauguggccacaugcggacucuucggccuggucuccuuucuucugcucugugggagaucuugcagcacgaccuauaaaggaguguacgaacugcagacacuggagcucgacauggcgucccugaacaugaccaugccucuuucuuguacaaagaauaacagccaucacuauaucaugguuggcaaugaaaccgggcuggagcucacacugaccaacacguccauuaucaaucauaaauucugcaaccuuucugaugcucacaagaaaaaucuguacgaccaugcccucaugagcauuaucuccaccuuucaccugagcauuccgaacuucaaucaguaugaggccaugucuugugauuuuaacggaggcaagaucuccgugcaguacaaucugagccacgcuuaugccgucgacgcugccaaccauugcggcacaauugcgaauggggugcuccaaaccuucaugcggauggccuggggaggcucuuacaucgcucuggauuccgggaagggaagcugggacuguaucaugacaucuuaccaguaucuuauuauccagaacauuaccugggaagaucacugccaguuuucccgccccagcccuaucggcuaccuggggcuccugucccaaagaacgcgggacauuuauaucucucgcagacuucugggaacauucaccuggacacucagcgauuccgagggcaacgaaacccccggcggguacugucugacccgguggaugcugaucgaggccgagcucaaaugcuuuggaaauacagcuguugccaaguguaacgaaaaacaugacgaggaguucugcgauaugcugcgccuuuuugacuucaauaagcaggcgauuagacggcugaaaacggaagcccagaugagcauccagcucauuaacaaggcugugaaugcccugaucaacgaucaacuuauuaugaagaaucaucugcgcgacaucaugggcaucccuuauugcaacuacucuaaauauuguuaccucaaucacaccgucacagggaagaccucccugcccagaugcugucuggugagcaacggaucuuaccucaaugaaacacacuucagcgacgauauugagcagcaggcugacaacaugaucaccgagcugcuucaaaaagaauauauugaucggcagggcaagacgccucuggggcucguggaccuguuugucuucuccacaucuuuuuaccugaucagcauuuuccuucaccucguuaaaaucccgacccaucgccacguggugggaaagcccugcccuaaaccccauagacugaaucacaugggcauuuguuccugcggccuguauaagcacccugggguccccgugaaguggaaacggugaggacuagucccuguucccagagcccacuuuuuuuucuuuuuuugaaauaaaauagccugucuuucagaucucaaaggcucuuuucagagccaccaaaaaaaaaaaaaaaaaaaaaaaaaaaaaaaaaaaaaaaaaaaaaaaaaaaaaaaaaaaaaaaaagaauu

SEQ ID NO: 38479 - RNA, 1714 nt, Artificial Sequence
  mRNA product Design a-1 (hSL-A64-N5) comprising derived and/or modified sequence from LASV(Lassa virus/H.sapiens-wt/NGA/2015/ISTH_0543;Clade II)__AVO03639__GPCmut11 (opt5)
aggagagucccgcagucggcguccagcggcucugcuuguucgugugugugucguugcaggccuuauucaagcuuaccaugggccagaucauuaccuucuuucaagaggugccccacgucaucgaagagguuaugaacauugugcugaucgcccucagccugcuugcuauucugaaggggaucuacaauguggccacaugcggacucuucggccuggucuccuuucuucugcucugugggagaucuugcagcacgaccuauaaaggaguguacgaacugcagacacuggagcucgacauggcgaaccugaauaugaccaugccucuuuccuguacaaagaacaauucucaucacuauaucaugguuggcaacgaaaccgggcuggagcucacacugaccaauacgagcauuaucaaccauaaauucugcaaucuuuccgaugcucacaagaaaaaccuguacgaccaugcccucaugucuauuaucagcaccuuucaccuguccauuccgaauuucaaccaguaugaggccaugagcugugauuuuaauggaggcaagaucucugugcaguacaaccugucccacacauaugcugucgacgccgcuaaucauugcggcaccauugccaacggggugcuccaaacauucaugcggauggcguggggaggcagcuacaucgcccuggauucugggaagggauccugggacuguaucaugaccagcuaccaguaucuuguuauucagaacacgacaugggaagaucacugccaguuuucucgccccuccccuaucggcuaccuggggcuccugagccaaagaacccgggacauuuauaucucccgcagacuucugggaacauucaccuggacccucucugauagcgagggcaaugaaacacccggcggguacugucugacgcgguggaugcugauugaggcugagcucaaaugcuuuggaaacaccgccguggcuaaguguaaugaaaaacaugacgaggaguucugcgauaugcugcgccuuuuugacuucaacaagcaggccaucagacggcugaaaacagaagcgcagauguccauccagcucauuaauaaggccgucaacgcucugaucaaugaucaacuuauuaugaagaaccaucugcgcgacaucaugggcauuccuuauugcaauuacagcaaauauuguuaccucaaccacaccgugacagggaagaccucucugcccagaugcugucugguguccaauggaagcuaccucaacgaaacgcacuucucugacgauaucgagcagcaggccgacaauaugaucacagagcugcuucaaaaagaauauauugaucggcagggcaagaccccucuggggcucgucgaccuguuuguuuucagcaccuccuuuuaccugaucucuauuuuccuucaccucgugaaaaucccgacacaucgccacauuaccggaaagcccugcccuaaaccccauagacugaaccacaugggcaucuguagcugcggccuguauaagcacccuggggugcccgucaaguggaaacggugaggacuagucccuguucccagagcccacuuuuuuuucuuuuuuugaaauaaaauagccugucuuucagaucucaaaggcucuuuucagagccaccaaaaaaaaaaaaaaaaaaaaaaaaaaaaaaaaaaaaaaaaaaaaaaaaaaaaaaaaaaaaaaaaagaauu

SEQ ID NO: 38480 - RNA, 1714 nt, Artificial Sequence
  mRNA product Design a-1 (hSL-A64-N5) comprising derived and/or modified sequence from LASV(Lassa virus/H.sapiens-wt/NGA/2016/ISTH_0009;Clade II)__AVO03571__GPCmut11 (opt5)
aggagagucccgcagucggcguccagcggcucugcuuguucgugugugugucguugcaggccuuauucaagcuuaccaugggccagaucauuaccuucuuucaagaggugccccacgucaucgaagagguuaugaacauugugcugaucgcccucagccugcuugcuauucugaaggggaucuacaauguggccacaugcggacuccugggccuugucuccuuccugcuccugugugggagaucuugcagcacgaccuauaaaggaguguacgaacugcagacacucgagcuggacauggcgucccuuaacaugaccaugccucugucuuguacaaagaauaacagccaucacuauaucaugguuggcaaugaaaccgggcucgagcugacacuuaccaacacguccauuaucaaucauaaauuuugcaaccugucugaugcucacaagaaaaaucucuacgaccaugcccugaugagcauuaucuccaccuuccaccugagcauuccgaacuuuaaucaguaugaggccaugucuugugauuucaacggaggccggaucuccgugcaguacaaucucagccacucuuaugcugucgacgccgcuaaccauugcggcacaauugccaauggggugcugcaaaccuuuaugcgcauggcguggggaggcuccuacaucgcccuugauagcgggaagggaucuugggacuguaucaugacauccuaccaguaucugauuauccagaacaccacgugggaagaucacugccaguucagcagacccuccccuauuggcuaccucgggcugcuuucucaacggacacgcgacaucuauauuagcagacggcugcucggaaccuuuacauggacccuguccgauagcgagggcaacgaaacccccggcggguacugucugacacgcuggaugcucaucgaggcugagcugaagugcuucggaaauacggccguugcuaaauguaacgaaaagcaugacgaggaauuuugcgauaugcuuagacuguucgacuuuaauaaacaggccauccggcgccucaagaccgaggcgcagaugucuauucagcugaucaacaaagccgugaaugcucuuauuaacgaucaacugaucaugaagaaucaccucagagacauuaugggcaucccuuauugcaacuacuccaaguauuguuaccugaaucacacagucaccgggaaaacaagccugccccggugcugucucgugucuaacggaagcuaccugaaugaaacccauuucuccgacgauaucgagcagcaggccgacaacaugauuacggagcuucugcaaaaggaauauaucgaucgccagggcaaaacaccucucgggcugguggaccuguucgucuuuucuaccagcuucuaccuuauuuccaucuuucuccaccugguuaagauuccgacccauagacacaucacaggaaaacccugcccuaagccccaucggcugaaucacaugggcauuuguagcugcggccucuauaaccacccuggggugcccgugaaauggaagcgcugaggacuagucccuguucccagagcccacuuuuuuuucuuuuuuugaaauaaaauagccugucuuucagaucucaaaggcucuuuucagagccaccaaaaaaaaaaaaaaaaaaaaaaaaaaaaaaaaaaaaaaaaaaaaaaaaaaaaaaaaaaaaaaaaagaauu

SEQ ID NO: 38481 - RNA, 1714 nt, Artificial Sequence
  mRNA product Design a-1 (hSL-A64-N5) comprising derived and/or modified sequence from LASV(Lassa virus/H.sapiens-wt/NGA/2016/ISTH_0017;Clade II)__AVO03567__GPCmut11 (opt5)
aggagagucccgcagucggcguccagcggcucugcuuguucgugugugugucguugcaggccuuauucaagcuuaccaugggccagaucauuaccuucuuucaagaggugccccacgucaucgaagagguuaugaacauugugcugaucgcccucagccugcuugcuauucugaaggggaucuacaauguggccacaugcggacucuucggccuggucuccuuucuucugcucugugggagaucuugcagcacgaccuauaaaggaguguacgaacugcagacacuggagcucgacauggcgucccugaacaugaccaugccucuuucuuguacaaagaauaacagccaucacuauaucaugguuggcaaugaaaccgggcuggagcucacacugaccaacacguccauuaucaaucauaaauucugcaaccuuucugaugcucacaagaaaaaucuguacgaccaugcccucaugagcauuaucuccaccuuucaccugagcauuccgaacuucaaucaguaugaggccaugucuugugauuuuaacggaggcaagaucuccgugcaguacaaucugagccacacauaugcuauugacgccgcuaaccauugcggcaccaucgccaaugggguccuccaaacauucaugcggauggcguggggaggcucuuacaucgcccuggauuccgggaagggaagcugggacuguauuaugaccucuuaccaguaucuuaucauucagaacacgacaugggaagaucacugccaguuuucccgccccagcccuaucggcuaccuggggcuccugucccaaagaacccgggacauuuauaucucucgcagacuucugggaacauucaccuggacccucagcgauuccgagggcaacgaaacacccggcggguacugucugacgcgguggaugcugaucgaggcugagcucaaaugcuuuggaaauaccgccguggcuaaguguaacgaaaaacaugacgaggaguucugcgauaugcugcgccuuuuugacuucaauaagcaggccauuagacggcugaaaacagaagcgcagaugagcauccagcucauuaacaaggccguuaaugcucugaucaacgaucaacuuauuaugaagaaucaucugcgcgacaucaugggcaucccuuauugcaacuacucuaaauauuguuaccucaaucacaccgugacagggaagaccucccugcccagaugcugucuggucagcaacggaucuuaccucaaugaaacgcacuucagcgacgauauugagcagcaggccgacaacaugaucacagagcugcuucaaaaagaauauauggaucggcagggcaagaccccucuggggcucguggaccuguuuguguucuccaccucuuuuuaccugauuagcaucuuccuucaccucguccgcauuccgacacauagacacguuaucggaaaacccugcccuaagccccaucggcugaaucacaugggcauuuguuccugcggccuguauaaacacccuggggugcccgugaaguggaagcgcugaggacuagucccuguucccagagcccacuuuuuuuucuuuuuuugaaauaaaauagccugucuuucagaucucaaaggcucuuuucagagccaccaaaaaaaaaaaaaaaaaaaaaaaaaaaaaaaaaaaaaaaaaaaaaaaaaaaaaaaaaaaaaaaaagaauu

SEQ ID NO: 38482 - RNA, 1714 nt, Artificial Sequence
  mRNA product Design a-1 (hSL-A64-N5) comprising derived and/or modified sequence from LASV(Lassa virus/H.sapiens-wt/NGA/2018/ISTH_0959;Clade II)__AVV65099__GPCmut11 (opt5)
aggagagucccgcagucggcguccagcggcucugcuuguucgugugugugucguugcaggccuuauucaagcuuaccaugggccagaucauuaccuucuuucaagaggugccccacgucaucgaagagguuaugaacauugugcugaucgcccucagccugcuugcuauucugaaggggaucuacaauguggucacaugcggacucuucggccugguguccuuucuucugcucugugggagaucuugcagcacgaccuauaaaggaguuuacgaacugcagacacuggagcucgacauggccucccugaacaugaccaugccucuuucuuguacaaagaauaacagccaucacuauaucauggugggcaaugaaaccgggcuggagcucacacugaccaacacguccauuaucaaucauaaauucugcaaccuuucugaugcgcacaagaaaaaucuguacgaccaugcucucaugagcauuaucuccaccuuucaccugagcauuccgaacuucaaucaguaugaggccaugucuugugauuuuaacggaggcaagaucuccguccaguacaaucugagccacgccuaugcuauugacgccgcuaaccauugcggcacaaucgccaauggggugcuccaaaccuucaugcggauggcguggggaggcucuuacaucgcccuggauuccgggaagggaagcugggacuguauuaugacaucuuaccaguaucuuaucauucagaacaccacgugggaagaucacugccaguuuucccgccccagcccuaucggcuaccuggggcuccugucccaaagaacacgggacauuuauaucucucgcagacuucugggaaccuucacauggacccucagcgauuccgagggcaacgaaacccccggcggguacugucugacacgguggaugcugaucgaggcugagcucaaaugcuuuggaaauacggccguugcuaaguguaacgaaaaacaugacgaggaguucugcgauaugcugcgccuuuuugacuucaauaagcaggccauuagacggcugaaaaccgaagcgcagaugagcauccagcucauuaacaaggccgugaaugcucugaucaacgaucaacuuauuaugaagaaucaucugcgcgacaucaugggcaucccuuauugcaacuacucuaaauauuguuaccucaaucacacagucaccgggaagacaucccugcccagaugcugucuggugagcaacggaucuuaccucaaugaaacccacuucagcgacgauauugagcagcaggccgacaacaugaucacggagcugcuucaaaaagaauauauugaucggcagggcaagacaccucuggggcucguggaccuguuugucuucuccaccucuuuuuaccugaucagcauuuuccuucaccucguuaaaaucccgacccaucgccacgugauuggaaagcccugcccuaaaccccauagacugaaucacaugggcaucuguuccugcggccuguauaagcacccuggggugcccgucaaguggaaacggugaggacuagucccuguucccagagcccacuuuuuuuucuuuuuuugaaauaaaauagccugucuuucagaucucaaaggcucuuuucagagccaccaaaaaaaaaaaaaaaaaaaaaaaaaaaaaaaaaaaaaaaaaaaaaaaaaaaaaaaaaaaaaaaaagaauu

SEQ ID NO: 38483 - RNA, 1714 nt, Artificial Sequence
  mRNA product Design a-1 (hSL-A64-N5) comprising derived and/or modified sequence from LASV(LASV003-NIG-2008;Clade II)__AIT17580__GPCmut11 (opt5)
aggagagucccgcagucggcguccagcggcucugcuuguucgugugugugucguugcaggccuuauucaagcuuaccaugggccagaucauuaccuucuuucaagaggugccccacgucaucgaagagguuaugaacauugugcugaucgcccucagccugcuugcuauucugaaggggaucuacaauguggccacaugcggacucuucggccuggucuccuuucuucugcucugugggagaucuugcagcacgaccuauaaaggaguguacgaacugcagacacuggagcucgacauggcgucccugaacaugaccaugccucuuucuuguacaaagaauaacagccaucacuauaucaugguuggcaaugaaaccgggcuggagcucacacugaccaacacguccauuaucaaucauaaauucugcaaccuuucugaugcucacaagaaaaaucuguacgaccaugcccucaugagcauuaucuccaccuuucaccugagcauuccgaacuucaaucaguaugaggccaugucuugugauuuuaacggaggcaagaucuccgugcaguacaaucugagccacacauaugcugucgacgccgcuaaccauugcggcaccauugccaauggggugcuccaaacauucaugcggauggcguggggaggcucuuacaucgcccuggauuccgggaagggaagcugggacuguaucaugaccucuuaccaguaucuuauuauccagaacacgacaugggaagaucacugccaguuuucccgccccagcccuauuggcuaccuggggcuccugucccaaagaacccgggacaucuauauuucucgcagacuucugggaacauucaccuggacccucagcgauuccgagagcaacgaaacacccggcggcuacugucugacgcgguggaugcugaucgaggcugagcucaaaugcuuugggaauaccgccguugcuaaguguaacgaaaaacaugacgaggaguucugcgauaugcugcgccuuuuugacuucaauaagcaggccaucagacggcugaaagcggaagcccagaugucuauucagcucaucaacaaggcugugaaugcccugauuaacgaucaacuuaucaugaagaaucaucugcgcgacauuaugggaaucccuuauugcaacuacuccaaauauuguuaccucaaucacacagucaccggcagaacaagccugccccggugcugucuggugucuaacgggagcuaccucaaugaaacccacuucuccgacgauaucgagcagcaggcugacaacaugauuacggagcugcuucaaaaggaauauauggaucgccagggaaaaacaccucugggccucguggaccuguuugucuucucuaccagcuuuuaccugaucuccauuuuccuucaccucguuaagaucccgacccauagacacgugauugggaaacccugcccuaagccccaucggcugaaucacaugggaaucuguagcugcggccuguauaaacacccuggcgugcccgucaaguggaagcgcugaggacuagucccuguucccagagcccacuuuuuuuucuuuuuuugaaauaaaauagccugucuuucagaucucaaaggcucuuuucagagccaccaaaaaaaaaaaaaaaaaaaaaaaaaaaaaaaaaaaaaaaaaaaaaaaaaaaaaaaaaaaaaaaaagaauu

SEQ ID NO: 38484 - RNA, 1714 nt, Artificial Sequence
  mRNA product Design a-1 (hSL-A64-N5) comprising derived and/or modified sequence from LASV(LASV035-NIG-2009;Clade II)__AIT17588__GPCmut11 (opt5)
aggagagucccgcagucggcguccagcggcucugcuuguucgugugugugucguugcaggccuuauucaagcuuaccaugggccagaucauuaccuucuuucaagaggugccccacgucaucgaagagguuaugaacauugugcugaucgcccucagccugcuugcuauucugaaggggaucuacaauguggccacaugcggacucuucggccuggucuccuuucuucugcucugugggagaucuugcagcacgaccuauaaaggaguguacgaacugcagacacuggagcucgacauggcgucccugaacaugaccaugccucuuucuuguacaaagaauaacagccaucacuauaucaugguuggcaaugaaaccgggcuggagcucacacugaccaacacguccauuaucaaucauaaauucugcaaccuuucugaugcucacaagaaaaaucuguacgaccaugcccucaugagcauuaucuccaccuuucaccugagcauuccgaacuucaaucaguaugaggccaugucuugugauuuuaacggaggcaagaucuccgugcaguacaaucugagccacgcuuaugccgucgacgcugccaaccauugcggcacaauugcgaauggggugcuccaaaccuucaugcggauggccuggggaggcucuuacaucgcucuggauuccgggaagggaagcugggacuguaucaugacaucuuaccaguaucuuauuauccagaacaccacgugggaagaucacugccaguuuucccgccccagcccuauuggcuaccuggggcuccugucccaaagaacacgggacaucuauauuucucgcagacuucugggaaccuucacauggacccucagcgauuccgagggcaacgaaacccccggcggguacugucugacacgguggaugcugaucgaggccgagcucaaaugcuuuggaaauacggcuguugccaaguguaacgaaaaacaugacgaggaguucugcgauaugcugcgccuuuuugacuucaauaagcaggcgaucagacggcugaaagccgaagcucagaugagcauucagcucaucaacaaggccgugaaugcucugauuaacgaucaacuuaucaugaagaaucaucugcgcgacauuaugggcaucccuuauugcaacuacucuaaauauuguuaccucaaucacaccgucacagggaagaccucccugcccagaugcugucuggugagcaacggaucuuaccucaaugaaacacacuucagcgacgauaucgagcagcaggccgacaacaugauuaccgagcugcuucaaaaagaauauaucgaucggcagggcaagacgccucuggggcucguggaccuguuugucuucuccacaucuuuuuaccugauuagcaucuuccuucaccucguuaaaauuccgacccaucgccacgugaucggaaagcccugcccuaaaccccauagacugaaucacaugggcauuuguuccugcggccuguauaagcacccuggggugcccgucaaguggaaacggugaggacuagucccuguucccagagcccacuuuuuuuucuuuuuuugaaauaaaauagccugucuuucagaucucaaaggcucuuuucagagccaccaaaaaaaaaaaaaaaaaaaaaaaaaaaaaaaaaaaaaaaaaaaaaaaaaaaaaaaaaaaaaaaaagaauu

SEQ ID NO: 38485 - RNA, 1714 nt, Artificial Sequence
  mRNA product Design a-1 (hSL-A64-N5) comprising derived and/or modified sequence from LASV(LASV1000-NIG-2009;Clade II)__AIT17782__GPCmut11 (opt5)
aggagagucccgcagucggcguccagcggcucugcuuguucgugugugugucguugcaggccuuauucaagcuuaccaugggccagaucauuaccuucuuucaagaggugccccacgucaucgaagagguuaugaacauugugcugaucgcccucagccugcuugcuauucugaaggggaucuacaauguggccacaugcggacucuucggccuggucuccuuucuucugcucugugggagaucuugcagcacgaccuauaaaggaguguacgaacugcagacacuggagcucgacauggcgucccugaacaugaccaugccucuuucuuguacaaagaauaacagccaucacuauaucaugguuggcaaugaaaccgggcuggagcucacacugaccaacacguccauuaucaaucauaaauucugcaaccuuucugaugcucacaagaaaaaucuguacgaccaugcccucaugagcauuaucuccaccuuucaccugagcauuccgaacuucaaucaguaugaggccaugucuugugauuuuaacggaggcaagaucuccgugcaguacaaucugagccacacauaugcugucgacgccgcuaaccauugcggcaccauugccaauggggugcuccaaacauucaugcggauggcguggggaggcucuuacaucgcccuggauuccgggaagggaagcugggacuguaucaugaccucuuaccaguaucuuauuauccagaacacgacaugggaagaucacugccaguuuucccgccccagcccuauuggcuaccuggggcuccugucccaaagaacccgggacaucuauauuucucgcagacuucugggaacauucaccuggacccucagcgauuccgagggcaacgaaacacccggcggguacugucugacgcgguggaugcugaucgaggcugagcucaaaugcuuuggaaauaccgccguugcuaaguguaacgaaaaacaugacgaggaguucugcgauaugcugcgccuuuuugacuucaauaagcaggccaucaaaagacugaagacagaagcgcagaugagcauucagcucaucaacaaggccgugaaugcucugauuaacgaucaacuuaucaugaaaaaucaucugcgggacauuaugggcaucccuuauugcaacuacucuaaguauuguuaccucaaucacaccgucacagggaaaaccucccugccccgcugcugucuggugagcaacggaucuuaccucaaugaaacgcacuucagcgacgauaucgagcagcaggccgacaacaugauuacagagcugcuucaaaaggaauauaucgauagacagggcaaaaccccucuggggcucguggaccuguuugucuucuccaccucuuuuuaccugauuagcaucuuccuucaccucguuaagauuccgacacaucggcacguggugggaaaacccugcccuaagccccaucgccugaaucacaugggcaucuguuccugcggccuguauaagcacccugggguccccgugaaauggaagagaugaggacuagucccuguucccagagcccacuuuuuuuucuuuuuuugaaauaaaauagccugucuuucagaucucaaaggcucuuuucagagccaccaaaaaaaaaaaaaaaaaaaaaaaaaaaaaaaaaaaaaaaaaaaaaaaaaaaaaaaaaaaaaaaaagaauu

SEQ ID NO: 38486 - RNA, 1714 nt, Artificial Sequence
  mRNA product Design a-1 (hSL-A64-N5) comprising derived and/or modified sequence from LASV(LASV221-NIG-2010;Clade II)__AIT17624__GPCmut11 (opt5)
aggagagucccgcagucggcguccagcggcucugcuuguucgugugugugucguugcaggccuuauucaagcuuaccaugggccagaucauuaccuucuuucaagaggugccccacgucaucgaagagguuaugaacauugugcugaucgcccucagccugcuugcuauucugaaggggaucuacaauguggccacaugcggacucuucggccuggucuccuuucuucugcucugugggagaucuugcagcacgaccuauaaaggaguguacgaacugcagacacuggagcucgacauggcgucccugaacaugaccaugccucuuucuuguacaaagaauaacagccaucacuauaucaugguuggcaaugaaaccgggcuggagcucacacugaccaacacguccauuaucaaucauaaauucugcaaccuuucugaugcucacaagaaaaaucuguacgaccaugcccucaugagcauuaucuccaccuuucaccugagcauuccgaacuucaaucaguaugaggccaugucuugugauuuuaacggaggcaagaucuccgugcaguacaaucugagccacacauaugcuauugacgccgcuaaccauugcggcaccaucgccaaugggguccuccaaacauucaugcggauggcguggggaggcucuuacaucgcccuggauuccgggaagggaagcugggacuguauuaugaccucuuaccaguaucuuaucauucagaacacgacaugggaagaucacugccaguuuucccgccccagcccuaucggcuaccuggggcuccugucccaaagaacccgggacauuuauaucucucgcagacuucugggaacauucaccuggacccucagcgauuccgagggcaacgaaacacccggcggguacugucugacgcgguggaugcugaucgaggcugagcucaaaugcuuuggaaauaccgccguggcuaaguguaacgaaaaacaugacgaggaguucugcgauaugcugcgccuuuuugacuucaauaagcaggccauuagacggcugaaaacagaagcgcagaugagcauccagcucauuaacaaggccguuaaugcucugaucaacgaucaacuuauuaugaagaaucaucugcgcgacaucaugggcaucccuuauugcaacuacucuaaauauuguuaccucaaucacaccgugacagggaagaccucccugcccagaugcugucuggucagcaacggaucuuaccucaaugaaacgcacuucagcgacgauauugagcagcaggccgacaacaugaucacagagaugcugcaaaaagaauauauggaucggcagggcaagaccccucuugggcugguggaccucuuuguguucuccaccucuuuuuaccugauuagcaucuuccugcaccuugucaaaauuccgacacaucgccacguuaucggaaagcccugcccuaaaccccauagacucaaucacaugggcauuuguuccugcggccuguauaagcacccuggggugcccgugaaguggaaacggugaggacuagucccuguucccagagcccacuuuuuuuucuuuuuuugaaauaaaauagccugucuuucagaucucaaaggcucuuuucagagccaccaaaaaaaaaaaaaaaaaaaaaaaaaaaaaaaaaaaaaaaaaaaaaaaaaaaaaaaaaaaaaaaaagaauu

SEQ ID NO: 38487 - RNA, 1714 nt, Artificial Sequence
  mRNA product Design a-1 (hSL-A64-N5) comprising derived and/or modified sequence from LASV(LASV237-NIG-2010;Clade II)__AIT17638__GPCmut11 (opt5)
aggagagucccgcagucggcguccagcggcucugcuuguucgugugugugucguugcaggccuuauucaagcuuaccaugggccagaucauuaccuucuuucaagaggugccccacgucaucgaagagguuaugaacauugugcugaucgcccucagccugcuugcuauucugaaggggaucuacaauguggccacaugcggacucuucggccuggucuccuuucuucugcucugugggagaucuugcagcacgaccuauaaaggaguguacgaacugcagacacuggagcucgacauggcgucccugaacaugaccaugccucuuucuuguacaaagaauaacagccaucacuauaucaugguuggcaaugaaaccgggcuggagcucacacugaccaacacguccauuaucaaucauaaauucugcaaccuuucugaugcucacaagaaagaccuguacgaucaugcccucaugagcauuaucuccaccuuucaccugagcauuccgaauuucaaccaguaugaggccaugucuugugacuuuaauggaggcaagaucuccgugcaguacaaccugagccacacauaugcugucgaugccgcuaaucauugcggcaccauugccaacggggugcuccaaacauucaugcggauggcguggggaggcucuuacaucgcccuggacuccgggaagggaagcugggauuguaucaugaccucuuaccaguaucuuauuauccagaauacgacaugggaagaccacugccaguuuucccgccccagcccuauuggcuaccuggggcuccugucccaaagaacccgggauaucuauauuucucgcagacuucugggaacauucaccuggacccucagcgacuccgagggcaacgaaacacccggcggguacugucugacgcgguggaugcugaucgaggcugagcucaaaugcuuuggaaacaccgccguugcuaaguguaaugaaaaacaugaugaggaguucugcgacaugcugcgccuuuuugauuucaacaagcaggccaucagacggcugaaaacagaagcgcagaugagcauucagcucaucaauaaggccgugaacgcucugauuaaugaccaacuuaucaugaagaaccaucugcgcgacauuaugggcaucccuuauugcaauuacucuaaauauuguuaccucaaccacaccgucacagggaagaccucccugcccagaugcugucuggugagcaauggaucuuaccucaacgaaacgcacuucagcgaugacaucgagcagcaggccgauaauaugauuacagagcugcuucaaaaagaauauauggaccggcagggcaagaccccucuggggcucguggaucuguuugucuucuccaccucuuuuuaccugaucagcauuuuccuucaccucaucaaaauuccgacacaucgccacaucaccggaaagcccugcccuaaaccccauagacugaaccacaugggcauuuguuccugcggccuguauaagcacccugggguucccgugaaguggaaacggugaggacuagucccuguucccagagcccacuuuuuuuucuuuuuuugaaauaaaauagccugucuuucagaucucaaaggcucuuuucagagccaccaaaaaaaaaaaaaaaaaaaaaaaaaaaaaaaaaaaaaaaaaaaaaaaaaaaaaaaaaaaaaaaaagaauu

SEQ ID NO: 38488 - RNA, 1714 nt, Artificial Sequence
  mRNA product Design a-1 (hSL-A64-N5) comprising derived and/or modified sequence from LASV(LASV253-NIG-2011;Clade II)__AIT17670__GPCmut11 (opt5)
aggagagucccgcagucggcguccagcggcucugcuuguucgugugugugucguugcaggccuuauucaagcuuaccaugggccagaucauuaccuucuuucaagaggugccccacgucaucgaagagguuaugaacauugugcugaucgcccucagccugcuugcuauucugaaggggaucuacaauguggccacaugcggacucuucggccuggucuccuuucuucugcucugugggagaucuugcagcacgaccuauaaaggaguguacgaacugcagacacuggagcucgacauggcgucccugaacaugaccaugccucuuucuuguacaaagaauaacagccaucacuauaucaugguuggcaaugaaaccgggcuggagcucacacugaccaacacguccauuaucaaucauaaauucugcaaccuuucugaugcucacaagaaaaaucuguacgaccaugcccucaugagcauuaucuccaccuuucaccugagcauuccgaacuucaaucaguaugaggccaugucuugugauuuuaacggaggcaagaucuccgugcaguacaaucugagccacacauaugcugucgacgccgcuaaccauugcggcaccauugccaauggggugcuccaaacauucaugcggauggcguggggaggcucuuacaucgcccuggauuccgggaagggaagcugggacuguaucaugaccucuuaccaguaucuuauuauccagaacacgacaugggaagaucacugccaguuuucccgccccagcccuauuggcuaccuggggcuccugucccaaagaacccgggacaucuauauuucucgcagacuucugggaacauucaccuggacccucagcgauuccgagggcaacgaaacacccggcggguacugucugacgcgguggaugcugaucgaggcugagcucaaaugcuuuggaaauaccgccguugcuaaguguaacgaaaaacaugacgaggaguucugcgauaugcugcgccuuuuugacuucaauaagcaggccaucagacggcugaaagcggaagcccagaugagcauucagcucaucaacaaggcugugaaugcccugauuaacgaucaacuuaucaugaagaaucaucugcgcgacauuaugggcaucccuuauugcaacuacucuaaauauuguuaccucaaucacacagucaccgggagaacaucccugccccggugcugucuggugagcaacggaucuuaccucaaugaaacccacuucagcgacgauaucgagcagcaggcugacaacaugauuacggagcugcuucaaaaggaauauaucgaucgccagggcaaaacaccucuggggcucguggaccuguuugucuucuccaccucuuuuuaccugauuagcaucuuccuucaccucguuaagauuccgacccauagacacaucauuggaaaacccugcccuaagccccaucggcugaaucacaugggcaucuguuccugcggccuguauaaacacccuggggugcccgugaaguggaagcgcugaggacuagucccuguucccagagcccacuuuuuuuucuuuuuuugaaauaaaauagccugucuuucagaucucaaaggcucuuuucagagccaccaaaaaaaaaaaaaaaaaaaaaaaaaaaaaaaaaaaaaaaaaaaaaaaaaaaaaaaaaaaaaaaaagaauu

SEQ ID NO: 38489 - RNA, 1714 nt, Artificial Sequence
  mRNA product Design a-1 (hSL-A64-N5) comprising derived and/or modified sequence from LASV(LASV254-NIG-2011;Clade II)__AIT17674__GPCmut11 (opt5)
aggagagucccgcagucggcguccagcggcucugcuuguucgugugugugucguugcaggccuuauucaagcuuaccaugggccagaucauuaccuucuuucaagaggugccccacgucaucgaagagguuaugaacauugugcugaucgcccucagccugcuugcuauucugaaggggaucuacaauguggccacaugcggacucuucggccuggucuccuuucuucugcucugugggagaucuugcagcacgaccuauaaaggaguguacgaacugcagacacuggagcucgacaugaccaaccugaauaugacaaugccucuuuccuguaccaagaacaauucucaucacuauaucaugguuggcaacgaaacagggcuggagcucacccugacgaauaccagcauuaucaaccauaaauucugcaaucuuuccgaugcgcacaagaaaaaccuguacaaucaugcucucaugucuauuaucagcacauuucaccuguccauuccgaacuucaaucaguaugaggccaugagcugugacuuuaacggaggcaagaucucugugcaguacaaucugucccacagcuaugccgucgaugcugccaaccauugcggcaccauugcuaacggggugcuccaaacauucaugcggauggccuggggaggcucuuacaucgcgcuggacuccgggaagggaaauugggauuguaucaugaccagcuaccaguaucuuauuauccagaacacgacaugggaagaccacugccaguuuucucgccccuccccuauuggcuaccuggggcuccugagccaaagaacccgggauaucuauauuucccgcagacuucugggaacauucaccuggacccucucugacagcgagggcaaugaaacacccggcggguacugucugacgcgguggaugcugaucgaggccgagcucaaaugcuuuggaaacaccgcuguugccaaguguaaugaaaaacaugaugaggaguucugcgacaugcugcgccuuuuugauuucaacaagcaggcuaucagacggcugaaaacagaagcccaggcgaauauucagcucaucaacaaggccgugaaugcucugauuaacgaccaacuuaucaugaagaaucaucugcgcgauauuaugggcaucccuuauugcaacuacuccaaauauuguuaccucaaucacaccgucacagggaagaccagccugcccagaugcugucuggugucuaacggauccuaccucaaugaaacgcacuucagcgacgacaucgagcagcaggccgauaacaugauuacagagcugcuucaaaaagaauauauggaccggcagggcaagaccccucuggggcucguggaucuguuugucuucucuaccagcuuuuaccugaucuccauuuuccuucaccucguuaaaaucccgacacaucgccacgugauuggaaagcccugcccuaaaccccauagacugaaccacaugggcaucuguucuugcggccuguauaagcacccuggggugcccgucaaguggaaacggugaggacuagucccuguucccagagcccacuuuuuuuucuuuuuuugaaauaaaauagccugucuuucagaucucaaaggcucuuuucagagccaccaaaaaaaaaaaaaaaaaaaaaaaaaaaaaaaaaaaaaaaaaaaaaaaaaaaaaaaaaaaaaaaaagaauu

SEQ ID NO: 38490 - RNA, 1714 nt, Artificial Sequence
  mRNA product Design a-1 (hSL-A64-N5) comprising derived and/or modified sequence from LASV(Nig08-A19;Clade III)__ADU56618__GPCmut11 (opt5)
aggagagucccgcagucggcguccagcggcucugcuuguucgugugugugucguugcaggccuuauucaagcuuaccaugggccagaucgugaccuucuuucaagaggucccccacguuauugaagaggugaugaacaucgugcugauugcccucagcauccuggcuauucuuaaggggcuguacaauaucgccacaugcggacucaucggccuggucacguuccuucugcucuccgggagaucuuguagcaugaccuauaaaggaguguacgaacugcagacacuggagcucaacaugaauacccugaacaugacaaugccucuuuccugcaccaagaauaacucucaucacuauauuaugguuggcaaugaaacagggcuggagcucacccugacgaacaccagccuucugcaucacaaauuuuguaaucucuccgacgcgcauaagaaaaaccuguacgaucacacacugaugucuaucauuagcaccuuccaccucuccaucccgaauuuuaaccaguaugaggcuaugagcugcgacuucaauggaggcaagauuacagugcaguacaaccugucucauuccuaugccaucgaugccgcuaaucacuguggcaccgucgccaacggggugcuucaaacguuuaugcggauggcuuggggaggcagcuacauugcccuggacucugggcgcggaaagugggauugcaucaugacauccuaccaguaucucaucauucagaacaccacaugggaagaccauugucaguucagcagacccucuccuaucggcuaccuggggcuucugucccaacggacccgcgauauuuauaucagcagacggcuccugggaaccuuuacauggacgcuguccgacucugagggcaaugaaacccccggcggguacugccucacacgcuggaugcugauugaggcggagcuuaaauguuucggaaacaccgccguugcuaagugcaaugaaaaacacgaugaggaauuuugugacaugcugagacucuucgauuuuaacaagcaggccauccggcgccugaaagcugaggcccagaugagcauccagcuuauuaauaaggcggugaacgcccugaucaaugaccaacucauuaugaagaaccaccugagagauaucaugggcauuccuuauugcaauuacuccaaauauugcuaccugaaccauacaagcaccgggcggacgucucucccccgcuguugccuggucuccaauggaagcuaccuuaacgaaacacacuucucugacgacaucgagcagcaggcugauaauaugaucaccgagaugcugcaaaaggaauaucucgacagacagggcaaaaccccucuggggcugguggaucuuuucguguuuagcacauccuucuaccucauuucuaucuuucugcaucuggucaagauuccgacccaccggcauaucguuggaaaacccuguccuaagccccaccgccucaaccacaugggcauuugcagcuguggccuguauaaacagccuggggugcccgugagauggaagcggugaggacuagucccuguucccagagcccacuuuuuuuucuuuuuuugaaauaaaauagccugucuuucagaucucaaaggcucuuuucagagccaccaaaaaaaaaaaaaaaaaaaaaaaaaaaaaaaaaaaaaaaaaaaaaaaaaaaaaaaaaaaaaaaaagaauu

SEQ ID NO: 38491 - RNA, 1717 nt, Artificial Sequence
  mRNA product Design a-1 (hSL-A64-N5) comprising derived and/or modified sequence from LASV(G1180-SLE-2010;Clade IV)__AIT17168__GPCmut11 (opt5)
aggagagucccgcagucggcguccagcggcucugcuuguucgugugugugucguugcaggccuuauucaagcuuaccaugggccagaucgugaccuucuuucaagaggucccccacguuauugaagaggugaugaacaucgugcugauugcccucagcauccuggcuguccuuaaggggcuguacaauuucgccacaugcggacucgugggccugcuuacguuucugcuccugugugggagauccugcaccgcgucucgguauaaaggaguuuacgaacugcagacacucgagcugaacauggaaacccuuaauaugacaaugccucugagcuguaccaagaacaauucccaucacuauauuauggugggcaacgagacagggcucgagcugacccuuacgaauaccucuaucaucaaccauaaauucugcaaucugagcgacgcucacaagaaaaaccucuacgaucaugcccugauguccauuaucucuacauuucaccugagcauuccgaauuucaaccaguaugaagccauguccugugacuuuaauggaggcaagaucagcguccaguacaaccucucucacuccuaugcuggcgaugccgcuaaucauugcgggaccguggccaacggaguucugcaaacauucaugcgcauggcguggggcgggagcuacauugcccuugacucuggacacggcuccugggauuguaucaugaccagcuaccaguaucugauuauccagaacacgacaugggaggaccauugccaguuuucuagacccuccccuaucggguaccucggacugcuuagccaacggacccgcgauauuuauaucuccagacggcugcucggcacauucaccuggacccugucugacagcgaaggcaaggauacacccgggggauacugucugacgcgcuggaugcucauugaggcugagcugaaaugcuuuggcaauaccgccguggcuaaguguaacgaaaaacacgacgaggaguucugcgauaugcuuagacuguuugacuucaauaagcaggccauccagcggcucaaagcggaagcccagauguccauucaacugaucaacaaggcugucaaugcccuuaucaacgaucagcugauuaugaagaaucaccuccgcgacaucauggggauuccuuauugcaacuacagcaaauauuguuaccugaaucauacaaccacaggaaagaccucucugcccaaaugcugucucguguccaacggcagcuaccugaaugaaacgcacuucucugacgauaucgagcagcaagcugacaacaugauuacagagaugcuucagaaggaauauauggagagacaggggaaaaccccucugggacucguggaucuguuugucuucagcaccuccuuuuaccugaucucuaucuuccuucaucucguuaagauuccgacacaccggcauaucgugggcaaaagcugccccaagccucaccgccugaaucacaugggcauuuguuccugcgggcuguauaagcagcccggagugccugucaaauggaagagaugaggacuagucccuguucccagagcccacuuuuuuuucuuuuuuugaaauaaaauagccugucuuucagaucucaaaggcucuuuucagagccaccaaaaaaaaaaaaaaaaaaaaaaaaaaaaaaaaaaaaaaaaaaaaaaaaaaaaaaaaaaaaaaaaagaauu

SEQ ID NO: 38492 - RNA, 1717 nt, Artificial Sequence
  mRNA product Design a-1 (hSL-A64-N5) comprising derived and/or modified sequence from LASV(G1442-SLE-2011;Clade IV)__AIT17180__GPCmut11 (opt5)
aggagagucccgcagucggcguccagcggcucugcuuguucgugugugugucguugcaggccuuauucaagcuuaccaugggccagaucgugaccuucuuucaagaggucccccacguuauugaagaggugaugaacaucgugcugauugcccucagcauccuggcuguccuuaaggggcuguacaauguggccacaugcggacucauuggccugguuacguuccuucugcucugugggagauccugcaccacaacccuguauaaaggaguguacgaacugcagacacucgagcugaacauggaaacccuuaauaugacaaugccucugucuuguaccaagaacaauagccaucacuauauccgggucggcaacgagacggggcucgagcugacccuuacaaauaccuccaucauuaaccauaaauuuugcaaucugucugacgcgcacaagaaaaaccucuacgaucaugcucugaugagcaucauuuccacauuccaccugucuaucccgaauuuuaaccaguaugaagccaugagcugugacuucaauggaggcaagauuuccgugcaguacaaccucagccacucuuaugccggcgaugcugccaaucauugcgggaccguugcuaacggagugcugcaaacguuuaugcgcauggccuggggcggguccuacaucgcgcuugacagcggaagaggcaacugggauuguauuaugacaucuuaccaguaucugaucauccagaauaccacaugggacgaucacugccaguucucccggcccagcccuauuggguaccucggacugcuuucucaacgcaccagagacgucuauaucucccggcgccugcucggcaccuuuacauggacgcugagcgauuccgagggcaaggacacccccgggggauacugucugacaagauggaugcucauugaagccgagcugaaaugcuucggcaacaccgcuguggccaaguguaaugagaaacaugaugaagaguuuugcgacaugcuucggcuguucgauuuuaacaagcaggcuauccagcgccucaaagccgaagcgcagaugucuauucaacugaucaauaaggccgugaacgcucuuaucaaugaccagcugauuaugaagaaccaccucagagacaucauggggauuccuuauugcaauuacagcaaauauuguuaccugaacaauacagccaccggaaagacgucccugcccaaaugcugucucaucagcaacggcucuuaccugaaugagacacacuucuccgaugacauugaacaggaggcugauaacaugaucaccgagaugcuucaaaaggaauauauggagcggcaggggaaaaccccucugggacucgucgaccuguucguuuuuagcacaucuuucuaccugaucagcauuuuucuucaucucgugaagaucccgacccaccgccauauugugggcaaauccugccccaagccucacagacugaaucauaugggcaucuguucuugcgggcuguauaagcagcccggagucccugugcgguggaaacgcugaggacuagucccuguucccagagcccacuuuuuuuucuuuuuuugaaauaaaauagccugucuuucagaucucaaaggcucuuuucagagccaccaaaaaaaaaaaaaaaaaaaaaaaaaaaaaaaaaaaaaaaaaaaaaaaaaaaaaaaaaaaaaaaaagaauu

SEQ ID NO: 38493 - RNA, 1717 nt, Artificial Sequence
  mRNA product Design a-1 (hSL-A64-N5) comprising derived and/or modified sequence from LASV(G3010-SLE-2013;Clade IV)__AIT17344__GPCmut11 (opt5)
aggagagucccgcagucggcguccagcggcucugcuuguucgugugugugucguugcaggccuuauucaagcuuaccaugggccagaucgugaccuucuuucaagaggucccccacguuauugaagaggugaugaacaucgugcugauugcccucagcauccuggcuguccuuaaggggcuguacaauuucgccacaugcggacucgugggccugguuacguuucuucugcucugugggagauccugcaccacaucucuguauaaaggaguguacgaacugcagacccucgagcugaacauggaaacacuuaauaugaccaugccucugagcuguacaaagaacaauucccaucacuauauuauggucggcaacgagaccgggcucgagcugacgcuuaccaauacaucuaucaucaaccauaaauucugcaaucugagcgacgcgcacaagaaaaaccucuacaaucaugcucugauguccauuaucucuaccuuucaccugagcauuccgaacuucaaucaguaugaagccauguccugugauuuuaacggaggcaagaucagcgugcaguacaaucucucucacuccuaugccggcgacgcugccagccauugcgggacaguugcuaacggagugcugcaaaccuucaugcggauggccuggggcgggucuuacauugcgcuugauuccggauacggcaagugggacuguaucaugacgagcuaucaguaccugauuauccagaacacaaccugggaggaucacugccaguuuucucgccccuccccuaucggguaucucggacugcuuagccaaagaacacgggacauuuacaucucccgcagacugcucggcaccuucaccuggacacugucugauagcgaaggcaaagacacgcccgggggauauugucugacccgguggaugcucauugaggccgagcugaagugcuuuggcaauacagcugucgccaaauguaacgaaaagcaugaugaggaguucugcgacaugcuucgccuguuugauuucaauaaacaggcuauccagagacucaagaccgaagcccagauguccauucaacugaucaacaaggcggugaaugcccuuaucaacgaccagcugauuaugaaaaaucaccuccgggauaucauggggauuccuuacugcaacuauagcaaguacuguuaccugaaucacacaaccacgggaaaaacaucucugcccaagugcugucucguguccaacggcagcuaucugaaugaaacccauuucucugacgacaucgagcagcaagcugauaacaugauuaccgagaugcuucagaaagaauacauggagcgccaggggaagacaccucugggacucgucgaccuguuuguuuucagcaccuccuuuuaucugaucucuaucuuccuucaccucgugaaaauuccgacacauagacacaucgugggcaagagcugccccaagccucaucggcugaaucacaugggcauuuguuccugcgggcuguacaaacagcccggagucccugugcgcuggaagagaugaggacuagucccuguucccagagcccacuuuuuuuucuuuuuuugaaauaaaauagccugucuuucagaucucaaaggcucuuuucagagccaccaaaaaaaaaaaaaaaaaaaaaaaaaaaaaaaaaaaaaaaaaaaaaaaaaaaaaaaaaaaaaaaaagaauu

SEQ ID NO: 38494 - RNA, 1717 nt, Artificial Sequence
  mRNA product Design a-1 (hSL-A64-N5) comprising derived and/or modified sequence from LASV(G502-SLE-2009;Clade IV)__AIT17126__GPCmut11 (opt5)
aggagagucccgcagucggcguccagcggcucugcuuguucgugugugugucguugcaggccuuauucaagcuuaccaugggccagaucgugaccuucuuucaagaggucccccacguuauugaagaggugaugaacaucgugcugauugcccucagcauccuggcuguccuuaaggggcuguacaauuucgccacaugcggacucgugggccugcuuacguuucugcuccugugugggagauccugcaccacaggacuguauaaaggcguuuacgaacuccagacccuggagcuuaacauggaaacacugaauaugaccaugccucucucuuguacaaagaacaauagccaucacuauauuaugguggggaacgagaccggacuggagcuuacgcugaccaauacauccaucaucaaccauaaauucugcaaucucucugacgcgcacaagaaaaaccuguacgaucaugcucugaugagcauuaucuccaccuuucaccucucuauuccgaauuucaaccaguaugaagccaugagcugugacuuuaauggcggcaagaucuccguccaguacaaccugagccacucuuaugccggggaugcugccgaccauugcggaacaguggcuaauggcguucuucaaaccuucaugcggauggccuggggaggguccuacauugcgcuggauagcggccgcgggagaugggacuguaucaugacgucuuaccaguaucucauuauccagaacacaaccugggaggaucacugccaguuuucccggcccagcccuaucggauaccugggccuucugucucaacgcacaagagacauuuauaucucccggcgccuccugggcaccuucaccuggacacugagcgauuccgaagggaaggacacgcccggaggcuacugucucaccagauggaugcugauugaggccgagcuuaaaugcuuugggaacacagcuguggccaaguguaaugaaaaacaugaugaggaguucugcgacaugcugcggcucuuugauuucaacaagcaggcuauccagcgccugaaagccgaagcgcagaugucuauucaacuuaucaauaaggccgucaacgcucugaucaaugaccagcucgugaugaagaaccaccugagagacauuaugggaaucccuuauugcaauuacagccgguauuguuaccugaaccacaccacaaccggccgcacgucccuccccaaaugcugucuggugagcaaugggucuuaccuuaacgaaacacauuucuccgaugacauugagcagcaagccgauaauaugaucaccgagaugcugcagaaggaauauauggagagacagggaaaaaccccucucggccuggucgaccuguuuguuuucagcacaucuuuuuaccuuauuagcaucuuccuccaccuggugaagaucccgacccaucggcacauugugggcaaauccugccccaagccucaucgccugaaccacauggggaucuguucuugcggacucuauaaacagcccggcgucccugugaaguggaagagaugaggacuagucccuguucccagagcccacuuuuuuuucuuuuuuugaaauaaaauagccugucuuucagaucucaaaggcucuuuucagagccaccaaaaaaaaaaaaaaaaaaaaaaaaaaaaaaaaaaaaaaaaaaaaaaaaaaaaaaaaaaaaaaaaagaauu

SEQ ID NO: 38495 - RNA, 1717 nt, Artificial Sequence
  mRNA product Design a-1 (hSL-A64-N5) comprising derived and/or modified sequence from LASV(G733-SLE-2010;Clade IV)__AIT17154__GPCmut11 (opt5)
aggagagucccgcagucggcguccagcggcucugcuuguucgugugugugucguugcaggccuuauucaagcuuaccaugggccagaucgugaccuucuuucaagaggucccccacguuauugaagaggugaugaacaucgugcugauugcccucagcauccuggcuguccuuaaggggcuguacaauuucgccacaugcggaauugugggccucguuuccuuucugcuucugugugggagaucuugcacgaccagccucuauaaaggaguguacgaacugcagacacuggagcucaacauggaaacccugaauaugacaaugccucuuuccuguaccaagaacaauucucaucacuauaucauggucggcaacgagacagggcuggagcucacccugacgaauaccagcaucauuaaccauaaauucugcaaucuuuccgacgcgcacaagaaaaaccuguacgaucaugcucucaugucuaucauuagcacauuucaccuguccaucccgaauuucaaccaguaugaagccaugagcugugacuuuaauggaggcaagauuucugugcaguacaaccugucccacagcuaugccggcgaugcugccaaucauugcgggaccaucgcuaacggaguucuccaaacauucaugcggauggccuggggcgggucuuacauugcgcuggacuccggacgcgauagaugggacuguaucaugaccagcuaccaguaucuuaucauucagaacacgacaugggaggaucacugccaguuuucucggcccuccccuaucggcuaccuggggcuccugagccaacgcaccagagacauuuauaucucccggcgccuucugggaacauucaccuggacccucucugauagcgaaggcaaggacacacccggcggguacugucugacgagauggaugcugauugaggccgagcucaaaugcuuuggaaauaccgcuguggccaaguguaacgaaaaacaugaugaggaguucugcgacaugcugcggcuuuuugauuucaauaagcaggcuauccagcgccugaaagccgaagcgcagauguccauccaacucauuaacaaggccgucaaugcucugaucaacgaccagcuuauuaugaagaaucaccugagagacaucaugggcauuccuuauugcaacuacagcaaauauuguuaccucaaucacacaaccacagggaagaccucucugcccaaaugcugucugguguccaacggaagcuaccucaaugaaacgcauuucucugaugacaucgagcagcaagccgauaacaugaucacagagaugcugcagaaggaauauauggagcggcagggcaaaaccccucuugggcugguggaccucuuugucuucagcaccuccuuuuaccugauuucuaucuuccugcaccuuguuaagauuccgacacaucgccacguggugggaaaaagcugccccaagccucauagacucaaucacaugggcaucuguuccugcggccuguaugggcagcccggagucccugugaaguggaaacggugaggacuagucccuguucccagagcccacuuuuuuuucuuuuuuugaaauaaaauagccugucuuucagaucucaaaggcucuuuucagagccaccaaaaaaaaaaaaaaaaaaaaaaaaaaaaaaaaaaaaaaaaaaaaaaaaaaaaaaaaaaaaaaaaagaauu

SEQ ID NO: 38496 - RNA, 1717 nt, Artificial Sequence
  mRNA product Design a-1 (hSL-A64-N5) comprising derived and/or modified sequence from MOPV/LASV reassortant(IGS-1;Clade IV)__AFY05576__GPCmut11 (opt5)
aggagagucccgcagucggcguccagcggcucugcuuguucgugugugugucguugcaggccuuauucaagcuuaccaugggccagaucgugaccuucuuucaagaggucccccacguuauugaagaggugaugaacaucgugcugauugcccucagcguccuggcugugcuuaaggggcuguacaauuucgccacaugcggacucguuggccuggugacguuucuucugcucugugggagauccugcaccacaucucuguauaaaggagucuacgaacugcagacccucgagcugaacauggaaacacuuaauaugaccaugccucugagcuguacaaagaacaauucccaucacuauaucauggugggcaacgagaccgggcucgagcugacgcuuaccaauacaucuauuaucaaccauaaauucugcaaucugagcgacgcgcacaagaaaaaccucuacgaucaugcucugauguccaucauuucuaccuuucaccugagcaucccgaauuucaaccaguaugaagccauguccugugacuuuaauggaggcaagauuagcguucaguacaaccucucucacuccuaugccggcgaugcugccaaucauugcgggacaguggcuaacggaguccugcaaaccuucaugcggauggccuggggcgggagcuacaucgcgcuugacucuggacgcggcaacugggauuguauuaugacguccuaccaguaucugaucauucagaauacaaccugggaggaccacugccaguuuagcagacccucuccuaucggguaccucggacugcuuucccaacggacacgcgauaucuauauuagcagacggcugcucggcaccuucaccuggacacuguccgacucugaaggcgaggauacgcccgggggauacugucugacccgcuggaugcucaucgaggccgaacugaagugcuuuggcaacacagcuguggccaaauguaaugagaagcaugacgaagaguucugcgauaugcuuagacuguuugacuucaacaaacaggcuauucagcggcucaaggccgaagcgcagaugagcauccaacugauuaauaaagccgugaacgcucuuaucaaugaucagcugaucaugaagaaccaccuccgcgacauuauggggaucccuuauugcaauuacuccaaguauuguuaccugaaccacaccacaaccggaagaacgagccugcccaaaugcugucucgucucuaauggcuccuaccugaacgagacacauuucagcgacgauauugagcagcaagccgacaauaugaucaccgaaaugcuucagaaggaguauauggaacggcaggggaaaaccccucugggacucguugaucuguuuguguucucuaccagcuuuuaccugauuuccaucuuccuucaccucgugaagaucccgacacaucgccacauugucggcaaaucuugccccaagccucauagacugaaccacaugggcaucuguagcugcgggcuguauaaacagcccggagugccuguuaaguggaagcggugaggacuagucccuguucccagagcccacuuuuuuuucuuuuuuugaaauaaaauagccugucuuucagaucucaaaggcucuuuucagagccaccaaaaaaaaaaaaaaaaaaaaaaaaaaaaaaaaaaaaaaaaaaaaaaaaaaaaaaaaaaaaaaaaagaauu

SEQ ID NO: 38497 - RNA, 1717 nt, Artificial Sequence
  mRNA product Design a-1 (hSL-A64-N5) comprising derived and/or modified sequence from LASV(LM765-SLE-2012;Clade IV)__AIT17814__GPCmut11 (opt5)
aggagagucccgcagucggcguccagcggcucugcuuguucgugugugugucguugcaggccuuauucaagcuuaccaugggccagaucgugaccuucuuucaagaggucccccacguuauugaagaggugaugaacaucgugcugauugcccucagcauccuggcuguccuuaaggggcuguacaauuucgccacaugcggacucgugggccugguuacguuucuucugcucugugggagauccugcaccacaucucuguauaaaggaguguacgaacugcagacccucgagcugaacauggaaacacuuaauaugaccaugccucugagcuguacaaagaacaauucccaucacuauauuauggucggcaacgagaccgggcucgagcugacgcuuaccaauacaucuaucaucgaccauaaauucugcaaccugagcgaugcgcaccggaagaaucucuacgaccaugcucugauguccauuaucucuaccuuucaccugagcauuccgaacuucaaucaguaugaagccauguccugugauuuuaacggaggcaaaaucagcgugcaguacaaucucucucacuccuaugccaaggacgcugccgaucauugcggcacaguugcuaacggggugcugcaaaccuucaugcgcauggccuggggaggcagcuacauugcgcuugacucugggagaggacggugggauuguaucaugacguccuaccaguaucugauuauccagaauacaaccugggaggaccacugccaguuuagccgccccucuccuaucggcuaccucgggcugcuuucccaaagaacacgggauauuuauaucagccgcagacugcucggaaccuucaccuggacacuguccgacucugaaggcaaggauacgcccggcggguacugucugacccgguggaugcucauugaggccgagcugaaaugcuuuggaaacacagcugucgccaaguguaacgaaaaacaugacgaggaguucugcgauaugcuucgccuguuugacuucaauaagcaggcuauccagagacucaaagccgaagcgcagaugagcauucaacugaucaacaaggccgugaaugcucuuaucaacgaccagcugauuaugaagaaucaccuccgggauaucaugggcauuccuuauugcaacuacuccaaauauuguuaccugaaucacaccacaaccgggaagacgagccugcccaaaugcugucucgugucuaacggauccuaccugaaugaaacacauuucagcgacgauaucgagcagcaagccgacaacaugauuaccgagaugcuucagaaggaauauauggagcgccagggcaaaaccccucuggggcucgucgaucuguuuguuuucucuaccagcuuuuaccugaucuccaucuuccuucaccucgugaagauuccgacacauagacacaucgugggaaaacccugcccuaagccccaucggcugaaucacaugggcauuuguucuugcggccuguauaagcagccugggguccccgugaaauggaagcgcugaggacuagucccuguucccagagcccacuuuuuuuucuuuuuuugaaauaaaauagccugucuuucagaucucaaaggcucuuuucagagccaccaaaaaaaaaaaaaaaaaaaaaaaaaaaaaaaaaaaaaaaaaaaaaaaaaaaaaaaaaaaaaaaaagaauu

SEQ ID NO: 38498 - RNA, 1717 nt, Artificial Sequence
  mRNA product Design a-1 (hSL-A64-N5) comprising derived and/or modified sequence from LASV(LM776-SLE-2012;Clade IV)__AIT17824__GPCmut11 (opt5)
aggagagucccgcagucggcguccagcggcucugcuuguucgugugugugucguugcaggccuuauucaagcuuaccaugggccagaucgugaccuucuuucaagaggucccccacguuauugaagaggugaugaacaucgugcugauugcccucagcauccuggcuguccuuaaggggcuguacaauuucgccacaugcggacucgugggccugguuacguuucuucugcucugugggagauccugcaccacaucuguguauaaaggagucuacgaacugcagacccuggagcucaacauggaaacacugaauaugaccaugccucuuagcuguacaaagaacaauucccaucacuauauuauggugggcaacgagaccgggcuggagcucacgcugaccaauacaucuaucaucaaccauaaauucugcaaucuuagcgacgcgcacaagaaaaaccuguacgaucaugcucucauguccauuaucucuaccuuucaccugagcauuccgaauuucaaccaguaugaagccauguccugugacuuuaauggaggcaagaucagcguucaguacaaccugucucacuccuaugccggcgaugcugccaaucauugcgggacaguggcuaacggaguccuccaaaccuucaugcggauggccuggggcgggagcuacauugcgcuggacucuggacacggcaagugggauuguaucaugacguccuaccaguaucuuauuauccagaacacaaccugggaggaccauugccaguuuagccgccccucuccuaucggguaccugggacuccugucccaaagaacacgggauauuuauaucagccgcagacuucugggcaccuucaccuggacacucuccgacucugaaggcaaagauacgcccgggggauacugucugacccgguggaugcugauugaggccgagcucaagugcuuuggcaauacagcuguggccaaauguaacgaaaagcacgacgaggaguucugcgauaugcugcgccuuuuugacuucaauaaacaggcuauccagagacugaaggccgaagcgcagaugagcauucaacucaucaacaaggccgugaaugcucugaucaacgaucagcuuauuaugaaaaaucaucugcgggacaucauggggauuccuuauugcaacuacuccaaguauuguuaccucaaucacaccacaaccggaaaaacgagccugcccaagugcugucuggucucuaacggcuccuaccucaaugaaacacacuucagcgacgauaucgagcagcaagccgacaacaugauuaccgagaugcugcagaaagaauauauggagcgccaggggaagaccccucuuggacugguugaucucuuuguguucucuaccagcuuuuaccugaucuccaucuuccugcaucuugugaaaauuccgacacacagacauaucgucggcaagucuugccccaagccucaccggcucaaucacaugggcauuuguagcugcgggcuguauaaacagcccggagugccuguucgcuggaagagaugaggacuagucccuguucccagagcccacuuuuuuuucuuuuuuugaaauaaaauagccugucuuucagaucucaaaggcucuuuucagagccaccaaaaaaaaaaaaaaaaaaaaaaaaaaaaaaaaaaaaaaaaaaaaaaaaaaaaaaaaaaaaaaaaagaauu

SEQ ID NO: 38499 - RNA, 1717 nt, Artificial Sequence
  mRNA product Design a-1 (hSL-A64-N5) comprising derived and/or modified sequence from LASV(Mad39;Clade IV)__ANH09722__GPCmut11 (opt5)
aggagagucccgcagucggcguccagcggcucugcuuguucgugugugugucguugcaggccuuauucaagcuuaccaugggccagaucgugaccuucuuucaagaggucccccacguuauugaagaggugaugaacaucgugcugauugcccucagcauccuggcuguccuuaaggggcuguacaauguggccacaugcggacucauuggccugguuacguuccuucugcucugugggagauccugcaccacaacccuguauaaaggaguguacgaacugcaggcgcucgagcugaacauggaaacacuuaauaugaccaugccucugucuuguacaaagaacaauagccaucacuauauccgggucggcaacgagaccgggcucgagcugacgcuuaccaauacaucccugaucaaccauaaauuuugcaaucucucugacgcucacaagaaaaaccuguacgaucaugcccugaugagcauuaucuccaccuuccaccucucuauuccgaauuuuaaccaguaugaagccaugagcugugacuucaaugauggaaagaucuccgugcaguacaaccugagccacacauaugcuggcgacaccgccaaucauugcggcacgguugcuaacggggugcuucaaacauuuaugcgcauggccuggggaggcucuuacauugcgcuggauuccgggagaggaggcugggacuguaucaugaccagcuaccaguaucucauuauccagaacacaaccugggaggaucacugccaguucucucggcccuccccuaucggguaccugggacuucugagccaacgcaccagagacauuuauaucucucggcgccuccugggcacauuuacguggacccuguccgauagcgaaggcaaggacacacccgggggauacugucucaccagauggaugcugauugaggccgagcuuaaaugcuucggcaauacagcugucgccaaguguaacgaaaaacaugaugaggaauuuugcgacaugcugcgccucuucgauuuuaauaagcaggcuauccagcggcugaaagccgaggcgcagauguccauucaacuuaucaacaaggccgugaaugcucugaucaacgaccagcucauuaugaagaaucaccugagagacaucauggggauuccuuauugcaacuacucuaaauauuguuaccugaaucacaccgugacgggaaagacaagccuccccaaaugcugucuggucuccaacggcagcuaccuuaaugaaacccauuucucugaugacaucgagcagcaagccgauaacaugauuaccgagaugcugcagaaggaauauauggagcggcaggggaaaacaccucucggacugguugaccuguucguguuuuccaccagcuucuaccuuaucucuaucuuucuccaccuggugaagauuccgacacaucgccacgucgugggcaaacccugcccuaagccccauagacugaaucacaugggcaucuguagcugcggguucuauaagcagccuggaguucccgugcgguggaaacgcugaggacuagucccuguucccagagcccacuuuuuuuucuuuuuuugaaauaaaauagccugucuuucagaucucaaaggcucuuuucagagccaccaaaaaaaaaaaaaaaaaaaaaaaaaaaaaaaaaaaaaaaaaaaaaaaaaaaaaaaaaaaaaaaaagaauu

SEQ ID NO: 38500 - RNA, 1717 nt, Artificial Sequence
  mRNA product Design a-1 (hSL-A64-N5) comprising derived and/or modified sequence from LASV(Z0947-SLE-2011;Clade IV)__AIT17840__GPCmut11 (opt5)
aggagagucccgcagucggcguccagcggcucugcuuguucgugugugugucguugcaggccuuauucaagcuuaccaugggccagaucgugaccuucuuucaagaggucccccacguuauugaagaggugaugaacaucgugcugauugcccucagcauccuggcuguccuuaaggggcuguacaauuucgccacaugcggacucgugggccugguuacguuucuucugcucugugggagauccugcaccauuucucuguauaaaggaguguacgaacugcagacacucgagcugaacauggaaacccuuaauaugacaaugccucugagcuguaccaagaacaauucccaucacuauaucauggucggcaacgagacagggcucgagcugacccuuacgaauaccucuaucauuaaccauaaauucugcaaucugagcgacgcgcacaagaaaaaccucuacgaucaugcucugauguccaucauuucuacauuucaccugagcaucccgaauuucaaccaguaugaagccauguccugugacuuuaauggaggcaagauuagcgugcaguacaaccucucucacuccuaugccggcgaugcugccaaucauugcgggaccguugcuaacggagugcugcaaacauucaugcggauggccuggggcgggagcuacaucgcgcuugacucuggacgcgauagaugggacuguauuaugaccuccuaccaguaucugaucauccagaacacgacaugggaggaucacugccaguuuagccggcccucuccuauuggcuaccucgggcugcuuucccaacgcaccagagacaucuauauuagccggcgccugcucggaacauucaccuggacccuguccgauucugaaggcaaggacacacccggcggguacugucugacgagauggaugcucaucgaggccgagcugaaaugcuuuggaaauaccgcugucgccaaguguaacgaaaaacaugaugaggaguucugcgacaugcuucggcuguuugauuucaauaagcaggcuauucagcgccucaaagccgaagcgcagaugagcauccaacugaucaacaaggccgugaaugcucuuauuaacgaccagcugaucaugaagaaucaccucagagacauuaugggcaucccuuauugcaacuacuccaaauauuguuaccugaaucacacaaccacagggaagaccagccugcccaaaugcugucucgugucuaacggauccuaccugaaugaaacgcauuucagcgaugacauugagcagcaagccgauaacaugaucacagagaugcuucagaaggaauauauggagcggcagggcaaaaccccucuggggcucgucgaccuguuuguuuucucuaccagcuuuuaccugaucuccauuuuccuucaccucgugaagaucccgacacaucgccacauugugggaaaacccugcccuaagccccauagacugaaucacaugggcaucuguucuugcggccuguauaagcagccugggguccccgugaaauggaagcggugaggacuagucccuguucccagagcccacuuuuuuuucuuuuuuugaaauaaaauagccugucuuucagaucucaaaggcucuuuucagagccaccaaaaaaaaaaaaaaaaaaaaaaaaaaaaaaaaaaaaaaaaaaaaaaaaaaaaaaaaaaaaaaaaagaauu

SEQ ID NO: 38501 - RNA, 1748 nt, Artificial Sequence
  mRNA product Design a-1 (hSL-A100) comprising derived and/or modified sequence from LASV(Josiah;Clade IV)__NP_694870__GPCmut11 (opt1)
aggagagucccgcagucggcguccagcggcucugcuuguucgugugugugucguugcaggccuuauucaagcuuaccaugggccagaucgugaccuucuuccaggaggucccccacgugaucgaggaggugaugaacaucguccugaucgcccucagcgugcuggccgugcugaaggggcucuacaacuucgcgaccugcggccuggucgggcuggugacguuccuccugcugugcggccgcuccugcaccaccagccucuacaaggggguguacgagcugcagacccuggagcucaacauggagacgcugaacaugaccaugccgcuguccugcaccaagaacaacagccaccacuacaucauggucggcaacgagaccggccucgagcugacgcugaccaacaccuccaucaucaaccacaaguucugcaaccucagcgacgcccacaagaagaaccuguacgaccacgcccugauguccaucaucagcaccuuccaccucuccauccccaacuucaaccaguacgaggccaugagcugcgacuucaacgggggcaagaucuccgugcaguacaaccugagccacuccuacgccggggacgcggccaaccacugcggcacgguggccaacgggguccugcagaccuucaugcggauggccuggggcggcagcuacaucgcgcucgacuccgggcgcggcaacugggacugcaucaugaccagcuaccaguaccugaucauccagaacaccacgugggaggaccacugccaguucucccggcccagccccaucggguaccugggccuccugucccagcgcacccgggacaucuacaucagccgccggcugcucggcaccuucaccuggacgcugagcgacuccgaggggaaggacaccccgggcggguacugccugacccgcuggaugcucaucgaggccgagcugaagugcuucggcaacaccgccguggccaagugcaacgagaagcacgacgaggaguucugcgacaugcugcggcuguucgacuucaacaagcaggccauccagcgccugaaggcggaggcccagaugagcauccagcugaucaacaaggccgugaacgcccucaucaacgaccagcugaucaugaagaaccaccuccgggacaucauggggauccccuacugcaacuacuccaaguacugcuaccucaaccacacgaccaccggccgcaccagccugcccaagugcugccuggucuccaacggcagcuaccucaacgagacgcacuucuccgacgacaucgagcagcaggccgacaacaugaucaccgagaugcugcagaaggaguacauggagcggcaggggaagacgccccugggccucguggaccuguucguguucagcaccuccuucuaccugaucagcaucuuccugcaccucgucaagaucccgacccaccgccacaucguggggaaguccugccccaagccccaccggcugaaccacaugggcaucugcagcugcgggcuguacaagcagcccggcgugccggucaaguggaagcgcugaggacuagucccuguucccagagcccacuuuuuuuucuuuuuuugaaauaaaauagccugucuuucagaucucaaaggcucuuuucagagccaccaaaaaaaaaaaaaaaaaaaaaaaaaaaaaaaaaaaaaaaaaaaaaaaaaaaaaaaaaaaaaaaaaaaaaaaaaaaaaaaaaaaaaaaaaaaaaaaaaaaaa

SEQ ID NO: 38502 - RNA, 1745 nt, Artificial Sequence
  mRNA product Design a-1 (hSL-A100) comprising derived and/or modified sequence from LASV(LP;Clade I)__AAF86701__GPCmut11 (opt1)
aggagagucccgcagucggcguccagcggcucugcuuguucgugugugugucguugcaggccuuauucaagcuuaccaugggccagaucaucaccuucuuccaggaggugccccacgucaucgaggaggugaugaacaucgugcugaucgcccucagccugcuggccauccucaaggggcuguacaacaucgcgaccugcggcaucaucgggcuggucgccuuccucuuccugugcggcaaguccugcagccugacgcucaagggcggguacgagcugcagacccuggagcucaacauggagacccugaacaugaccaugccgcuguccugcacgaagaacagcucccaccacuacauccgcgugggcaacgagaccgggcucgagcugacccugaccaacacgagcaucaucaaccacaaguucugcaaccucuccgacgcccacaagaagaaccuguacgaccacgcccugaugagcaucaucuccaccuuccaccucagcauccccaacuucaaccaguacgaggccauguccugcgacuucaacggcgggaagaucagcgugcaguacaaccugucccacagcuacgcgggcgacgccgccgagcacugcgggaccgucgccaacggcgugcugcagaccuucaugcggauggcguggggcgggcgcuacaucgcccucgacuccggcaaggggaacugggacugcaucaugacgagcuaccaguaccugaucauccagaacaccaccugggaggaccacugccaguucucccggcccagccccaucggcuaccugggccuccugucccagcgcacccgggacaucuacaucagccgccggcugcucgggacguucaccuggacccugagcgacuccgagggcaacgagacccccgggggcuacugccugacgcgcuggaugcucaucgaggccgagcugaagugcuucgggaacaccgccguggccaagugcaacgagaagcacgacgaggaguucugcgacaugcugcggcuguucgacuucaacaagcaggcgauccgccggcugaaggccgaggcccagaugagcauccagcugaucaacaaggccgucaacgcccucaucaacgaccagcugaucaugaagaaccaccuccgcgacaucaugggcauccccuacugcaacuacuccaaguacugcuaccucaaccacaccagcuccggccggaccagccugcccaagugcugccugaucuccaacgggagcuaccucaacgagacgcaguucuccgacgacaucgagcagcaggcggacaacaugaucaccgagaugcugcagaaggaguacaucgagcgccagggcaagaccccgcuggggcucguggacaucuucaucuucagcaccuccuucuaccugaucagcaucuuccugcaccugaucaagaucccgacgcaccggcacaucgugggcaagcccugccccaagccccaccgccucaaccacaugggggucugcuccugcggccuguacaagcacccgggcgugcccaccaaguggaagcggugaggacuagucccuguucccagagcccacuuuuuuuucuuuuuuugaaauaaaauagccugucuuucagaucucaaaggcucuuuucagagccaccaaaaaaaaaaaaaaaaaaaaaaaaaaaaaaaaaaaaaaaaaaaaaaaaaaaaaaaaaaaaaaaaaaaaaaaaaaaaaaaaaaaaaaaaaaaaaaaaaaaaa

SEQ ID NO: 38503 - RNA, 1745 nt, Artificial Sequence
  mRNA product Design a-1 (hSL-A100) comprising derived and/or modified sequence from LASV(803213;Clade II)__AAF86703__GPCmut11 (opt1)
aggagagucccgcagucggcguccagcggcucugcuuguucgugugugugucguugcaggccuuauucaagcuuaccaugggccagaucaucaccuucuuccaggaggugccccacgucaucgaggaggugaugaacaucgugcugaucgcccucagccugcuggccauccucaaggggaucuacaacgucgcgaccugcggccuguucgggcugaucuccuuccuccugcugugcggccgcagcugcuccgugacguacaaggggguguacgagcuccagacccuggagcugaacauggccaaccucaacaugaccaugccgcugagcugcaccaagaacaacucccaccacuacaucauggucggcaacgagacgggccuggagcucacccugaccaacaccagcaucaucaaccacaaguucugcaaccuguccgacgcccacaagaagaaccucuacgaccacgcccugaugagcaucaucuccacguuccaccugagcauccccaacuucaaccaguacgaggccauguccugcgacuucaacgggggcaagaucagcgugcaguacaaccucucccacagcuucgcgguggacgccgccaaccacugcgggaccaucgccaacggcguccugcagaccuucaugcggauggcguggggcggguccuacaucgcccuggacagcggcaaggggaacugggacugcaucaugaccuccuaccaguaccucaucauccagaacacgaccugggaggaccacugccaguucagccgccccucccccaucggcuaccuggggcugcucagccagcggacccgcgacaucuacaucagccggcgccugcugggcaccuucacguggacccucuccgacagcgagggcaacgaggcccccgggggcuacugccugacccgguggaugcugaucgaggccgagcucaagugcuucgggaacaccgccguggcgaagugcaacgagaagcacgacgaggaguucugcgacaugcugcgccuguucgacuucaacaagcaggccaucaagcggcucaagacggaggcccagauguccauccagcugaucaacaaggccgugaacgcccugaucaacgaccagcucaucaugaagaaccaccuccgcgacaucaugggcauccccuacugcaacuacagccgguacugcuaccugaaccacaccgucaccgggaagaccucccugccccgcugcugccuggugagcaacggcuccuaccugaacgagacgcacuucagcgacgacaucgagcagcaggcggacaacaugaucaccgagaugcuccagaaggaguacauggaccggcagggcaagaccccgcuggggcugguggaccucuucgucuucuccaccagcuucuaccugaucuccaucuuccugcaccuggugaagaucccgacgcaccgccacaucgugggcaagcccugccccaagccccaccggcucaaccacauggggaucugcagcugcggccuguacaagcacccggggguccccgugaaguggaagcgcugaggacuagucccuguucccagagcccacuuuuuuuucuuuuuuugaaauaaaauagccugucuuucagaucucaaaggcucuuuucagagccaccaaaaaaaaaaaaaaaaaaaaaaaaaaaaaaaaaaaaaaaaaaaaaaaaaaaaaaaaaaaaaaaaaaaaaaaaaaaaaaaaaaaaaaaaaaaaaaaaaaaaa

SEQ ID NO: 38504 - RNA, 1745 nt, Artificial Sequence
  mRNA product Design a-1 (hSL-A100) comprising derived and/or modified sequence from LASV(GA391;Clade III)__CAA36645__GPCmut11 (opt1)
aggagagucccgcagucggcguccagcggcucugcuuguucgugugugugucguugcaggccuuauucaagcuuaccaugggccagaucgugaccuucuuccaggaggucccccacgugaucgaggaggugaugaacaucguccugaucgcccucagcauccuggccauccugaaggggcucuacaacguggcgaccugcggccugaucgggcuggugacguuccuccugcuguccggccgcagcugcucccucaucuacaaggggaccuacgagcugcagacccuggagcucaacauggagacccugaacaugacgaugccgcugagcugcaccaagaacaacucccaccacuacauccgggucggcaacgagaccggccucgagcugacccugacgaacaccagcauccucaaccacaaguucugcaaccuguccgacgcccacaagcgcaaccuguacgaccacagccucauguccaucaucagcaccuuccaccuguccauccccaacuucaaccaguacgaggccaugagcugcgacuucaacgggggcaagaucaccgugcaguacaaccugucccacagcuucgccguggacgccgcggggcacugcggcacgcucgccaacgggguccugcagaccuucaugcggauggccuggggcggcuccuacaucgcccuggacagcgggcgcggcaacugggacugcaucaugaccuccuaccaguaccucaucauccagaacaccacgugggacgaccacugccaguucagccggcccucccccaucggguaccugggccugcucagccagcgcacccgggacaucuacaucagccgccggcugcugggcaccuucaccuggacgcucuccgacagcgaggggaacgagaccccgggcggguacugccugacccgcuggaugcugaucgaggcggagcucaagugcuucggcaacaccgccguggccaagugcaacgagaagcacgacgaggaguucugcgacaugcugcggcuguucgacuucaacaagcaggccauccgccggcucaagacggaggcccagauguccauccagcugaucaacaaggcggugaacgcccugaucaacgaccagcucaucaugaagaaccaccuccgcgacaucauggggauccccuacugcaacuacagccgguacugcuaccugaaccacaccuccaccggcaagaccagccugccccgcugcugccugaucuccaacggcagcuaccugaacgagacgaaguucuccgacgacaucgagcagcaggccgacaacaugaucaccgagaugcuccagaaggaguacaucgaccggcaggggaagacgccccugggccuggucgaccuguucguguucagcaccuccuucuaccucaucagcaucuuccugcaccuggugaagaucccgacccaccgccacaucgucgggaagcccugccccaagccccaccggcucaaccacaugggcaucugcuccugcgggcuguacaagcagccgggcgugcccgugcgcuggaagcggugaggacuagucccuguucccagagcccacuuuuuuuucuuuuuuugaaauaaaauagccugucuuucagaucucaaaggcucuuuucagagccaccaaaaaaaaaaaaaaaaaaaaaaaaaaaaaaaaaaaaaaaaaaaaaaaaaaaaaaaaaaaaaaaaaaaaaaaaaaaaaaaaaaaaaaaaaaaaaaaaaaaaa

SEQ ID NO: 38505 - RNA, 1748 nt, Artificial Sequence
  mRNA product Design a-1 (hSL-A100) comprising derived and/or modified sequence from LASV(AV;Clade V)__CCA30314__GPCmut11 (opt1)
aggagagucccgcagucggcguccagcggcucugcuuguucgugugugugucguugcaggccuuauucaagcuuaccaugggccagaucgugaccuucuuccaggaggucccccacgugaucgaggaggugaugaacaucguccugaucgcccucagcauccuggccgugcugaaggggcucuacaacaucgcgaccugcggccugaucgggcugaucacguuccuccugcugugcggccgcuccugcagcuccaaccucuacaaggggguguacgagcugcagagccuggaccucaacauggagacccugaacaugaccaugccgcuguccugcaccaagaacaacagccaccacuacauccgggucggcaacgacacgggccucgagcugacccugaccaacaccuccauccucaaccacaaguucugcaaccugagcgacgcccacaagaaggaccuguacgaccacgcccucauguccaucaucagcacguuccaccuguccauccccaacuucaaccaguacgaggccaugagcugcgacuucaacgggggcaagaucuccgugcaguacaaccugagccacuccuacgccaucgacgcggccaaccacugcgggaccguggccaacggcauccuccagaccuucaugcgcauggccuggggcgggagcuacaucgcgcuggacuccggccgggggaacugggacugcaucaugaccagcuaccaguaccugaucauccagaacacgaccugggagaaccacugccaguucucccgccccagccccaucggcuaccucgggcugcugagccagcggacccgcgacaucuacaucucccggcgccuccugggcaccuucacguggacccugagcgacuccgagggcaacgccacccccgggggcuacugccucacccgguggaugcugaucgaggccgagcugaagugcuucgggaacacggccgucgccaagugcaacgagaagcacgacgaggaguucugcgacaugcuccgccuguucgacuucaacaagcaggcgaucagccggcugaaguccgaggcccagaugagcauccagcucaucaacaaggccgugaacgcccugaucaacgaccagcugaucaugaagaaccaccuccgcgacaucaugggcauccccuacugcaacuacuccaaguacugcuaccugaaccacaccaucaccgggaagaccagccugcccaagugcugccucguguccaacggcagcuaccugaacgagacgcacuucuccgacgacaucgagcagcaggccgacaacaugaucaccgagaugcugcagaaggaguacauggagcggcagggcaagaccccgcucgggcuggucgaccuguucguguucagcaccuccuucuaccugaucagcaucuuccuccgccuggugaagaucccgacgcaccggcacaucgucggcaagcccugccccaagccccaccgccugaaccacauggggaucugcuccugcggccucuacaagcagccgggggugcccgugcgguggaagcgcugaggacuagucccuguucccagagcccacuuuuuuuucuuuuuuugaaauaaaauagccugucuuucagaucucaaaggcucuuuucagagccaccaaaaaaaaaaaaaaaaaaaaaaaaaaaaaaaaaaaaaaaaaaaaaaaaaaaaaaaaaaaaaaaaaaaaaaaaaaaaaaaaaaaaaaaaaaaaaaaaaaaaa

SEQ ID NO: 38506 - RNA, 1745 nt, Artificial Sequence
  mRNA product Design a-1 (hSL-A100) comprising derived and/or modified sequence from LASV(Togo/2016/7082;Clade VI)__AMR44577__GPCmut11 (opt1)
aggagagucccgcagucggcguccagcggcucugcuuguucgugugugugucguugcaggccuuauucaagcuuaccaugggccagaucaucaccuucuuccaggaggugccccacgucaucgaggaggugaugaacaucgugcugaucgcccucagccugcuggccauccucaagggggucuacaacguggcgaccugcggcaucaucgggcuggugacguuccuguuccucugcggccgcuccugcagccugaucuacaagggguccuacgagcugcagacccucgagcugaacauggagacccugaacaugaccaugccgcucagcugcacgaagaacuccagccaccacuacauccgggucggcaacgagaccggccuggagcugacccucaccaacacguccaucaucaaccacaaguucugcaaccugagcgacgcccacaagcgcaaccuguacgaccacgcccucauguccauccugagcaccuuccaccuguccauccccaacuucaaccaguacgaggccaugagcugcgacuucaacgggggcaagaucuccgugcaguacaaccucagccacgccuacgcgguggacgccgccgagcacugcgggaccgucgccaacggcgugcugcagaccuucaugcggauggcguggggcggguccuacaucgcccuggacagcggccgcgggaacugggacugcaucaugacguccuaccaguaccucaucauccagaacaccaccugggaggaccacugccaguucagccggcccucccccaucggcuaccuggggcugcucagccagcgcacccgggacaucuacaucagccgccggcugcugggcacguucaccuggacccucuccgacagcgagggcaacgagacccccgggggcuacugccugacgcgcuggaugcugaucgaggccgagcucaagugcuucgggaacaccgccguggccaagugcaacgagaagcacgacgaggaguucugcgacaugcugcggcuguucgacuucaacaagcaggcgauccagcgccucaaguccgaggcccagaugagcauccagcugaucaacaaggccgucaacgcccugaucaacgaccagcucaucaugaagaaccaccuccgggacaugaugggcauccccuacugcaacuacuccaaguacugcuaccugaaccacaccagcuccgggcgcaccagccugcccaagugcugccugguguccaacggcagcuaccugaacgagacgcacuucuccgacgacaucgagcagcaggccgacaacaugaucaccgagaugcuccagaaggaguacaucgaccggcagggcaagaccccgcuggggcugguggaccucuucgucuucagcaccuccuucuaccugaucagcaucuuccugcaccugaucaagaucccgacgcaccgccacaucgugggcaagcccugccccaagccccaccggcucaaccacauggggaucugcuccugcggccuguacaagcagccgggggugcccacccgcuggaagcggugaggacuagucccuguucccagagcccacuuuuuuuucuuuuuuugaaauaaaauagccugucuuucagaucucaaaggcucuuuucagagccaccaaaaaaaaaaaaaaaaaaaaaaaaaaaaaaaaaaaaaaaaaaaaaaaaaaaaaaaaaaaaaaaaaaaaaaaaaaaaaaaaaaaaaaaaaaaaaaaaaaaaa

SEQ ID NO: 38507 - RNA, 1745 nt, Artificial Sequence
  mRNA product Design a-1 (hSL-A100) comprising derived and/or modified sequence from LASV(KAK-428;Clade n.d. (VII))__ANH09740__GPCmut11 (opt1)
aggagagucccgcagucggcguccagcggcucugcuuguucgugugugugucguugcaggccuuauucaagcuuaccaugggccagaucgugaccuucuuccaggaggucccccacgugaucgaggaggugaugaacaucguccugaucgcccucagccugcuggccauccucaaggggcuguacaacuucgcgaccugcggcgugaucgggcugaucacguuccuccugcugugcggccgcuccugcagcgccaccuacaaggggcaguacgagcuccagacccuggagcugaacauggagucccucaacaugaccaugccgcugagcugcacgaagaacaacucccaccacuacauccgggccggcaacaacaccggccuggagcucacccugaccaacacgagcaucaucucccacaaguucugcaaccugagcgacgcccacaagaagaaccucuacgaccacacccugauguccaucaucaccaccuuccaccugagcauccccaacuucaaccaguacgaggccauguccugcgacuucaacgggggcaagaucagcauccaguacaaccucucccacagcuacgcgggggacgccgcccagcacugcggcacgguggccaacgggguccugcagaccuucaugcgcauggcguggggcggcuccuaccuggcccucgacagcgggcggcgcggcugggacugcaucaucuccagcuaccaguaccugaucauccagaacaccaccugggacgaccacugccaguucucccggcccagccccaucggguaccugggcuucgugagccagaagacgcgcgacaucuacaucucccggcgccuccugggcaccuucaccuggacccugagcgacuccgaggggcacgacaugccgggcggguacugccucacgcgguggaugcugaucgaggccgaccugaagugcuucggcaacaccgccguggccaagugcaacgagaagcacgacgaggaguucugcgacauguggcgccucuucgacuucaacaagcaggcgauccagcggcugaaggccgaggcccagaugaacauccagcugaucaacaaggccgucaacgcccucaucaacgaccagcugaugaugaagaaccaccuccgcgacaucauggggauccccuacugcaacuacagcaaguucugcuaccugaacaacaccaccacgggccggaccucccugccccgcugcugccugaucagcaacggcuccuaccucaacgagacccacuucagcgacgacaucgagcagcaggcggacaacaugaucaccgagaugcugcagaaggaguacauggaccggcaggggaagacgccccugggccucguggaccuguucguguucuccaccagcuucuaccugaucaccaucuuccuccaccuggucaagaucccgacccaccgccacaucguggggaagcccugccccaagccccaccggcugaaccacaugggcaucugcuccugcgggcuguacaagcagccgggcgugcccguccgcuggaagcggugaggacuagucccuguucccagagcccacuuuuuuuucuuuuuuugaaauaaaauagccugucuuucagaucucaaaggcucuuuucagagccaccaaaaaaaaaaaaaaaaaaaaaaaaaaaaaaaaaaaaaaaaaaaaaaaaaaaaaaaaaaaaaaaaaaaaaaaaaaaaaaaaaaaaaaaaaaaaaaaaaaaaa

SEQ ID NO: 38508 - RNA, 1745 nt, Artificial Sequence; identical to SEQ ID NO: 38502
  mRNA product Design a-1 (hSL-A100) comprising derived and/or modified sequence from LASV(Pinneo-NIG-1969;Clade I)__AIT17836__GPCmut11 (opt1)

SEQ ID NO: 38509 - RNA, 1745 nt, Artificial Sequence
  mRNA product Design a-1 (hSL-A100) comprising derived and/or modified sequence from LASV(ISTH0009-NIG-2011;Clade II)__AIT17404__GPCmut11 (opt1)
aggagagucccgcagucggcguccagcggcucugcuuguucgugugugugucguugcaggccuuauucaagcuuaccaugggccagaucaucaccuucuuccaggaggugccccacgucaucgaggaggugaugaacaucgugcugaucgcccucagccugcuggccauccucaaggggaucuacaacgucgcgaccugcggccuguucgggcugguguccuuccuccugcugugcggccgcagcugcuccacgaccuacaaggggguguacgagcuccagacccuggagcuggacauggccagccucaacaugaccaugccgcuguccugcacgaagaacaacagccaccacuacaucauggucggcaacgagaccggccuggagcucacccugaccaacacguccaucaucaaccacaaguucugcaaccugagcgacgcccacaagaagaaccucuacgaccacgcccugauguccaucaucagcaccuuccaccuguccauccccaacuucaaccaguacgaggccaugagcugcgacuucaacgggggcaagaucuccgugcaguacaaccucagccacgcguacgccguggacgccgccaaccacugcgggaccaucgcgaacggcguccugcagaccuucaugcggauggccuggggcggguccuacaucgcccuggacagcggcaagggguccugggacugcaucaugacgagcuaccaguaccucaucauccagaacaccaccugggaggaccacugccaguucucccgccccagccccaucggcuaccuggggcugcucagccagcggacccgcgacaucuacaucucccggcgccugcugggcacguucaccuggacccucagcgacuccgagggcaacgagacccccgggggcuacugccugacgcgguggaugcugaucgaggccgagcucaagugcuucgggaacaccgccguggcgaagugcaacgagaagcacgacgaggaguucugcgacaugcugcgccuguucgacuucaacaagcaggccauccggcgccucaagaccgaggcccagaugagcauccagcugaucaacaaggccgugaacgcccugaucaacgaccagcucaucaugaagaaccaccuccgggacaucaugggcaucccguacugcaacuacuccaaguacugcuaccugaaccacaccgucacggggaagaccagccugccccgcugcugccugguguccaacggcagcuaccugaacgagacccacuucuccgacgacaucgagcagcaggcggacaacaugaucaccgagcuccugcagaaggaguacauggaccggcagggcaagacgccccuggggcucguggaccuguucgucuucagcaccuccuucuaccugaucagcaucuuccugcaccucaucaagaucccgacccaccgccacaucaccggcaagcccugccccaagccccaccggcugaaccacauggggaucugcuccugcggccuguacaagcacccgggggugcccgugaaguggaagcgcugaggacuagucccuguucccagagcccacuuuuuuuucuuuuuuugaaauaaaauagccugucuuucagaucucaaaggcucuuuucagagccaccaaaaaaaaaaaaaaaaaaaaaaaaaaaaaaaaaaaaaaaaaaaaaaaaaaaaaaaaaaaaaaaaaaaaaaaaaaaaaaaaaaaaaaaaaaaaaaaaaaaaa

SEQ ID NO: 38510 - RNA, 1745 nt, Artificial Sequence
  mRNA product Design a-1 (hSL-A100) comprising derived and/or modified sequence from LASV(ISTH2010-NIG-2012;Clade II)__AIT17482__GPCmut11 (opt1)
aggagagucccgcagucggcguccagcggcucugcuuguucgugugugugucguugcaggccuuauucaagcuuaccaugggccagaucaucaccuucuuccaggaggugccccacgucaucgaggaggugaugaacaucgugcugaucgcccucagccugcuggccauccucaaggggaucuacaacgucgcgaccugcggccuguucgggcugguguccuuccuccugcugugcggccgcagcugcuccacgaccuacaaggggguguacgagcuccagacccuggagcuggacauggccagccucaacaugaccaugccgcuguccugcacgaagaacaacagccaccacuacaucauggucggcaacgagaccggccuggagcucacccugaccaacacguccaucaucaaccacaaguucugcaaccugagcgacgcccacaagaagaaccucuacgaccacgcccugauguccaucaucagcaccuuccaccuguccauccccaacuucaaccaguacgaggccaugagcugcgacuucaacgggggcaagaucuccgugcaguacaaccucagccacgcguacgccguggacgccgccaaccacugcgggaccaucgcgaacggcguccugcagaccuucaugcggauggccuggggcggguccuacaucgcccuggacagcggcaagggguccugggacugcaucaugacgagcuaccaguaccucaucauccagaacaucaccugggaggaccacugccaguucucccgccccagccccaucggcuaccuggggcugcucagccagcggacccgcgacaucuacaucucccggcgccugcugggcaccuucacguggacccucagcgacuccgagggcaacgagacccccgggggcuacugccugacccgguggaugcugaucgaggccgagcucaagugcuucgggaacacggccguggcgaagugcaacgagaagcacgacgaggaguucugcgacaugcugcgccuguucgacuucaacaagcaggccauccggcgccucaagaccgaggcccagaugagcauccagcugaucaacaaggccgugaacgcccugaucaacgaccagcucaucaugaagaaccaccuccgggacaucaugggcauccccuacugcaacuacuccaaguacugcuaccugaaccacaccgucaccgggaagacgagccugccccgcugcugccugguguccaacggcagcuaccugaacgagacccacuucuccgacgacaucgagcagcaggcggacaacaugaucaccgagcuccugcagaaggaguacaucgaccggcagggcaagaccccgcuggggcucguggaccuguucgucuucagcacguccuucuaccugaucagcaucuuccugcaccucgugaagaucccgacccaccgccacguggucggcaagcccugccccaagccccaccggcugaaccacauggggaucugcuccugcggccuguacaagcacccgggggugcccgugaaguggaagcgcugaggacuagucccuguucccagagcccacuuuuuuuucuuuuuuugaaauaaaauagccugucuuucagaucucaaaggcucuuuucagagccaccaaaaaaaaaaaaaaaaaaaaaaaaaaaaaaaaaaaaaaaaaaaaaaaaaaaaaaaaaaaaaaaaaaaaaaaaaaaaaaaaaaaaaaaaaaaaaaaaaaaaa

SEQ ID NO: 38511 - RNA, 1745 nt, Artificial Sequence
  mRNA product Design a-1 (hSL-A100) comprising derived and/or modified sequence from LASV(Lassa virus/H.sapiens-wt/NGA/2015/ISTH_0543;Clade II)__AVO03639__GPCmut11 (opt1)
aggagagucccgcagucggcguccagcggcucugcuuguucgugugugugucguugcaggccuuauucaagcuuaccaugggccagaucaucaccuucuuccaggaggugccccacgucaucgaggaggugaugaacaucgugcugaucgcccucagccugcuggccauccucaaggggaucuacaacgucgcgaccugcggccuguucgggcugguguccuuccuccugcugugcggccgcagcugcuccacgaccuacaaggggguguacgagcuccagacccuggagcuggacauggccaaccucaacaugaccaugccgcugagcugcacgaagaacaacucccaccacuacaucauggucggcaacgagaccggccuggagcucacccugaccaacacgagcaucaucaaccacaaguucugcaaccuguccgacgcccacaagaagaaccucuacgaccacgcccugaugagcaucaucuccaccuuccaccugagcauccccaacuucaaccaguacgaggccauguccugcgacuucaacgggggcaagaucagcgugcaguacaaccucucccacaccuacgcgguggacgccgccaaccacugcgggaccaucgccaacggcguccugcagacguucaugcggauggcguggggcgggagcuacaucgcccuggacuccggcaaggggagcugggacugcaucaugaccuccuaccaguaccucgugauccagaacaccaccugggaggaccacugccaguucagccgccccucccccaucggcuaccuggggcugcucagccagcggacgcgcgacaucuacaucagccggcgccugcugggcaccuucaccuggacccucuccgacagcgagggcaacgagacgcccgggggcuacugccugacccgguggaugcugaucgaggccgagcucaagugcuucgggaacaccgccguggccaagugcaacgagaagcacgacgaggaguucugcgacaugcugcgccuguucgacuucaacaagcaggcgauccggcgccucaagaccgaggcccagauguccauccagcugaucaacaaggccgucaacgcccugaucaacgaccagcucaucaugaagaaccaccuccgggacaucaugggcauccccuacugcaacuacagcaaguacugcuaccugaaccacacggugaccgggaagaccucccugccccgcugcugccuggugagcaacggcuccuaccugaacgagacccacuucagcgacgacaucgagcagcaggccgacaacaugaucacggagcuccugcagaaggaguacaucgaccggcagggcaagaccccgcuggggcucgucgaccuguucguguucuccaccagcuucuaccugaucuccaucuuccugcaccucgugaagaucccgacccaccgccacaucacgggcaagcccugccccaagccccaccggcugaaccacauggggaucugcagcugcggccuguacaagcacccggggguccccgugaaguggaagcgcugaggacuagucccuguucccagagcccacuuuuuuuucuuuuuuugaaauaaaauagccugucuuucagaucucaaaggcucuuuucagagccaccaaaaaaaaaaaaaaaaaaaaaaaaaaaaaaaaaaaaaaaaaaaaaaaaaaaaaaaaaaaaaaaaaaaaaaaaaaaaaaaaaaaaaaaaaaaaaaaaaaaaa

SEQ ID NO: 38512 - RNA, 1745 nt, Artificial Sequence
  mRNA product Design a-1 (hSL-A100) comprising derived and/or modified sequence from LASV(Lassa virus/H.sapiens-wt/NGA/2016/ISTH_0009;Clade II)__AVO03571__GPCmut11 (opt1)
aggagagucccgcagucggcguccagcggcucugcuuguucgugugugugucguugcaggccuuauucaagcuuaccaugggccagaucaucaccuucuuccaggaggugccccacgucaucgaggaggugaugaacaucgugcugaucgcccucagccugcuggccauccucaaggggaucuacaacgucgcgaccugcggccugcuggggcucguguccuuccugcugcucugcggccgcagcugcuccacgaccuacaaggggguguacgagcugcagacccuggagcucgacauggccagccugaacaugaccaugccgcuguccugcacgaagaacaacagccaccacuacaucauggucggcaacgagaccggccucgagcugacccugaccaacacguccaucaucaaccacaaguucugcaaccucagcgacgcccacaagaagaaccuguacgaccacgcccugauguccaucaucagcaccuuccaccucuccauccccaacuucaaccaguacgaggccaugagcugcgacuucaacgggggccggaucuccgugcaguacaaccugagccacuccuacgcgguggacgccgccaaccacugcgggaccaucgccaacggcguccugcagaccuucaugcgcauggcguggggcgggagcuacaucgcccucgacuccggcaaggggagcugggacugcaucaugacguccuaccaguaccugaucauccagaacaccaccugggaggaccacugccaguucagccggcccagccccaucggcuaccuggggcuccugucccagcgcacccgggacaucuacaucagccgccggcugcucggcacguucaccuggacccuguccgacagcgagggcaacgagacccccgggggcuacugccugacgcgcuggaugcucaucgaggccgagcugaagugcuucgggaacaccgccguggccaagugcaacgagaagcacgacgaggaguucugcgacaugcugcggcuguucgacuucaacaagcaggcgauccgccggcugaagaccgaggcccagauguccauccagcugaucaacaaggccgugaacgcccucaucaacgaccagcugaucaugaagaaccaccuccgcgacaucaugggcaucccguacugcaacuacagcaaguacugcuaccucaaccacaccgucacggggaagaccucccugccccggugcugccuggugagcaacggcuccuaccucaacgagacccacuucagcgacgacaucgagcagcaggccgacaacaugaucaccgagcugcugcagaaggaguacaucgaccgccagggcaagacgccccucgggcugguggaccuguucgucuucuccaccagcuucuaccugaucuccaucuuccuccaccuggugaagaucccgacccaccggcacaucaccggcaagcccugccccaagccccaccgccugaaccacauggggaucugcagcugcggccucuacaaccacccgggggugcccgucaaguggaagcggugaggacuagucccuguucccagagcccacuuuuuuuucuuuuuuugaaauaaaauagccugucuuucagaucucaaaggcucuuuucagagccaccaaaaaaaaaaaaaaaaaaaaaaaaaaaaaaaaaaaaaaaaaaaaaaaaaaaaaaaaaaaaaaaaaaaaaaaaaaaaaaaaaaaaaaaaaaaaaaaaaaaaa

SEQ ID NO: 38513 - RNA, 1745 nt, Artificial Sequence
  mRNA product Design a-1 (hSL-A100) comprising derived and/or modified sequence from LASV(Lassa virus/H.sapiens-wt/NGA/2016/ISTH_0017;Clade II)__AVO03567__GPCmut11 (opt1)
aggagagucccgcagucggcguccagcggcucugcuuguucgugugugugucguugcaggccuuauucaagcuuaccaugggccagaucaucaccuucuuccaggaggugccccacgucaucgaggaggugaugaacaucgugcugaucgcccucagccugcuggccauccucaaggggaucuacaacgucgcgaccugcggccuguucgggcugguguccuuccuccugcugugcggccgcagcugcuccacgaccuacaaggggguguacgagcuccagacccuggagcuggacauggccagccucaacaugaccaugccgcuguccugcacgaagaacaacagccaccacuacaucauggucggcaacgagaccggccuggagcucacccugaccaacacguccaucaucaaccacaaguucugcaaccugagcgacgcccacaagaagaaccucuacgaccacgcccugauguccaucaucagcaccuuccaccuguccauccccaacuucaaccaguacgaggccaugagcugcgacuucaacgggggcaagaucuccgugcaguacaaccucagccacaccuacgcgaucgacgccgccaaccacugcgggaccaucgccaacggcgugcugcagacguucaugcggauggcguggggcggguccuacaucgcccuggacagcggcaagggguccugggacugcaucaugaccagcuaccaguaccucaucauccagaacaccaccugggaggaccacugccaguucucccgccccagccccaucggcuaccuggggcugcucagccagcggacgcgcgacaucuacaucucccggcgccugcugggcaccuucaccuggacccucagcgacuccgagggcaacgagacgcccgggggcuacugccugacccgguggaugcugaucgaggccgagcucaagugcuucgggaacaccgccgucgccaagugcaacgagaagcacgacgaggaguucugcgacaugcugcgccuguucgacuucaacaagcaggcgauccggcgccucaagaccgaggcccagaugagcauccagcugaucaacaaggccgugaacgcccugaucaacgaccagcucaucaugaagaaccaccuccgggacaucaugggcauccccuacugcaacuacuccaaguacugcuaccugaaccacacggugaccgggaagaccagccugccccgcugcugccuggucuccaacggcagcuaccugaacgagacccacuucuccgacgacaucgagcagcaggccgacaacaugaucacggagcuccugcagaaggaguacauggaccggcagggcaagaccccgcuggggcucguggaccuguucguguucagcaccuccuucuaccugaucagcaucuuccugcaccucguccgcaucccgacccaccggcacgugaucggcaagcccugccccaagccccaccgccugaaccacauggggaucugcuccugcggccuguacaagcacccgggggugcccgucaaguggaagcggugaggacuagucccuguucccagagcccacuuuuuuuucuuuuuuugaaauaaaauagccugucuuucagaucucaaaggcucuuuucagagccaccaaaaaaaaaaaaaaaaaaaaaaaaaaaaaaaaaaaaaaaaaaaaaaaaaaaaaaaaaaaaaaaaaaaaaaaaaaaaaaaaaaaaaaaaaaaaaaaaaaaaa

SEQ ID NO: 38514 - RNA, 1745 nt, Artificial Sequence
  mRNA product Design a-1 (hSL-A100) comprising derived and/or modified sequence from LASV(Lassa virus/H.sapiens-wt/NGA/2018/ISTH_0959;Clade II)__AVV65099__GPCmut11 (opt1)
aggagagucccgcagucggcguccagcggcucugcuuguucgugugugugucguugcaggccuuauucaagcuuaccaugggccagaucaucaccuucuuccaggaggugccccacgucaucgaggaggugaugaacaucgugcugaucgcccucagccugcuggccauccucaaggggaucuacaacgucgugaccugcggccuguucgggcugguguccuuccuccugcugugcggccgcagcugcuccacgaccuacaagggggucuacgagcuccagacccuggagcuggacauggcgagccucaacaugaccaugccgcuguccugcacgaagaacaacagccaccacuacaucauggugggcaacgagaccggccuggagcucacccugaccaacacguccaucaucaaccacaaguucugcaaccugagcgacgcccacaagaagaaccucuacgaccacgcccugauguccaucaucagcaccuuccaccuguccauccccaacuucaaccaguacgaggccaugagcugcgacuucaacgggggcaagaucuccgugcaguacaaccucagccacgccuacgcgaucgacgccgccaaccacugcgggaccaucgccaacggcguccugcagaccuucaugcggauggcguggggcggguccuacaucgcccuggacagcggcaagggguccugggacugcaucaugacgagcuaccaguaccucaucauccagaacaccaccugggaggaccacugccaguucucccgccccagccccaucggcuaccuggggcugcucagccagcggacccgcgacaucuacaucucccggcgccugcugggcacguucaccuggacccucagcgacuccgagggcaacgagacccccgggggcuacugccugacgcgguggaugcugaucgaggccgagcucaagugcuucgggaacaccgccguggccaagugcaacgagaagcacgacgaggaguucugcgacaugcugcgccuguucgacuucaacaagcaggcgauccggcgccucaagaccgaggcccagaugagcauccagcugaucaacaaggccgugaacgcccugaucaacgaccagcucaucaugaagaaccaccuccgggacaucaugggcaucccguacugcaacuacuccaaguacugcuaccugaaccacaccgucacggggaagaccagccugccccgcugcugccugguguccaacggcagcuaccugaacgagacccacuucuccgacgacaucgagcagcaggccgacaacaugaucaccgagcuccugcagaaggaguacaucgaccggcagggcaagacgccccuggggcucguggaccuguucgucuucagcaccuccuucuaccugaucagcaucuuccugcaccucgugaagaucccgacccaccgccacgugaucggcaagcccugccccaagccccaccggcugaaccacauggggaucugcuccugcggccuguacaagcacccggggguccccgugaaguggaagcgcugaggacuagucccuguucccagagcccacuuuuuuuucuuuuuuugaaauaaaauagccugucuuucagaucucaaaggcucuuuucagagccaccaaaaaaaaaaaaaaaaaaaaaaaaaaaaaaaaaaaaaaaaaaaaaaaaaaaaaaaaaaaaaaaaaaaaaaaaaaaaaaaaaaaaaaaaaaaaaaaaaaaaa

SEQ ID NO: 38515 - RNA, 1745 nt, Artificial Sequence
  mRNA product Design a-1 (hSL-A100) comprising derived and/or modified sequence from LASV(LASV003-NIG-2008;Clade II)__AIT17580__GPCmut11 (opt1)
aggagagucccgcagucggcguccagcggcucugcuuguucgugugugugucguugcaggccuuauucaagcuuaccaugggccagaucaucaccuucuuccaggaggugccccacgucaucgaggaggugaugaacaucgugcugaucgcccucagccugcuggccauccucaaggggaucuacaacgucgcgaccugcggccuguucgggcugguguccuuccuccugcugugcggccgcagcugcuccacgaccuacaaggggguguacgagcuccagacccuggagcuggacauggccagccucaacaugaccaugccgcuguccugcacgaagaacaacagccaccacuacaucauggucggcaacgagaccggccuggagcucacccugaccaacacguccaucaucaaccacaaguucugcaaccugagcgacgcccacaagaagaaccucuacgaccacgcccugauguccaucaucagcaccuuccaccuguccauccccaacuucaaccaguacgaggccaugagcugcgacuucaacgggggcaagaucuccgugcaguacaaccucagccacaccuacgcgguggacgccgccaaccacugcgggaccaucgccaacggcguccugcagacguucaugcggauggcguggggcggguccuacaucgcccuggacagcggcaagggguccugggacugcaucaugaccagcuaccaguaccucaucauccagaacaccaccugggaggaccacugccaguucucccgccccagccccaucggcuaccuggggcugcucagccagcggacgcgcgacaucuacaucucccggcgccugcugggcaccuucaccuggacccucagcgacuccgagagcaacgagacgccgggcggguacugccugacccgguggaugcugaucgaggccgagcucaagugcuucggcaacaccgccguggccaagugcaacgagaagcacgacgaggaguucugcgacaugcugcgccuguucgacuucaacaagcaggcgauccggcgccucaaggccgaggcccagauguccauccagcugaucaacaaggccgugaacgcccugaucaacgaccagcucaucaugaagaaccaccuccgggacaucauggggauccccuacugcaacuacagcaaguacugcuaccugaaccacaccgucacgggccgcaccucccugccccggugcugccuggugagcaacggguccuaccugaacgagacccacuucagcgacgacaucgagcagcaggcggacaacaugaucaccgagcuccugcagaaggaguacauggaccgccagggcaagacgccccugggccucguggaccuguucgucuucuccaccagcuucuaccugaucuccaucuuccugcaccucgugaagaucccgacccaccggcacgugaucgggaagcccugccccaagccccaccgccugaaccacaugggcaucugcagcugcgggcuguacaagcacccgggcguccccgugaaguggaagcggugaggacuagucccuguucccagagcccacuuuuuuuucuuuuuuugaaauaaaauagccugucuuucagaucucaaaggcucuuuucagagccaccaaaaaaaaaaaaaaaaaaaaaaaaaaaaaaaaaaaaaaaaaaaaaaaaaaaaaaaaaaaaaaaaaaaaaaaaaaaaaaaaaaaaaaaaaaaaaaaaaaaaa

SEQ ID NO: 38516 - RNA, 1745 nt, Artificial Sequence
  mRNA product Design a-1 (hSL-A100) comprising derived and/or modified sequence from LASV(LASV035-NIG-2009;Clade II)__AIT17588__GPCmut11 (opt1)
aggagagucccgcagucggcguccagcggcucugcuuguucgugugugugucguugcaggccuuauucaagcuuaccaugggccagaucaucaccuucuuccaggaggugccccacgucaucgaggaggugaugaacaucgugcugaucgcccucagccugcuggccauccucaaggggaucuacaacgucgcgaccugcggccuguucgggcugguguccuuccuccugcugugcggccgcagcugcuccacgaccuacaaggggguguacgagcuccagacccuggagcuggacauggccagccucaacaugaccaugccgcuguccugcacgaagaacaacagccaccacuacaucauggucggcaacgagaccggccuggagcucacccugaccaacacguccaucaucaaccacaaguucugcaaccugagcgacgcccacaagaagaaccucuacgaccacgcccugauguccaucaucagcaccuuccaccuguccauccccaacuucaaccaguacgaggccaugagcugcgacuucaacgggggcaagaucuccgugcaguacaaccucagccacgcguacgccguggacgccgccaaccacugcgggaccaucgcgaacggcguccugcagaccuucaugcggauggccuggggcggguccuacaucgcccuggacagcggcaagggguccugggacugcaucaugacgagcuaccaguaccucaucauccagaacaccaccugggaggaccacugccaguucucccgccccagccccaucggcuaccuggggcugcucagccagcggacccgcgacaucuacaucucccggcgccugcugggcacguucaccuggacccucagcgacuccgagggcaacgagacccccgggggcuacugccugacgcgguggaugcugaucgaggccgagcucaagugcuucgggaacaccgccguggcgaagugcaacgagaagcacgacgaggaguucugcgacaugcugcgccuguucgacuucaacaagcaggccauccggcgccucaaggccgaggcccagaugagcauccagcugaucaacaaggccgugaacgcgcugaucaacgaccagcucaucaugaagaaccaccuccgggacaucaugggcauccccuacugcaacuacuccaaguacugcuaccugaaccacaccgucaccgggaagacgagccugccccgcugcugccugguguccaacggcagcuaccugaacgagacccacuucuccgacgacaucgagcagcaggccgacaacaugaucaccgagcuccugcagaaggaguacaucgaccggcagggcaagaccccgcuggggcucguggaccuguucgucuucagcacguccuucuaccugaucagcaucuuccugcaccucgugaagaucccgacccaccgccacgugaucggcaagcccugccccaagccccaccggcugaaccacauggggaucugcuccugcggccuguacaagcacccggggguccccgugaaguggaagcgcugaggacuagucccuguucccagagcccacuuuuuuuucuuuuuuugaaauaaaauagccugucuuucagaucucaaaggcucuuuucagagccaccaaaaaaaaaaaaaaaaaaaaaaaaaaaaaaaaaaaaaaaaaaaaaaaaaaaaaaaaaaaaaaaaaaaaaaaaaaaaaaaaaaaaaaaaaaaaaaaaaaaaa

SEQ ID NO: 38517 - RNA, 1745 nt, Artificial Sequence
  mRNA product Design a-1 (hSL-A100) comprising derived and/or modified sequence from LASV(LASV1000-NIG-2009;Clade II)__AIT17782__GPCmut11 (opt1)
aggagagucccgcagucggcguccagcggcucugcuuguucgugugugugucguugcaggccuuauucaagcuuaccaugggccagaucaucaccuucuuccaggaggugccccacgucaucgaggaggugaugaacaucgugcugaucgcccucagccugcuggccauccucaaggggaucuacaacgucgcgaccugcggccuguucgggcugguguccuuccuccugcugugcggccgcagcugcuccacgaccuacaaggggguguacgagcuccagacccuggagcuggacauggccagccucaacaugaccaugccgcuguccugcacgaagaacaacagccaccacuacaucauggucggcaacgagaccggccuggagcucacccugaccaacacguccaucaucaaccacaaguucugcaaccugagcgacgcccacaagaagaaccucuacgaccacgcccugauguccaucaucagcaccuuccaccuguccauccccaacuucaaccaguacgaggccaugagcugcgacuucaacgggggcaagaucuccgugcaguacaaccucagccacaccuacgcgguggacgccgccaaccacugcgggaccaucgccaacggcguccugcagacguucaugcggauggcguggggcggguccuacaucgcccuggacagcggcaagggguccugggacugcaucaugaccagcuaccaguaccucaucauccagaacaccaccugggaggaccacugccaguucucccgccccagccccaucggcuaccuggggcugcucagccagcggacgcgcgacaucuacaucucccggcgccugcugggcaccuucaccuggacccucagcgacuccgagggcaacgagacgcccgggggcuacugccugacccgguggaugcugaucgaggccgagcucaagugcuucgggaacaccgccguggccaagugcaacgagaagcacgacgaggaguucugcgacaugcugcgccuguucgacuucaacaagcaggcgaucaagcggcucaagaccgaggcccagaugagcauccagcugaucaacaaggccgugaacgcccugaucaacgaccagcucaucaugaagaaccaccuccgcgacaucaugggcauccccuacugcaacuacuccaaguacugcuaccugaaccacacggucaccgggaagaccagccugccccggugcugccugguguccaacggcagcuaccugaacgagacccacuucuccgacgacaucgagcagcaggccgacaacaugaucacggagcuccugcagaaggaguacaucgaccgccagggcaagaccccgcuggggcucguggaccuguucgucuucagcaccuccuucuaccugaucagcaucuuccugcaccucgugaagaucccgacccaccggcacguggucggcaagcccugccccaagccccaccgccugaaccacauggggaucugcuccugcggccuguacaagcacccgggggugcccgugaaguggaagcggugaggacuagucccuguucccagagcccacuuuuuuuucuuuuuuugaaauaaaauagccugucuuucagaucucaaaggcucuuuucagagccaccaaaaaaaaaaaaaaaaaaaaaaaaaaaaaaaaaaaaaaaaaaaaaaaaaaaaaaaaaaaaaaaaaaaaaaaaaaaaaaaaaaaaaaaaaaaaaaaaaaaaa

SEQ ID NO: 38518 - RNA, 1745 nt, Artificial Sequence
  mRNA product Design a-1 (hSL-A100) comprising derived and/or modified sequence from LASV(LASV221-NIG-2010;Clade II)__AIT17624__GPCmut11 (opt1)
aggagagucccgcagucggcguccagcggcucugcuuguucgugugugugucguugcaggccuuauucaagcuuaccaugggccagaucaucaccuucuuccaggaggugccccacgucaucgaggaggugaugaacaucgugcugaucgcccucagccugcuggccauccucaaggggaucuacaacgucgcgaccugcggccuguucgggcugguguccuuccuccugcugugcggccgcagcugcuccacgaccuacaaggggguguacgagcuccagacccuggagcuggacauggccagccucaacaugaccaugccgcuguccugcacgaagaacaacagccaccacuacaucauggucggcaacgagaccggccuggagcucacccugaccaacacguccaucaucaaccacaaguucugcaaccugagcgacgcccacaagaagaaccucuacgaccacgcccugauguccaucaucagcaccuuccaccuguccauccccaacuucaaccaguacgaggccaugagcugcgacuucaacgggggcaagaucuccgugcaguacaaccucagccacaccuacgcgaucgacgccgccaaccacugcgggaccaucgccaacggcgugcugcagacguucaugcggauggcguggggcggguccuacaucgcccuggacagcggcaagggguccugggacugcaucaugaccagcuaccaguaccucaucauccagaacaccaccugggaggaccacugccaguucucccgccccagccccaucggcuaccuggggcugcucagccagcggacgcgcgacaucuacaucucccggcgccugcugggcaccuucaccuggacccucagcgacuccgagggcaacgagacgcccgggggcuacugccugacccgguggaugcugaucgaggccgagcucaagugcuucgggaacaccgccgucgccaagugcaacgagaagcacgacgaggaguucugcgacaugcugcgccuguucgacuucaacaagcaggcgauccggcgccucaagaccgaggcccagaugagcauccagcugaucaacaaggccgugaacgcccugaucaacgaccagcucaucaugaagaaccaccuccgggacaucaugggcauccccuacugcaacuacuccaaguacugcuaccugaaccacacggugaccgggaagaccagccugccccgcugcugccuggucuccaacggcagcuaccugaacgagacccacuucuccgacgacaucgagcagcaggccgacaacaugaucacggagaugcuccagaaggaguacauggaccggcagggcaagaccccgcuggggcugguggaccucuucguguucagcaccuccuucuaccugaucagcaucuuccugcaccuggucaagaucccgacccaccgccacgugaucggcaagcccugccccaagccccaccggcucaaccacauggggaucugcuccugcggccuguacaagcacccgggggugcccgucaaguggaagcgcugaggacuagucccuguucccagagcccacuuuuuuuucuuuuuuugaaauaaaauagccugucuuucagaucucaaaggcucuuuucagagccaccaaaaaaaaaaaaaaaaaaaaaaaaaaaaaaaaaaaaaaaaaaaaaaaaaaaaaaaaaaaaaaaaaaaaaaaaaaaaaaaaaaaaaaaaaaaaaaaaaaaaa

SEQ ID NO: 38519 - RNA, 1745 nt, Artificial Sequence
  mRNA product Design a-1 (hSL-A100) comprising derived and/or modified sequence from LASV(LASV237-NIG-2010;Clade II)__AIT17638__GPCmut11 (opt1)
aggagagucccgcagucggcguccagcggcucugcuuguucgugugugugucguugcaggccuuauucaagcuuaccaugggccagaucaucaccuucuuccaggaggugccccacgucaucgaggaggugaugaacaucgugcugaucgcccucagccugcuggccauccucaaggggaucuacaacgucgcgaccugcggccuguucgggcugguguccuuccuccugcugugcggccgcagcugcuccacgaccuacaaggggguguacgagcuccagacccuggagcuggacauggccagccucaacaugaccaugccgcuguccugcacgaagaacaacagccaccacuacaucauggucggcaacgagaccggccuggagcucacccugaccaacacguccaucaucaaccacaaguucugcaaccugagcgacgcccacaagaaggaccucuacgaccacgcccugauguccaucaucagcaccuuccaccuguccauccccaacuucaaccaguacgaggccaugagcugcgacuucaacgggggcaagaucuccgugcaguacaaccucagccacaccuacgcgguggacgccgccaaccacugcgggaccaucgccaacggcguccugcagacguucaugcggauggcguggggcggguccuacaucgcccuggacagcggcaagggguccugggacugcaucaugaccagcuaccaguaccucaucauccagaacaccaccugggaggaccacugccaguucucccgccccagccccaucggcuaccuggggcugcucagccagcggacgcgcgacaucuacaucucccggcgccugcugggcaccuucaccuggacccucagcgacuccgagggcaacgagacgcccgggggcuacugccugacccgguggaugcugaucgaggccgagcucaagugcuucgggaacaccgccguggccaagugcaacgagaagcacgacgaggaguucugcgacaugcugcgccuguucgacuucaacaagcaggcgauccggcgccucaagaccgaggcccagaugagcauccagcugaucaacaaggccgugaacgcccugaucaacgaccagcucaucaugaagaaccaccuccgggacaucaugggcauccccuacugcaacuacuccaaguacugcuaccugaaccacacggucaccgggaagaccagccugccccgcugcugccugguguccaacggcagcuaccugaacgagacccacuucuccgacgacaucgagcagcaggccgacaacaugaucacggagcuccugcagaaggaguacauggaccggcagggcaagaccccgcuggggcucguggaccuguucgucuucagcaccuccuucuaccugaucagcaucuuccugcaccucaucaagaucccgacccaccgccacaucacgggcaagcccugccccaagccccaccggcugaaccacauggggaucugcuccugcggccuguacaagcacccgggggugcccgugaaguggaagcgcugaggacuagucccuguucccagagcccacuuuuuuuucuuuuuuugaaauaaaauagccugucuuucagaucucaaaggcucuuuucagagccaccaaaaaaaaaaaaaaaaaaaaaaaaaaaaaaaaaaaaaaaaaaaaaaaaaaaaaaaaaaaaaaaaaaaaaaaaaaaaaaaaaaaaaaaaaaaaaaaaaaaaa

SEQ ID NO: 38520 - RNA, 1745 nt, Artificial Sequence
  mRNA product Design a-1 (hSL-A100) comprising derived and/or modified sequence from LASV(LASV253-NIG-2011;Clade II)__AIT17670__GPCmut11 (opt1)
aggagagucccgcagucggcguccagcggcucugcuuguucgugugugugucguugcaggccuuauucaagcuuaccaugggccagaucaucaccuucuuccaggaggugccccacgucaucgaggaggugaugaacaucgugcugaucgcccucagccugcuggccauccucaaggggaucuacaacgucgcgaccugcggccuguucgggcugguguccuuccuccugcugugcggccgcagcugcuccacgaccuacaaggggguguacgagcuccagacccuggagcuggacauggccagccucaacaugaccaugccgcuguccugcacgaagaacaacagccaccacuacaucauggucggcaacgagaccggccuggagcucacccugaccaacacguccaucaucaaccacaaguucugcaaccugagcgacgcccacaagaagaaccucuacgaccacgcccugauguccaucaucagcaccuuccaccuguccauccccaacuucaaccaguacgaggccaugagcugcgacuucaacgggggcaagaucuccgugcaguacaaccucagccacaccuacgcgguggacgccgccaaccacugcgggaccaucgccaacggcguccugcagacguucaugcggauggcguggggcggguccuacaucgcccuggacagcggcaagggguccugggacugcaucaugaccagcuaccaguaccucaucauccagaacaccaccugggaggaccacugccaguucucccgccccagccccaucggcuaccuggggcugcucagccagcggacgcgcgacaucuacaucucccggcgccugcugggcaccuucaccuggacccucagcgacuccgagggcaacgagacgcccgggggcuacugccugacccgguggaugcugaucgaggccgagcucaagugcuucgggaacaccgccguggccaagugcaacgagaagcacgacgaggaguucugcgacaugcugcgccuguucgacuucaacaagcaggcgauccggcgccucaaggccgaggcccagaugagcauccagcugaucaacaaggccgugaacgcccugaucaacgaccagcucaucaugaagaaccaccuccgggacaucaugggcaucccguacugcaacuacuccaaguacugcuaccugaaccacaccgucacggggcgcaccagccugccccggugcugccugguguccaacggcagcuaccugaacgagacccacuucuccgacgacaucgagcagcaggcggacaacaugaucaccgagcuccugcagaaggaguacaucgaccgccagggcaagacgccccuggggcucguggaccuguucgucuucagcaccuccuucuaccugaucagcaucuuccugcaccucgugaagaucccgacccaccggcacaucaucggcaagcccugccccaagccccaccgccugaaccacauggggaucugcuccugcggccuguacaagcacccgggggugcccgucaaguggaagcggugaggacuagucccuguucccagagcccacuuuuuuuucuuuuuuugaaauaaaauagccugucuuucagaucucaaaggcucuuuucagagccaccaaaaaaaaaaaaaaaaaaaaaaaaaaaaaaaaaaaaaaaaaaaaaaaaaaaaaaaaaaaaaaaaaaaaaaaaaaaaaaaaaaaaaaaaaaaaaaaaaaaaa

SEQ ID NO: 38521 - RNA, 1745 nt, Artificial Sequence
  mRNA product Design a-1 (hSL-A100) comprising derived and/or modified sequence from LASV(LASV254-NIG-2011;Clade II)__AIT17674__GPCmut11 (opt1)
aggagagucccgcagucggcguccagcggcucugcuuguucgugugugugucguugcaggccuuauucaagcuuaccaugggccagaucaucaccuucuuccaggaggugccccacgucaucgaggaggugaugaacaucgugcugaucgcccucagccugcuggccauccucaaggggaucuacaacgucgcgaccugcggccuguucgggcugguguccuuccuccugcugugcggccgcagcugcuccacgaccuacaaggggguguacgagcuccagacccuggagcuggacaugaccaaccucaacaugacgaugccgcugagcugcaccaagaacaacucccaccacuacaucauggucggcaacgagaccggccuggagcucacccugacgaacaccagcaucaucaaccacaaguucugcaaccuguccgacgcccacaagaagaaccucuacaaccacgcccugaugagcaucaucuccaccuuccaccugagcauccccaacuucaaccaguacgaggccauguccugcgacuucaacgggggcaagaucagcgugcaguacaaccucucccacagcuacgccguggacgcggccaaccacugcgggaccaucgccaacggcguccugcagacguucaugcggauggccuggggcggguccuacaucgcgcuggacagcggcaaggggaacugggacugcaucaugaccuccuaccaguaccucaucauccagaacaccaccugggaggaccacugccaguucagccgccccucccccaucggcuaccuggggcugcucagccagcggacgcgcgacaucuacaucagccggcgccugcugggcaccuucaccuggacccucuccgacagcgagggcaacgagacgcccgggggcuacugccugacccgguggaugcugaucgaggccgagcucaagugcuucgggaacaccgccguggccaagugcaacgagaagcacgacgaggaguucugcgacaugcugcgccuguucgacuucaacaagcaggccauccggcgccucaagaccgaggcgcaggccaacauccagcugaucaacaaggccgugaacgcccugaucaacgaccagcucaucaugaagaaccaccuccgggacaucaugggcauccccuacugcaacuacuccaaguacugcuaccugaaccacacggucaccgggaagaccagccugccccgcugcugccugguguccaacggcagcuaccugaacgagacccacuucuccgacgacaucgagcagcaggccgacaacaugaucacggagcuccugcagaaggaguacauggaccggcagggcaagaccccgcuggggcucguggaccuguucgucuucagcaccuccuucuaccugaucagcaucuuccugcaccucgugaagaucccgacccaccgccacgugaucggcaagcccugccccaagccccaccggcugaaccacauggggaucugcuccugcggccuguacaagcacccggggguccccgugaaguggaagcgcugaggacuagucccuguucccagagcccacuuuuuuuucuuuuuuugaaauaaaauagccugucuuucagaucucaaaggcucuuuucagagccaccaaaaaaaaaaaaaaaaaaaaaaaaaaaaaaaaaaaaaaaaaaaaaaaaaaaaaaaaaaaaaaaaaaaaaaaaaaaaaaaaaaaaaaaaaaaaaaaaaaaaa

SEQ ID NO: 38522 - RNA, 1745 nt, Artificial Sequence
  mRNA product Design a-1 (hSL-A100) comprising derived and/or modified sequence from LASV(Nig08-A19;Clade III)__ADU56618__GPCmut11 (opt1)
aggagagucccgcagucggcguccagcggcucugcuuguucgugugugugucguugcaggccuuauucaagcuuaccaugggccagaucgugaccuucuuccaggaggucccccacgugaucgaggaggugaugaacaucguccugaucgcccucagcauccuggccauccugaaggggcucuacaacaucgcgaccugcggccugaucgggcuggugacguuccuccugcuguccggccgcagcugcuccaugaccuacaaggggguguacgagcuccagacccuggagcugaacaugaacacccucaacaugacgaugccgcugagcugcaccaagaacaacucccaccacuacaucauggucggcaacgagaccggccuggagcucacccugacgaacaccagccugcuccaccacaaguucugcaaccuguccgacgcccacaagaagaaccuguacgaccacacccucaugagcaucaucuccaccuuccaccugagcauccccaacuucaaccaguacgaggccauguccugcgacuucaacgggggcaagaucacggugcaguacaaccugagccacuccuacgccaucgacgccgcgaaccacugcgggaccguggccaacggcguccuccagaccuucaugcggauggccuggggcgggagcuacaucgcccuggacuccggccgcgggaagugggacugcaucaugaccagcuaccaguaccugaucauccagaacacgaccugggaggaccacugccaguucucccggcccagccccaucggcuaccucgggcugcugucccagcgcacccgggacaucuacaucagccgccggcuccugggcaccuucacguggacccugagcgacuccgagggcaacgagacccccgggggcuacugccucacccgcuggaugcugaucgaggcggagcugaagugcuucgggaacacggccguggccaagugcaacgagaagcacgacgaggaguucugcgacaugcuccggcuguucgacuucaacaagcaggccauccgccggcugaaggccgaggcgcagaugagcauccagcucaucaacaaggccgugaacgcccugaucaacgaccagcugaucaugaagaaccaccuccgcgacaucaugggcauccccuacugcaacuacuccaaguacugcuaccugaaccacaccagcaccgggcggaccucccugccccgcugcugccucgucagcaacggcuccuaccugaacgagacgcacuucagcgacgacaucgagcagcaggccgacaacaugaucaccgagaugcugcagaaggaguaccucgaccggcagggcaagaccccgcuggggcugguggaccuguucguguucuccaccagcuucuaccucaucuccaucuuccugcaccuggucaagaucccgacgcaccgccacaucgugggcaagcccugccccaagccccaccggcucaaccacauggggaucugcagcugcggccuguacaagcagccgggggugcccguccgcuggaagcggugaggacuagucccuguucccagagcccacuuuuuuuucuuuuuuugaaauaaaauagccugucuuucagaucucaaaggcucuuuucagagccaccaaaaaaaaaaaaaaaaaaaaaaaaaaaaaaaaaaaaaaaaaaaaaaaaaaaaaaaaaaaaaaaaaaaaaaaaaaaaaaaaaaaaaaaaaaaaaaaaaaaaa

SEQ ID NO: 38523 - RNA, 1748 nt, Artificial Sequence
  mRNA product Design a-1 (hSL-A100) comprising derived and/or modified sequence from LASV(G1180-SLE-2010;Clade IV)__AIT17168__GPCmut11 (opt1)
aggagagucccgcagucggcguccagcggcucugcuuguucgugugugugucguugcaggccuuauucaagcuuaccaugggccagaucgugaccuucuuccaggaggucccccacgugaucgaggaggugaugaacaucguccugaucgcccucagcauccuggccgugcugaaggggcucuacaacuucgcgaccugcggccugguggggcugcucaccuuccugcugcucugcggccgcuccugcaccgccagccgguacaagggggucuacgagcugcagacccuggagcucaacauggagacccugaacaugacgaugccgcuguccugcaccaagaacaacagccaccacuacaucauggugggcaacgagaccggccucgagcugacccugacgaacaccuccaucaucaaccacaaguucugcaaccucagcgacgcccacaagaagaaccuguacgaccacgcccugauguccaucaucagcaccuuccaccucuccauccccaacuucaaccaguacgaggccaugagcugcgacuucaacgggggcaagaucuccgugcaguacaaccugagccacuccuacgcgggggacgccgccaaccacugcggcaccgucgccaacggggugcugcagacguucaugcgcauggcguggggcggcagcuacaucgcccucgacuccgggcacggcagcugggacugcaucaugaccuccuaccaguaccugaucauccagaacaccaccugggaggaccacugccaguucagccggcccucccccaucggguaccugggccuccugagccagcgcacgcgggacaucuacaucagccgccggcugcucggcaccuucaccuggacccuguccgacagcgaggggaaggacacgccgggcggguacugccugacccgcuggaugcucaucgaggccgagcugaagugcuucggcaacaccgccguggccaagugcaacgagaagcacgacgaggaguucugcgacaugcugcggcuguucgacuucaacaagcaggcgauccagcgccugaaggccgaggcccagauguccauccagcugaucaacaaggccgucaacgcccucaucaacgaccagcugaucaugaagaaccaccuccgggacaucauggggauccccuacugcaacuacagcaaguacugcuaccucaaccacaccacgaccggcaagaccucccugcccaagugcugccuggugagcaacggcuccuaccucaacgagacccacuucagcgacgacaucgagcagcaggcggacaacaugaucacggagaugcugcagaaggaguacauggagcgccaggggaagacgccccugggccucguggaccuguucgucuucuccaccagcuucuaccugaucuccaucuuccugcaccucgugaagaucccgacccaccggcacaucgugggcaagagcugccccaagccccaccgccugaaccacauggggaucugcuccugcgggcuguacaagcagcccggcgucccggugaaguggaagcggugaggacuagucccuguucccagagcccacuuuuuuuucuuuuuuugaaauaaaauagccugucuuucagaucucaaaggcucuuuucagagccaccaaaaaaaaaaaaaaaaaaaaaaaaaaaaaaaaaaaaaaaaaaaaaaaaaaaaaaaaaaaaaaaaaaaaaaaaaaaaaaaaaaaaaaaaaaaaaaaaaaaaa

SEQ ID NO: 38524 - RNA, 1748 nt, Artificial Sequence
  mRNA product Design a-1 (hSL-A100) comprising derived and/or modified sequence from LASV(G1442-SLE-2011;Clade IV)__AIT17180__GPCmut11 (opt1)
aggagagucccgcagucggcguccagcggcucugcuuguucgugugugugucguugcaggccuuauucaagcuuaccaugggccagaucgugaccuucuuccaggaggucccccacgugaucgaggaggugaugaacaucguccugaucgcccucagcauccuggccgugcugaaggggcucuacaacguggcgaccugcggccugaucgggcuggucacguuccuccugcugugcggccgcuccugcaccaccacccucuacaaggggguguacgagcugcagacgcuggagcucaacauggagacccugaacaugaccaugccgcugagcugcaccaagaacaacucccaccacuacauccgggugggcaacgagacgggccucgagcugacccugaccaacaccagcaucaucaaccacaaguucugcaaccucuccgacgcccacaagaagaaccuguacgaccacgcccugaugagcaucaucuccacguuccaccucagcauccccaacuucaaccaguacgaggccauguccugcgacuucaacgggggcaagaucagcguccaguacaaccugucccacagcuacgccggggacgcggccaaccacugcggcaccguggccaacggggugcugcagaccuucaugcgcauggccuggggcggcuccuacaucgcgcucgacagcgggcggggcaacugggacugcaucaugaccuccuaccaguaccugaucauccagaacacgaccugggacgaccacugccaguucagccgccccucccccaucggguaccugggccuccugagccagcggacccgcgacgucuacaucucccggcgccugcucggcaccuucacguggacccugagcgacagcgaggggaaggacaccccgggcggguacugccugacccgguggaugcucaucgaggccgagcugaagugcuucggcaacacggccguggccaagugcaacgagaagcacgacgaggaguucugcgacaugcugcgccucuucgacuucaacaagcaggccauccagcggcugaaggcggaggcccagauguccauccagcugaucaacaaggccgugaacgcccucaucaacgaccagcugaucaugaagaaccaccuccgcgacaucauggggauccccuacugcaacuacagcaaguacugcuaccugaacaacaccgccaccggcaagaccucccugcccaagugcugccugaucagcaacggcuccuaccucaacgagacgcacuucagcgacgacaucgagcaggaggcggacaacaugaucaccgagaugcugcagaaggaguacauggagcggcaggggaagacgccccugggccucgucgaccuguucguguucuccaccagcuucuaccugaucuccaucuuccugcaccucgugaagaucccgacccaccgccacaucgucggcaagagcugccccaagccccaccggcugaaccacauggggaucugcuccugcgggcuguacaagcagcccggcgugccggugcgcuggaagcggugaggacuagucccuguucccagagcccacuuuuuuuucuuuuuuugaaauaaaauagccugucuuucagaucucaaaggcucuuuucagagccaccaaaaaaaaaaaaaaaaaaaaaaaaaaaaaaaaaaaaaaaaaaaaaaaaaaaaaaaaaaaaaaaaaaaaaaaaaaaaaaaaaaaaaaaaaaaaaaaaaaaaa

SEQ ID NO: 38525 - RNA, 1748 nt, Artificial Sequence
  mRNA product Design a-1 (hSL-A100) comprising derived and/or modified sequence from LASV(G3010-SLE-2013;Clade IV)__AIT17344__GPCmut11 (opt1)
aggagagucccgcagucggcguccagcggcucugcuuguucgugugugugucguugcaggccuuauucaagcuuaccaugggccagaucgugaccuucuuccaggaggucccccacgugaucgaggaggugaugaacaucguccugaucgcccucagcauccuggccgugcugaaggggcucuacaacuucgcgaccugcggccugguggggcuggucacguuccuccugcugugcggccgcuccugcaccaccagccucuacaaggggguguacgagcugcagacccuggagcucaacauggagacgcugaacaugaccaugccgcuguccugcaccaagaacaacagccaccacuacaucauggugggcaacgagaccggccucgagcugacgcugaccaacaccuccaucaucaaccacaaguucugcaaccucagcgacgcccacaagaagaaccuguacaaccacgcccugauguccaucaucagcaccuuccaccucuccauccccaacuucaaccaguacgaggccaugagcugcgacuucaacgggggcaagaucuccguccaguacaaccugagccacuccuacgccggggacgcggccagccacugcggcacgguggccaacggggugcugcagaccuucaugcggauggccuggggcggcuccuacaucgcgcucgacagcggguacggcaagugggacugcaucaugaccuccuaccaguaccugaucauccagaacaccacgugggaggaccacugccaguucagccgccccucccccaucggguaccugggccuccugagccagcggacccgcgacaucuacaucagccggcgccugcucggcaccuucaccuggacgcuguccgacagcgaggggaaggacaccccgggcggguacugccugacccgguggaugcucaucgaggccgagcugaagugcuucggcaacaccgccgucgccaagugcaacgagaagcacgacgaggaguucugcgacaugcugcgccucuucgacuucaacaagcaggccauccagcggcugaagacggaggcgcagauguccauccagcugaucaacaaggccgugaacgcccucaucaacgaccagcugaucaugaagaaccaccuccgcgacaucauggggauccccuacugcaacuacagcaaguacugcuaccugaaccacaccaccaccggcaagacgucccugcccaagugcugccuggugagcaacggcuccuaccucaacgagacccacuucagcgacgacaucgagcagcaggccgacaacaugaucaccgagaugcugcagaaggaguacauggagcggcaggggaagacgccccugggccucgucgaccuguucguguucuccaccagcuucuaccugaucuccaucuuccugcaccucgugaagaucccgacccaccgccacaucgucggcaagagcugccccaagccccaccggcugaaccacauggggaucugcuccugcgggcuguacaagcagcccggcgugccggugcgcuggaagcggugaggacuagucccuguucccagagcccacuuuuuuuucuuuuuuugaaauaaaauagccugucuuucagaucucaaaggcucuuuucagagccaccaaaaaaaaaaaaaaaaaaaaaaaaaaaaaaaaaaaaaaaaaaaaaaaaaaaaaaaaaaaaaaaaaaaaaaaaaaaaaaaaaaaaaaaaaaaaaaaaaaaaa

SEQ ID NO: 38526 - RNA, 1748 nt, Artificial Sequence
  mRNA product Design a-1 (hSL-A100) comprising derived and/or modified sequence from LASV(G502-SLE-2009;Clade IV)__AIT17126__GPCmut11 (opt1)
aggagagucccgcagucggcguccagcggcucugcuuguucgugugugugucguugcaggccuuauucaagcuuaccaugggccagaucgugaccuucuuccaggaggucccccacgugaucgaggaggugaugaacaucguccugaucgcccucagcauccuggccgugcugaaggggcucuacaacuucgcgaccugcggccugguggggcugcucacguuccugcugcucugcggccgcuccugcaccaccgggcuguacaagggcgucuacgagcugcagacccucgagcugaacauggagacgcugaacaugaccaugccgcucagcugcaccaagaacaacucccaccacuacaucauggugggcaacgagaccgggcuggagcugacgcucaccaacaccagcaucaucaaccacaaguucugcaaccuguccgacgcccacaagaagaaccuguacgaccacgcccucaugagcaucaucuccaccuuccaccugagcauccccaacuucaaccaguacgaggccauguccugcgacuucaacggcgggaagaucagcgugcaguacaaccugucccacagcuacgccggcgacgcggccgaccacugcgggacggucgccaacggcgugcuccagaccuucaugcggauggccuggggcggguccuacaucgcgcuggacagcggccgcgggcggugggacugcaucaugaccuccuaccaguaccugaucauccagaacaccacgugggaggaccacugccaguucagccgccccucccccaucggcuaccucggccugcugagccagcggacccgcgacaucuacaucucccggcgccuccuggggaccuucaccuggacgcugagcgacagcgagggcaaggacacccccgggggcuacugccucacccgguggaugcugaucgaggccgagcugaagugcuucgggaacaccgccguggccaagugcaacgagaagcacgacgaggaguucugcgacaugcuccgccuguucgacuucaacaagcaggccauccagcggcugaaggcggaggcccagauguccauccagcucaucaacaaggccgucaacgcccugaucaacgaccagcuggugaugaagaaccaccuccgcgacaucaugggcauccccuacugcaacuacagccgguacugcuaccugaaccacacgaccaccggccgcaccucccugcccaagugcugccucgugagcaacggguccuaccugaacgagacgcacuucagcgacgacaucgagcagcaggccgacaacaugaucaccgagaugcugcagaaggaguacauggagcggcagggcaagaccccgcucgggcuggucgaccuguucguguucuccaccagcuucuaccugaucuccaucuuccuccaccuggugaagaucccgacgcaccgccacaucgucggcaagagcugccccaagccccaccggcugaaccacauggggaucugcuccugcggccucuacaagcagcccggcgugccggugaaguggaagcgcugaggacuagucccuguucccagagcccacuuuuuuuucuuuuuuugaaauaaaauagccugucuuucagaucucaaaggcucuuuucagagccaccaaaaaaaaaaaaaaaaaaaaaaaaaaaaaaaaaaaaaaaaaaaaaaaaaaaaaaaaaaaaaaaaaaaaaaaaaaaaaaaaaaaaaaaaaaaaaaaaaaaaa

SEQ ID NO: 38527 - RNA, 1748 nt, Artificial Sequence
  mRNA product Design a-1 (hSL-A100) comprising derived and/or modified sequence from LASV(G733-SLE-2010;Clade IV)__AIT17154__GPCmut11 (opt1)
aggagagucccgcagucggcguccagcggcucugcuuguucgugugugugucguugcaggccuuauucaagcuuaccaugggccagaucgugaccuucuuccaggaggucccccacgugaucgaggaggugaugaacaucguccugaucgcccucagcauccuggccgugcugaaggggcucuacaacuucgcgaccugcggcaucguggggcuggucuccuuccugcuccugugcggccgcagcugcacgaccucccuguacaaggggguguacgagcuccagacccuggagcugaacauggagacccucaacaugacgaugccgcugagcugcaccaagaacaacucccaccacuacaucauggugggcaacgagaccggccuggagcucacccugacgaacaccagcaucaucaaccacaaguucugcaaccuguccgacgcccacaagaagaaccucuacgaccacgcccugaugagcaucaucuccaccuuccaccugagcauccccaacuucaaccaguacgaggccauguccugcgacuucaacgggggcaagaucagcguccaguacaaccucucccacagcuacgccggggacgcggccaaccacugcggcaccaucgccaacggggugcugcagacguucaugcggauggccuggggcggcuccuacaucgcgcuggacagcgggcgcgaccggugggacugcaucaugaccuccuaccaguaccucaucauccagaacaccaccugggaggaccacugccaguucagccgccccucccccaucggcuaccuggggcugcucagccagcggacgcgcgacaucuacaucagccggcgccugcugggcaccuucaccuggacccucuccgacagcgagggcaaggacacgcccgggggcuacugccugacccgguggaugcugaucgaggccgagcucaagugcuucgggaacaccgccguggccaagugcaacgagaagcacgacgaggaguucugcgacaugcugcgccuguucgacuucaacaagcaggccauccagcggcucaaggcggaggcccagauguccauccagcugaucaacaaggccgucaacgcccugaucaacgaccagcucaucaugaagaaccaccuccgcgacaucaugggcauccccuacugcaacuacagcaaguacugcuaccugaaccacaccacgaccgggaagaccucccugcccaagugcugccuggugagcaacggcuccuaccugaacgagacccacuucagcgacgacaucgagcagcaggccgacaacaugaucacggagaugcuccagaaggaguacauggagcggcagggcaagaccccgcuggggcugguggaccucuucgucuucuccaccagcuucuaccugaucuccaucuuccugcaccuggugaagaucccgacccaccgccacguggucggcaagagcugccccaagccccaccggcucaaccacauggggaucugcuccugcggccuguacgggcagcccggcgugccggugaaguggaagcgcugaggacuagucccuguucccagagcccacuuuuuuuucuuuuuuugaaauaaaauagccugucuuucagaucucaaaggcucuuuucagagccaccaaaaaaaaaaaaaaaaaaaaaaaaaaaaaaaaaaaaaaaaaaaaaaaaaaaaaaaaaaaaaaaaaaaaaaaaaaaaaaaaaaaaaaaaaaaaaaaaaaaaa

SEQ ID NO: 38528 - RNA, 1748 nt, Artificial Sequence
  mRNA product Design a-1 (hSL-A100) comprising derived and/or modified sequence from MOPV/LASV reassortant(IGS-1;Clade IV)__AFY05576__GPCmut11 (opt1)
aggagagucccgcagucggcguccagcggcucugcuuguucgugugugugucguugcaggccuuauucaagcuuaccaugggccagaucgugaccuucuuccaggaggucccccacgugaucgaggaggugaugaacaucguccugaucgcccucagcgugcuggccgugcugaaggggcucuacaacuucgcgaccugcggccuggucgggcuggugacguuccuccugcugugcggccgcuccugcaccaccagccucuacaaggggguguacgagcugcagacccuggagcucaacauggagacgcugaacaugaccaugccgcuguccugcaccaagaacaacagccaccacuacaucauggucggcaacgagaccggccucgagcugacgcugaccaacaccuccaucaucaaccacaaguucugcaaccucagcgacgcccacaagaagaaccuguacgaccacgcccugauguccaucaucagcaccuuccaccucuccauccccaacuucaaccaguacgaggccaugagcugcgacuucaacgggggcaagaucuccgugcaguacaaccugagccacuccuacgccggggacgcggccaaccacugcggcacgguggccaacgggguccugcagaccuucaugcggauggccuggggcggcagcuacaucgcgcucgacuccgggcgcggcaacugggacugcaucaugaccagcuaccaguaccugaucauccagaacaccacgugggaggaccacugccaguucucccggcccagccccaucggguaccugggccuccugucccagcgcacccgggacaucuacaucagccgccggcugcucggcaccuucaccuggacgcugagcgacuccgagggggaggacaccccgggcggguacugccugacccgcuggaugcucaucgaggccgagcugaagugcuucggcaacaccgccguggccaagugcaacgagaagcacgacgaggaguucugcgacaugcugcggcuguucgacuucaacaagcaggccauccagcgccugaaggcggaggcccagaugagcauccagcugaucaacaaggccgugaacgcccucaucaacgaccagcugaucaugaagaaccaccuccgggacaucauggggauccccuacugcaacuacuccaaguacugcuaccucaaccacacgaccaccggccgcaccagccugcccaagugcugccuggucuccaacggcagcuaccucaacgagacgcacuucuccgacgacaucgagcagcaggccgacaacaugaucaccgagaugcugcagaaggaguacauggagcggcaggggaagacgccccugggccucguggaccuguucguguucagcaccuccuucuaccugaucagcaucuuccugcaccucgucaagaucccgacccaccgccacaucguggggaaguccugccccaagccccaccggcugaaccacaugggcaucugcagcugcgggcuguacaagcagcccggcgugccggucaaguggaagcgcugaggacuagucccuguucccagagcccacuuuuuuuucuuuuuuugaaauaaaauagccugucuuucagaucucaaaggcucuuuucagagccaccaaaaaaaaaaaaaaaaaaaaaaaaaaaaaaaaaaaaaaaaaaaaaaaaaaaaaaaaaaaaaaaaaaaaaaaaaaaaaaaaaaaaaaaaaaaaaaaaaaaaa

SEQ ID NO: 38529 - RNA, 1748 nt, Artificial Sequence
  mRNA product Design a-1 (hSL-A100) comprising derived and/or modified sequence from LASV(LM765-SLE-2012;Clade IV)__AIT17814__GPCmut11 (opt1)
aggagagucccgcagucggcguccagcggcucugcuuguucgugugugugucguugcaggccuuauucaagcuuaccaugggccagaucgugaccuucuuccaggaggucccccacgugaucgaggaggugaugaacaucguccugaucgcccucagcauccuggccgugcugaaggggcucuacaacuucgcgaccugcggccugguggggcuggucacguuccuccugcugugcggccgcuccugcaccaccagccucuacaaggggguguacgagcugcagacccuggagcucaacauggagacgcugaacaugaccaugccgcuguccugcaccaagaacaacagccaccacuacaucauggugggcaacgagaccggccucgagcugacgcugaccaacaccuccaucaucgaccacaaguucugcaaccucagcgacgcccaccggaagaaccuguacgaccacgcccugauguccaucaucagcaccuuccaccucuccauccccaacuucaaccaguacgaggccaugagcugcgacuucaacgggggcaagaucuccguccaguacaaccugagccacuccuacgccaaggacgcggccgaccacugcgggacgguggccaacggcgugcugcagaccuucaugcgcauggccuggggcgggagcuacaucgcgcucgacuccggccgggggcgcugggacugcaucaugaccagcuaccaguaccugaucauccagaacaccacgugggaggaccacugccaguucucccggcccagccccaucggcuaccuggggcuccugucccagcgcacccgggacaucuacaucagccgccggcugcucggcaccuucaccuggacgcugagcgacuccgagggcaaggacacccccgggggcuacugccugacccgcuggaugcucaucgaggccgagcugaagugcuucgggaacaccgccgucgccaagugcaacgagaagcacgacgaggaguucugcgacaugcugcggcuguucgacuucaacaagcaggccauccagcgccugaaggcggaggcccagaugagcauccagcugaucaacaaggccgugaacgcccucaucaacgaccagcugaucaugaagaaccaccuccgggacaucaugggcauccccuacugcaacuacuccaaguacugcuaccucaaccacacgaccaccgggaagaccagccugcccaagugcugccugguguccaacggcagcuaccucaacgagacgcacuucuccgacgacaucgagcagcaggccgacaacaugaucaccgagaugcugcagaaggaguacauggagcgccagggcaagaccccgcuggggcucgucgaccuguucguguucagcaccuccuucuaccugaucagcaucuuccugcaccucgugaagaucccgacgcaccggcacaucgucggcaagcccugccccaagccccaccgccugaaccacauggggaucugcuccugcggccuguacaagcagccgggggugcccgugaaguggaagcggugaggacuagucccuguucccagagcccacuuuuuuuucuuuuuuugaaauaaaauagccugucuuucagaucucaaaggcucuuuucagagccaccaaaaaaaaaaaaaaaaaaaaaaaaaaaaaaaaaaaaaaaaaaaaaaaaaaaaaaaaaaaaaaaaaaaaaaaaaaaaaaaaaaaaaaaaaaaaaaaaaaaaa

SEQ ID NO: 38530 - RNA, 1748 nt, Artificial Sequence
  mRNA product Design a-1 (hSL-A100) comprising derived and/or modified sequence from LASV(LM776-SLE-2012;Clade IV)__AIT17824__GPCmut11 (opt1)
aggagagucccgcagucggcguccagcggcucugcuuguucgugugugugucguugcaggccuuauucaagcuuaccaugggccagaucgugaccuucuuccaggaggucccccacgugaucgaggaggugaugaacaucguccugaucgcccucagcauccuggccgugcugaaggggcucuacaacuucgcgaccugcggccugguggggcuggucacguuccuccugcugugcggccgcuccugcaccaccagcguguacaaggggguguacgagcuccagacccuggagcugaacauggagacgcucaacaugaccaugccgcuguccugcaccaagaacaacagccaccacuacaucauggucggcaacgagaccggccuggagcucacgcugaccaacaccuccaucaucaaccacaaguucugcaaccugagcgacgcccacaagaagaaccucuacgaccacgcccugauguccaucaucagcaccuuccaccuguccauccccaacuucaaccaguacgaggccaugagcugcgacuucaacgggggcaagaucuccgugcaguacaaccucagccacuccuacgccggggacgcggccaaccacugcggcacgguggccaacgggguccugcagaccuucaugcggauggccuggggcggcagcuacaucgcgcuggacuccgggcacggcaagugggacugcaucaugaccagcuaccaguaccucaucauccagaacaccacgugggaggaccacugccaguucucccgccccagccccaucggguaccugggccugcucucccagcggacccgcgacaucuacaucagccggcgccugcugggcaccuucaccuggacgcucagcgacuccgaggggaaggacaccccgggcggguacugccugacccgguggaugcugaucgaggccgagcucaagugcuucggcaacaccgccguggccaagugcaacgagaagcacgacgaggaguucugcgacaugcugcgccuguucgacuucaacaagcaggccauccagcggcucaaggcggaggcccagaugagcauccagcugaucaacaaggccgugaacgcccugaucaacgaccagcucaucaugaagaaccaccuccgcgacaucauggggauccccuacugcaacuacuccaaguacugcuaccugaaccacacgaccaccggcaagaccagccugcccaagugcugccuggucuccaacggcagcuaccugaacgagacgcacuucuccgacgacaucgagcagcaggccgacaacaugaucaccgagaugcuccagaaggaguacauggagcggcaggggaagacgccccugggccugguggaccucuucguguucagcaccuccuucuaccugaucagcaucuuccugcaccuggucaagaucccgacccaccgccacaucguggggaaguccugccccaagccccaccggcucaaccacaugggcaucugcagcugcgggcuguacaagcagcccggcgugccgguccgcuggaagcggugaggacuagucccuguucccagagcccacuuuuuuuucuuuuuuugaaauaaaauagccugucuuucagaucucaaaggcucuuuucagagccaccaaaaaaaaaaaaaaaaaaaaaaaaaaaaaaaaaaaaaaaaaaaaaaaaaaaaaaaaaaaaaaaaaaaaaaaaaaaaaaaaaaaaaaaaaaaaaaaaaaaaa

SEQ ID NO: 38531 - RNA, 1748 nt, Artificial Sequence
  mRNA product Design a-1 (hSL-A100) comprising derived and/or modified sequence from LASV(Mad39;Clade IV)__ANH09722__GPCmut11 (opt1)
aggagagucccgcagucggcguccagcggcucugcuuguucgugugugugucguugcaggccuuauucaagcuuaccaugggccagaucgugaccuucuuccaggaggucccccacgugaucgaggaggugaugaacaucguccugaucgcccucagcauccuggccgugcugaaggggcucuacaacguggcgaccugcggccugaucgggcuggucacguuccuccugcugugcggccgcuccugcaccaccacccucuacaaggggguguacgagcugcaggcccuggagcucaacauggagacgcugaacaugaccaugccgcugagcugcaccaagaacaacucccaccacuacauccgggugggcaacgagaccggccucgagcugacgcugaccaacaccagccucaucaaccacaaguucugcaaccuguccgacgcccacaagaagaaccuguacgaccacgcccucaugagcaucaucuccaccuuccaccugagcauccccaacuucaaccaguacgaggccauguccugcgacuucaacgacgggaagaucagcguccaguacaaccugucccacacguacgcgggcgacaccgccaaccacugcgggaccguggccaacggcgugcuccagaccuucaugcgcauggccuggggcgggagcuacaucgcgcuggacuccggccgcgggggcugggacugcaucaugacgagcuaccaguaccugaucauccagaacaccaccugggaggaccacugccaguucucccggcccagccccaucggguaccucggccugcugucccagcggacccgcgacaucuacaucagccggcgccuccugggcacguucaccuggacccuguccgacagcgaggggaaggacaccccgggcggguacugccucacgcgguggaugcugaucgaggccgagcugaagugcuucggcaacaccgccgucgccaagugcaacgagaagcacgacgaggaguucugcgacaugcuccgccuguucgacuucaacaagcaggccauccagcggcugaaggcggaggcccagaugagcauccagcucaucaacaaggccgugaacgcccugaucaacgaccagcugaucaugaagaaccaccuccgcgacaucauggggauccccuacugcaacuacuccaaguacugcuaccugaaccacaccgugaccggcaagacgagccugcccaagugcugccucgucuccaacggcagcuaccugaacgagacccacuucuccgacgacaucgagcagcaggccgacaacaugaucaccgagaugcugcagaaggaguacauggagcggcaggggaagacgccccucggccugguggaccuguucguguucagcaccuccuucuaccugaucagcaucuuccuccaccuggucaagaucccgacccaccgccacgugguggggaagcccugccccaagccccaccggcugaaccacaugggcaucugcuccugcggguucuacaagcagccgggcguccccgugcgcuggaagcggugaggacuagucccuguucccagagcccacuuuuuuuucuuuuuuugaaauaaaauagccugucuuucagaucucaaaggcucuuuucagagccaccaaaaaaaaaaaaaaaaaaaaaaaaaaaaaaaaaaaaaaaaaaaaaaaaaaaaaaaaaaaaaaaaaaaaaaaaaaaaaaaaaaaaaaaaaaaaaaaaaaaaa

SEQ ID NO: 38532 - RNA, 1748 nt, Artificial Sequence
  mRNA product Design a-1 (hSL-A100) comprising derived and/or modified sequence from LASV(Z0947-SLE-2011;Clade IV)__AIT17840__GPCmut11 (opt1)
aggagagucccgcagucggcguccagcggcucugcuuguucgugugugugucguugcaggccuuauucaagcuuaccaugggccagaucgugaccuucuuccaggaggucccccacgugaucgaggaggugaugaacaucguccugaucgcccucagcauccuggccgugcugaaggggcucuacaacuucgcgaccugcggccugguggggcuggucacguuccuccugcugugcggccgcuccugcaccaucagccucuacaaggggguguacgagcugcagacccuggagcucaacauggagacccugaacaugacgaugccgcuguccugcaccaagaacaacagccaccacuacaucauggugggcaacgagaccggccucgagcugacccugacgaacaccuccaucaucaaccacaaguucugcaaccucagcgacgcccacaagaagaaccuguacgaccacgcccugauguccaucaucagcaccuuccaccucuccauccccaacuucaaccaguacgaggccaugagcugcgacuucaacgggggcaagaucuccguccaguacaaccugagccacuccuacgccggggacgcggccaaccacugcggcaccguggccaacggggugcugcagacguucaugcggauggccuggggcggcagcuacaucgcgcucgacuccgggcgcgaccggugggacugcaucaugaccagcuaccaguaccugaucauccagaacaccaccugggaggaccacugccaguucucccgccccagccccaucggcuaccuggggcuccugucccagcggacgcgcgacaucuacaucagccggcgccugcucggcaccuucaccuggacccugagcgacuccgagggcaaggacacgcccgggggcuacugccugacccgguggaugcucaucgaggccgagcugaagugcuucgggaacaccgccgucgccaagugcaacgagaagcacgacgaggaguucugcgacaugcugcgccucuucgacuucaacaagcaggccauccagcggcugaaggcggaggcccagaugagcauccagcugaucaacaaggccgugaacgcccucaucaacgaccagcugaucaugaagaaccaccuccgcgacaucaugggcauccccuacugcaacuacuccaaguacugcuaccugaaccacaccacgaccgggaagaccagccugcccaagugcugccugguguccaacggcagcuaccucaacgagacccacuucuccgacgacaucgagcagcaggccgacaacaugaucacggagaugcugcagaaggaguacauggagcggcagggcaagaccccgcuggggcucgucgaccuguucguguucagcaccuccuucuaccugaucagcaucuuccugcaccucgugaagaucccgacccaccgccacaucgucggcaagcccugccccaagccccaccggcugaaccacauggggaucugcuccugcggccuguacaagcagccgggggugcccgugaaguggaagcgcugaggacuagucccuguucccagagcccacuuuuuuuucuuuuuuugaaauaaaauagccugucuuucagaucucaaaggcucuuuucagagccaccaaaaaaaaaaaaaaaaaaaaaaaaaaaaaaaaaaaaaaaaaaaaaaaaaaaaaaaaaaaaaaaaaaaaaaaaaaaaaaaaaaaaaaaaaaaaaaaaaaaaa

SEQ ID NO: 38533 - RNA, 1748 nt, Artificial Sequence
  mRNA product Design a-1 (hSL-A100) comprising derived and/or modified sequence from LASV(Josiah;Clade IV)__NP_694870__GPCmut11 (opt1)
aggagagucccgcagucggcguccagcggcucugcuuguucgugugugugucguugcaggccuuauucaagcuuaccaugggccagaucgugaccuucuuccaggaggucccccacgugaucgaggaggugaugaacaucguccugaucgcccucagcgugcuggccgugcugaaggggcucuacaacuucgcgaccugcggccuggucgggcuggugacguuccuccugcugugcggccgcuccugcaccaccagccucuacaaggggguguacgagcugcagacccuggagcucaacauggagacgcugaacaugaccaugccgcuguccugcaccaagaacaacagccaccacuacaucauggucggcaacgagaccggccucgagcugacgcugaccaacaccuccaucaucaaccacaaguucugcaaccucagcgacgcccacaagaagaaccuguacgaccacgcccugauguccaucaucagcaccuuccaccucuccauccccaacuucaaccaguacgaggccaugagcugcgacuucaacgggggcaagaucuccgugcaguacaaccugagccacuccuacgccggggacgcggccaaccacugcggcacgguggccaacgggguccugcagaccuucaugcggauggccuggggcggcagcuacaucgcgcucgacuccgggcgcggcaacugggacugcaucaugaccagcuaccaguaccugaucauccagaacaccacgugggaggaccacugccaguucucccggcccagccccaucggguaccugggccuccugucccagcgcacccgggacaucuacaucagccgccggcugcucggcaccuucaccuggacgcugagcgacuccgaggggaaggacaccccgggcggguacugccugacccgcuggaugcucaucgaggccgagcugaagugcuucggcaacaccgccguggccaagugcaacgagaagcacgacgaggaguucugcgacaugcugcggcuguucgacuucaacaagcaggccauccagcgccugaaggcggaggcccagaugagcauccagcugaucaacaaggccgugaacgcccucaucaacgaccagcugaucaugaagaaccaccuccgggacaucauggggauccccuacugcaacuacuccaaguacugcuaccucaaccacacgaccaccggccgcaccagccugcccaagugcugccuggucuccaacggcagcuaccucaacgagacgcacuucuccgacgacaucgagcagcaggccgacaacaugaucaccgagaugcugcagaaggaguacauggagcggcaggggaagacgccccugggccugguggaccucuucguguucagcaccuccuucuaccugaucagcaucuuccugcaccucgucaagaucccgacccaccgccacaucguggggaaguccugccccaagccccaccggcugaaccacaugggcaucugcagcugcgggcuguacaagcagcccggcgugccggucaaguggaagcgcugaggacuagucccuguucccagagcccacuuuuuuuucuuuuuuugaaauaaaauagccugucuuucagaucucaaaggcucuuuucagagccaccaaaaaaaaaaaaaaaaaaaaaaaaaaaaaaaaaaaaaaaaaaaaaaaaaaaaaaaaaaaaaaaaaaaaaaaaaaaaaaaaaaaaaaaaaaaaaaaaaaaaa

SEQ ID NO: 38534 - RNA, 1745 nt, Artificial Sequence
  mRNA product Design a-1 (hSL-A100) comprising derived and/or modified sequence from LASV(LP;Clade I)__AAF86701__GPCmut11 (opt1)
aggagagucccgcagucggcguccagcggcucugcuuguucgugugugugucguugcaggccuuauucaagcuuaccaugggccagaucaucaccuucuuccaggaggugccccacgucaucgaggaggugaugaacaucgugcugaucgcccucagccugcuggccauccucaaggggcuguacaacaucgcgaccugcggcaucaucgggcuggucgccuuccucuuccugugcggcaaguccugcagccugacgcucaagggcggguacgagcugcagacccuggagcucaacauggagacccugaacaugaccaugccgcuguccugcacgaagaacagcucccaccacuacauccgcgugggcaacgagaccgggcucgagcugacccugaccaacacgagcaucaucaaccacaaguucugcaaccucuccgacgcccacaagaagaaccuguacgaccacgcccugaugagcaucaucuccaccuuccaccucagcauccccaacuucaaccaguacgaggccauguccugcgacuucaacggcgggaagaucagcgugcaguacaaccugucccacagcuacgcgggcgacgccgccgagcacugcgggaccgucgccaacggcgugcugcagaccuucaugcggauggcguggggcgggcgcuacaucgcccucgacuccggcaaggggaacugggacugcaucaugacgagcuaccaguaccugaucauccagaacaccaccugggaggaccacugccaguucucccggcccagccccaucggcuaccugggccuccugucccagcgcacccgggacaucuacaucagccgccggcugcucgggacguucaccuggacccugagcgacuccgagggcaacgagacccccgggggcuacugccugacgcgcuggaugcucaucgaggccgagcugaagugcuucgggaacaccgccguggccaagugcaacgagaagcacgacgaggaguucugcgacaugcugcggcuguucgacuucaacaagcaggcgauccgccggcugaaggccgaggcccagaugagcauccagcugaucaacaaggccgucaacgcccucaucaacgaccagcugaucaugaagaaccaccuccgcgacaucaugggcauccccuacugcaacuacuccaaguacugcuaccucaaccacaccagcuccggccggaccagccugcccaagugcugccugaucuccaacgggagcuaccucaacgagacgcaguucuccgacgacaucgagcagcaggcggacaacaugaucaccgagaugcugcagaaggaguacaucgagcgccagggcaagaccccgcuggggcugguggacaucuucaucuucagcaccuccuucuaccucaucagcaucuuccugcaccugaucaagaucccgacgcaccggcacaucgugggcaagcccugccccaagccccaccgccucaaccacaugggggucugcuccugcggccuguacaagcacccgggcgugcccaccaaguggaagcggugaggacuagucccuguucccagagcccacuuuuuuuucuuuuuuugaaauaaaauagccugucuuucagaucucaaaggcucuuuucagagccaccaaaaaaaaaaaaaaaaaaaaaaaaaaaaaaaaaaaaaaaaaaaaaaaaaaaaaaaaaaaaaaaaaaaaaaaaaaaaaaaaaaaaaaaaaaaaaaaaaaaaa

SEQ ID NO: 38535 - RNA, 1745 nt, Artificial Sequence
  mRNA product Design a-1 (hSL-A100) comprising derived and/or modified sequence from LASV(803213;Clade II)__AAF86703__GPCmut11 (opt1)
aggagagucccgcagucggcguccagcggcucugcuuguucgugugugugucguugcaggccuuauucaagcuuaccaugggccagaucaucaccuucuuccaggaggugccccacgucaucgaggaggugaugaacaucgugcugaucgcccucagccugcuggccauccucaaggggaucuacaacgucgcgaccugcggccuguucgggcugaucuccuuccuccugcugugcggccgcagcugcuccgugacguacaaggggguguacgagcuccagacccuggagcugaacauggccaaccucaacaugaccaugccgcugagcugcaccaagaacaacucccaccacuacaucauggucggcaacgagacgggccuggagcucacccugaccaacaccagcaucaucaaccacaaguucugcaaccuguccgacgcccacaagaagaaccucuacgaccacgcccugaugagcaucaucuccacguuccaccugagcauccccaacuucaaccaguacgaggccauguccugcgacuucaacgggggcaagaucagcgugcaguacaaccucucccacagcuucgcgguggacgccgccaaccacugcgggaccaucgccaacggcguccugcagaccuucaugcggauggcguggggcggguccuacaucgcccuggacagcggcaaggggaacugggacugcaucaugaccuccuaccaguaccucaucauccagaacacgaccugggaggaccacugccaguucagccgccccucccccaucggcuaccuggggcugcucagccagcggacccgcgacaucuacaucagccggcgccugcugggcaccuucacguggacccucuccgacagcgagggcaacgaggcccccgggggcuacugccugacccgguggaugcugaucgaggccgagcucaagugcuucgggaacaccgccguggcgaagugcaacgagaagcacgacgaggaguucugcgacaugcugcgccuguucgacuucaacaagcaggccaucaagcggcucaagacggaggcccagauguccauccagcugaucaacaaggccgugaacgcccugaucaacgaccagcucaucaugaagaaccaccuccgcgacaucaugggcauccccuacugcaacuacagccgguacugcuaccugaaccacaccgucaccgggaagaccucccugccccgcugcugccuggugagcaacggcuccuaccugaacgagacgcacuucagcgacgacaucgagcagcaggcggacaacaugaucaccgagaugcuccagaaggaguacauggaccggcagggcaagaccccgcuggggcugguggaccuguucgucuucuccaccagcuucuaccucaucuccaucuuccugcaccuggugaagaucccgacgcaccgccacaucgugggcaagcccugccccaagccccaccggcucaaccacauggggaucugcagcugcggccuguacaagcacccggggguccccgugaaguggaagcgcugaggacuagucccuguucccagagcccacuuuuuuuucuuuuuuugaaauaaaauagccugucuuucagaucucaaaggcucuuuucagagccaccaaaaaaaaaaaaaaaaaaaaaaaaaaaaaaaaaaaaaaaaaaaaaaaaaaaaaaaaaaaaaaaaaaaaaaaaaaaaaaaaaaaaaaaaaaaaaaaaaaaaa

SEQ ID NO: 38536 - RNA, 1745 nt, Artificial Sequence
  mRNA product Design a-1 (hSL-A100) comprising derived and/or modified sequence from LASV(GA391;Clade III)__CAA36645__GPCmut11 (opt1)
aggagagucccgcagucggcguccagcggcucugcuuguucgugugugugucguugcaggccuuauucaagcuuaccaugggccagaucgugaccuucuuccaggaggucccccacgugaucgaggaggugaugaacaucguccugaucgcccucagcauccuggccauccugaaggggcucuacaacguggcgaccugcggccugaucgggcuggugacguuccuccugcuguccggccgcagcugcucccucaucuacaaggggaccuacgagcugcagacccuggagcucaacauggagacccugaacaugacgaugccgcugagcugcaccaagaacaacucccaccacuacauccgggucggcaacgagaccggccucgagcugacccugacgaacaccagcauccucaaccacaaguucugcaaccuguccgacgcccacaagcgcaaccuguacgaccacagccucauguccaucaucagcaccuuccaccuguccauccccaacuucaaccaguacgaggccaugagcugcgacuucaacgggggcaagaucaccgugcaguacaaccugucccacagcuucgccguggacgccgcggggcacugcggcacgcucgccaacgggguccugcagaccuucaugcggauggccuggggcggcuccuacaucgcccuggacagcgggcgcggcaacugggacugcaucaugaccuccuaccaguaccucaucauccagaacaccacgugggacgaccacugccaguucagccggcccucccccaucggguaccugggccugcucagccagcgcacccgggacaucuacaucagccgccggcugcugggcaccuucaccuggacgcucuccgacagcgaggggaacgagaccccgggcggguacugccugacccgcuggaugcugaucgaggcggagcucaagugcuucggcaacaccgccguggccaagugcaacgagaagcacgacgaggaguucugcgacaugcugcggcuguucgacuucaacaagcaggccauccgccggcucaagacggaggcccagauguccauccagcugaucaacaaggcggugaacgcccugaucaacgaccagcucaucaugaagaaccaccuccgcgacaucauggggauccccuacugcaacuacagccgguacugcuaccugaaccacaccuccaccggcaagaccagccugccccgcugcugccugaucuccaacggcagcuaccugaacgagacgaaguucuccgacgacaucgagcagcaggccgacaacaugaucaccgagaugcugcagaaggaguacaucgaccggcaggggaagacgccccucggccuggucgaccuguucguguucagcaccuccuucuaccucaucagcaucuuccugcaccuggugaagaucccgacccaccgccacaucgucgggaagcccugccccaagccccaccggcucaaccacaugggcaucugcuccugcgggcuguacaagcagccgggcgugcccgugcgcuggaagcggugaggacuagucccuguucccagagcccacuuuuuuuucuuuuuuugaaauaaaauagccugucuuucagaucucaaaggcucuuuucagagccaccaaaaaaaaaaaaaaaaaaaaaaaaaaaaaaaaaaaaaaaaaaaaaaaaaaaaaaaaaaaaaaaaaaaaaaaaaaaaaaaaaaaaaaaaaaaaaaaaaaaaa

SEQ ID NO: 38537 - RNA, 1748 nt, Artificial Sequence
  mRNA product Design a-1 (hSL-A100) comprising derived and/or modified sequence from LASV(AV;Clade V)__CCA30314__GPCmut11 (opt1)
aggagagucccgcagucggcguccagcggcucugcuuguucgugugugugucguugcaggccuuauucaagcuuaccaugggccagaucgugaccuucuuccaggaggucccccacgugaucgaggaggugaugaacaucguccugaucgcccucagcauccuggccgugcugaaggggcucuacaacaucgcgaccugcggccugaucgggcugaucacguuccuccugcugugcggccgcuccugcagcuccaaccucuacaaggggguguacgagcugcagagccuggaccucaacauggagacccugaacaugaccaugccgcuguccugcaccaagaacaacagccaccacuacauccgggucggcaacgacacgggccucgagcugacccugaccaacaccuccauccucaaccacaaguucugcaaccugagcgacgcccacaagaaggaccuguacgaccacgcccucauguccaucaucagcacguuccaccuguccauccccaacuucaaccaguacgaggccaugagcugcgacuucaacgggggcaagaucuccgugcaguacaaccugagccacuccuacgccaucgacgcggccaaccacugcgggaccguggccaacggcauccuccagaccuucaugcgcauggccuggggcgggagcuacaucgcgcuggacuccggccgggggaacugggacugcaucaugaccagcuaccaguaccugaucauccagaacacgaccugggagaaccacugccaguucucccgccccagccccaucggcuaccucgggcugcugagccagcggacccgcgacaucuacaucucccggcgccuccugggcaccuucacguggacccugagcgacuccgagggcaacgccacccccgggggcuacugccucacccgguggaugcugaucgaggccgagcugaagugcuucgggaacacggccgucgccaagugcaacgagaagcacgacgaggaguucugcgacaugcuccgccuguucgacuucaacaagcaggcgaucagccggcugaaguccgaggcccagaugagcauccagcucaucaacaaggccgugaacgcccugaucaacgaccagcugaucaugaagaaccaccuccgcgacaucaugggcauccccuacugcaacuacuccaaguacugcuaccugaaccacaccaucaccgggaagaccagccugcccaagugcugccucguguccaacggcagcuaccugaacgagacgcacuucuccgacgacaucgagcagcaggccgacaacaugaucaccgagaugcugcagaaggaguacauggagcggcagggcaagaccccgcuggggcucgucgaccuguucguguucagcaccuccuucuaccugaucagcaucuuccuccgccuggugaagaucccgacgcaccggcacaucgucggcaagcccugccccaagccccaccgccugaaccacauggggaucugcuccugcggccucuacaagcagccgggggugcccgugcgguggaagcgcugaggacuagucccuguucccagagcccacuuuuuuuucuuuuuuugaaauaaaauagccugucuuucagaucucaaaggcucuuuucagagccaccaaaaaaaaaaaaaaaaaaaaaaaaaaaaaaaaaaaaaaaaaaaaaaaaaaaaaaaaaaaaaaaaaaaaaaaaaaaaaaaaaaaaaaaaaaaaaaaaaaaaa

SEQ ID NO: 38538 - RNA, 1745 nt, Artificial Sequence
  mRNA product Design a-1 (hSL-A100) comprising derived and/or modified sequence from LASV(Togo/2016/7082;Clade VI)__AMR44577__GPCmut11 (opt1)
aggagagucccgcagucggcguccagcggcucugcuuguucgugugugugucguugcaggccuuauucaagcuuaccaugggccagaucaucaccuucuuccaggaggugccccacgucaucgaggaggugaugaacaucgugcugaucgcccucagccugcuggccauccucaagggggucuacaacguggcgaccugcggcaucaucgggcuggugacguuccuguuccucugcggccgcuccugcagccugaucuacaagggguccuacgagcugcagacccucgagcugaacauggagacccugaacaugaccaugccgcucagcugcacgaagaacuccagccaccacuacauccgggucggcaacgagaccggccuggagcugacccucaccaacacguccaucaucaaccacaaguucugcaaccugagcgacgcccacaagcgcaaccuguacgaccacgcccucauguccauccugagcaccuuccaccuguccauccccaacuucaaccaguacgaggccaugagcugcgacuucaacgggggcaagaucuccgugcaguacaaccucagccacgccuacgcgguggacgccgccgagcacugcgggaccgucgccaacggcgugcugcagaccuucaugcggauggcguggggcggguccuacaucgcccuggacagcggccgcgggaacugggacugcaucaugacguccuaccaguaccucaucauccagaacaccaccugggaggaccacugccaguucagccggcccucccccaucggcuaccuggggcugcucagccagcgcacccgggacaucuacaucagccgccggcugcugggcacguucaccuggacccucuccgacagcgagggcaacgagacccccgggggcuacugccugacgcgcuggaugcugaucgaggccgagcucaagugcuucgggaacaccgccguggccaagugcaacgagaagcacgacgaggaguucugcgacaugcugcggcuguucgacuucaacaagcaggcgauccagcgccucaaguccgaggcccagaugagcauccagcugaucaacaaggccgucaacgcccugaucaacgaccagcucaucaugaagaaccaccuccgggacaugaugggcauccccuacugcaacuacuccaaguacugcuaccugaaccacaccagcuccgggcgcaccagccugcccaagugcugccugguguccaacggcagcuaccugaacgagacgcacuucuccgacgacaucgagcagcaggccgacaacaugaucaccgagaugcuccagaaggaguacaucgaccggcagggcaagaccccgcuggggcugguggaccuguucgucuucagcaccuccuucuaccucaucagcaucuuccugcaccugaucaagaucccgacgcaccgccacaucgugggcaagcccugccccaagccccaccggcucaaccacauggggaucugcuccugcggccuguacaagcagccgggggugcccacccgcuggaagcggugaggacuagucccuguucccagagcccacuuuuuuuucuuuuuuugaaauaaaauagccugucuuucagaucucaaaggcucuuuucagagccaccaaaaaaaaaaaaaaaaaaaaaaaaaaaaaaaaaaaaaaaaaaaaaaaaaaaaaaaaaaaaaaaaaaaaaaaaaaaaaaaaaaaaaaaaaaaaaaaaaaaaa

SEQ ID NO: 38539 - RNA, 1745 nt, Artificial Sequence
  mRNA product Design a-1 (hSL-A100) comprising derived and/or modified sequence from LASV(KAK-428;Clade n.d. (VII))__ANH09740__GPCmut11 (opt1)
aggagagucccgcagucggcguccagcggcucugcuuguucgugugugugucguugcaggccuuauucaagcuuaccaugggccagaucgugaccuucuuccaggaggucccccacgugaucgaggaggugaugaacaucguccugaucgcccucagccugcuggccauccucaaggggcuguacaacuucgcgaccugcggcgugaucgggcugaucacguuccuccugcugugcggccgcuccugcagcgccaccuacaaggggcaguacgagcuccagacccuggagcugaacauggagucccucaacaugaccaugccgcugagcugcacgaagaacaacucccaccacuacauccgggccggcaacaacaccggccuggagcucacccugaccaacacgagcaucaucucccacaaguucugcaaccugagcgacgcccacaagaagaaccucuacgaccacacccugauguccaucaucaccaccuuccaccugagcauccccaacuucaaccaguacgaggccauguccugcgacuucaacgggggcaagaucagcauccaguacaaccucucccacagcuacgcgggggacgccgcccagcacugcggcacgguggccaacgggguccugcagaccuucaugcgcauggcguggggcggcuccuaccuggcccucgacagcgggcggcgcggcugggacugcaucaucuccagcuaccaguaccugaucauccagaacaccaccugggacgaccacugccaguucucccggcccagccccaucggguaccugggcuucgugagccagaagacgcgcgacaucuacaucucccggcgccuccugggcaccuucaccuggacccugagcgacuccgaggggcacgacaugccgggcggguacugccucacgcgguggaugcugaucgaggccgaccugaagugcuucggcaacaccgccguggccaagugcaacgagaagcacgacgaggaguucugcgacauguggcgccucuucgacuucaacaagcaggcgauccagcggcugaaggccgaggcccagaugaacauccagcugaucaacaaggccgucaacgcccucaucaacgaccagcugaugaugaagaaccaccuccgcgacaucauggggauccccuacugcaacuacagcaaguucugcuaccugaacaacaccaccacgggccggaccucccugccccgcugcugccugaucagcaacggcuccuaccucaacgagacccacuucagcgacgacaucgagcagcaggcggacaacaugaucaccgagaugcugcagaaggaguacauggaccggcaggggaagacgccccugggccucguggaccuguucguguucuccaccagcuucuaccugaucaccaucuuccugcaccucgucaagaucccgacccaccgccacaucguggggaagcccugccccaagccccaccggcugaaccacaugggcaucugcuccugcgggcuguacaagcagccgggcgugcccguccgcuggaagcggugaggacuagucccuguucccagagcccacuuuuuuuucuuuuuuugaaauaaaauagccugucuuucagaucucaaaggcucuuuucagagccaccaaaaaaaaaaaaaaaaaaaaaaaaaaaaaaaaaaaaaaaaaaaaaaaaaaaaaaaaaaaaaaaaaaaaaaaaaaaaaaaaaaaaaaaaaaaaaaaaaaaaa

SEQ ID NO: 38540 - RNA, 1745 nt, Artificial Sequence; identical to SEQ ID NO: 38534
  mRNA product Design a-1 (hSL-A100) comprising derived and/or modified sequence from LASV(Pinneo-NIG-1969;Clade I)__AIT17836__GPCmut11 (opt1)

SEQ ID NO: 38541 - RNA, 1745 nt, Artificial Sequence
  mRNA product Design a-1 (hSL-A100) comprising derived and/or modified sequence from LASV(ISTH0009-NIG-2011;Clade II)__AIT17404__GPCmut11 (opt1)
aggagagucccgcagucggcguccagcggcucugcuuguucgugugugugucguugcaggccuuauucaagcuuaccaugggccagaucaucaccuucuuccaggaggugccccacgucaucgaggaggugaugaacaucgugcugaucgcccucagccugcuggccauccucaaggggaucuacaacgucgcgaccugcggccuguucgggcugguguccuuccuccugcugugcggccgcagcugcuccacgaccuacaaggggguguacgagcuccagacccuggagcuggacauggccagccucaacaugaccaugccgcuguccugcacgaagaacaacagccaccacuacaucauggucggcaacgagaccggccuggagcucacccugaccaacacguccaucaucaaccacaaguucugcaaccugagcgacgcccacaagaagaaccucuacgaccacgcccugauguccaucaucagcaccuuccaccuguccauccccaacuucaaccaguacgaggccaugagcugcgacuucaacgggggcaagaucuccgugcaguacaaccucagccacgcguacgccguggacgccgccaaccacugcgggaccaucgcgaacggcguccugcagaccuucaugcggauggccuggggcggguccuacaucgcccuggacagcggcaagggguccugggacugcaucaugacgagcuaccaguaccucaucauccagaacaccaccugggaggaccacugccaguucucccgccccagccccaucggcuaccuggggcugcucagccagcggacccgcgacaucuacaucucccggcgccugcugggcacguucaccuggacccucagcgacuccgagggcaacgagacccccgggggcuacugccugacgcgguggaugcugaucgaggccgagcucaagugcuucgggaacaccgccguggcgaagugcaacgagaagcacgacgaggaguucugcgacaugcugcgccuguucgacuucaacaagcaggccauccggcgccucaagaccgaggcccagaugagcauccagcugaucaacaaggccgugaacgcccugaucaacgaccagcucaucaugaagaaccaccuccgggacaucaugggcaucccguacugcaacuacuccaaguacugcuaccugaaccacaccgucacggggaagaccagccugccccgcugcugccugguguccaacggcagcuaccugaacgagacccacuucuccgacgacaucgagcagcaggcggacaacaugaucaccgagcuccugcagaaggaguacauggaccggcagggcaagacgccccuggggcugguggaccucuucgucuucagcaccuccuucuaccugaucagcaucuuccugcaccucaucaagaucccgacccaccgccacaucaccggcaagcccugccccaagccccaccggcugaaccacauggggaucugcuccugcggccuguacaagcacccgggggugcccgugaaguggaagcgcugaggacuagucccuguucccagagcccacuuuuuuuucuuuuuuugaaauaaaauagccugucuuucagaucucaaaggcucuuuucagagccaccaaaaaaaaaaaaaaaaaaaaaaaaaaaaaaaaaaaaaaaaaaaaaaaaaaaaaaaaaaaaaaaaaaaaaaaaaaaaaaaaaaaaaaaaaaaaaaaaaaaaa

SEQ ID NO: 38542 - RNA, 1745 nt, Artificial Sequence
  mRNA product Design a-1 (hSL-A100) comprising derived and/or modified sequence from LASV(ISTH2010-NIG-2012;Clade II)__AIT17482__GPCmut11 (opt1)
aggagagucccgcagucggcguccagcggcucugcuuguucgugugugugucguugcaggccuuauucaagcuuaccaugggccagaucaucaccuucuuccaggaggugccccacgucaucgaggaggugaugaacaucgugcugaucgcccucagccugcuggccauccucaaggggaucuacaacgucgcgaccugcggccuguucgggcugguguccuuccuccugcugugcggccgcagcugcuccacgaccuacaaggggguguacgagcuccagacccuggagcuggacauggccagccucaacaugaccaugccgcuguccugcacgaagaacaacagccaccacuacaucauggucggcaacgagaccggccuggagcucacccugaccaacacguccaucaucaaccacaaguucugcaaccugagcgacgcccacaagaagaaccucuacgaccacgcccugauguccaucaucagcaccuuccaccuguccauccccaacuucaaccaguacgaggccaugagcugcgacuucaacgggggcaagaucuccgugcaguacaaccucagccacgcguacgccguggacgccgccaaccacugcgggaccaucgcgaacggcguccugcagaccuucaugcggauggccuggggcggguccuacaucgcccuggacagcggcaagggguccugggacugcaucaugacgagcuaccaguaccucaucauccagaacaucaccugggaggaccacugccaguucucccgccccagccccaucggcuaccuggggcugcucagccagcggacccgcgacaucuacaucucccggcgccugcugggcaccuucacguggacccucagcgacuccgagggcaacgagacccccgggggcuacugccugacccgguggaugcugaucgaggccgagcucaagugcuucgggaacacggccguggcgaagugcaacgagaagcacgacgaggaguucugcgacaugcugcgccuguucgacuucaacaagcaggccauccggcgccucaagaccgaggcccagaugagcauccagcugaucaacaaggccgugaacgcccugaucaacgaccagcucaucaugaagaaccaccuccgggacaucaugggcauccccuacugcaacuacuccaaguacugcuaccugaaccacaccgucaccgggaagacgagccugccccgcugcugccugguguccaacggcagcuaccugaacgagacccacuucuccgacgacaucgagcagcaggcggacaacaugaucaccgagcuccugcagaaggaguacaucgaccggcagggcaagaccccgcuggggcugguggaccucuucgucuucagcacguccuucuaccugaucagcaucuuccugcaccucgugaagaucccgacccaccgccacguggucggcaagcccugccccaagccccaccggcugaaccacauggggaucugcuccugcggccuguacaagcacccgggggugcccgugaaguggaagcgcugaggacuagucccuguucccagagcccacuuuuuuuucuuuuuuugaaauaaaauagccugucuuucagaucucaaaggcucuuuucagagccaccaaaaaaaaaaaaaaaaaaaaaaaaaaaaaaaaaaaaaaaaaaaaaaaaaaaaaaaaaaaaaaaaaaaaaaaaaaaaaaaaaaaaaaaaaaaaaaaaaaaaa

SEQ ID NO: 38543 - RNA, 1745 nt, Artificial Sequence
  mRNA product Design a-1 (hSL-A100) comprising derived and/or modified sequence from LASV(Lassa virus/H.sapiens-wt/NGA/2015/ISTH_0543;Clade II)__AVO03639__GPCmut11 (opt1)
aggagagucccgcagucggcguccagcggcucugcuuguucgugugugugucguugcaggccuuauucaagcuuaccaugggccagaucaucaccuucuuccaggaggugccccacgucaucgaggaggugaugaacaucgugcugaucgcccucagccugcuggccauccucaaggggaucuacaacgucgcgaccugcggccuguucgggcugguguccuuccuccugcugugcggccgcagcugcuccacgaccuacaaggggguguacgagcuccagacccuggagcuggacauggccaaccucaacaugaccaugccgcugagcugcacgaagaacaacucccaccacuacaucauggucggcaacgagaccggccuggagcucacccugaccaacacgagcaucaucaaccacaaguucugcaaccuguccgacgcccacaagaagaaccucuacgaccacgcccugaugagcaucaucuccaccuuccaccugagcauccccaacuucaaccaguacgaggccauguccugcgacuucaacgggggcaagaucagcgugcaguacaaccucucccacaccuacgcgguggacgccgccaaccacugcgggaccaucgccaacggcguccugcagacguucaugcggauggcguggggcgggagcuacaucgcccuggacuccggcaaggggagcugggacugcaucaugaccuccuaccaguaccucgugauccagaacaccaccugggaggaccacugccaguucagccgccccucccccaucggcuaccuggggcugcucagccagcggacgcgcgacaucuacaucagccggcgccugcugggcaccuucaccuggacccucuccgacagcgagggcaacgagacgcccgggggcuacugccugacccgguggaugcugaucgaggccgagcucaagugcuucgggaacaccgccguggccaagugcaacgagaagcacgacgaggaguucugcgacaugcugcgccuguucgacuucaacaagcaggcgauccggcgccucaagaccgaggcccagauguccauccagcugaucaacaaggccgucaacgcccugaucaacgaccagcucaucaugaagaaccaccuccgggacaucaugggcauccccuacugcaacuacagcaaguacugcuaccugaaccacacggugaccgggaagaccucccugccccgcugcugccuggugagcaacggcuccuaccugaacgagacccacuucagcgacgacaucgagcagcaggccgacaacaugaucacggagcuccugcagaaggaguacaucgaccggcagggcaagaccccgcuggggcuggucgaccucuucguguucuccaccagcuucuaccugaucuccaucuuccugcaccucgugaagaucccgacccaccgccacaucacgggcaagcccugccccaagccccaccggcugaaccacauggggaucugcagcugcggccuguacaagcacccggggguccccgugaaguggaagcgcugaggacuagucccuguucccagagcccacuuuuuuuucuuuuuuugaaauaaaauagccugucuuucagaucucaaaggcucuuuucagagccaccaaaaaaaaaaaaaaaaaaaaaaaaaaaaaaaaaaaaaaaaaaaaaaaaaaaaaaaaaaaaaaaaaaaaaaaaaaaaaaaaaaaaaaaaaaaaaaaaaaaaa

SEQ ID NO: 38544 - RNA, 1745 nt, Artificial Sequence
  mRNA product Design a-1 (hSL-A100) comprising derived and/or modified sequence from LASV(Lassa virus/H.sapiens-wt/NGA/2016/ISTH_0009;Clade II)__AVO03571__GPCmut11 (opt1)
aggagagucccgcagucggcguccagcggcucugcuuguucgugugugugucguugcaggccuuauucaagcuuaccaugggccagaucaucaccuucuuccaggaggugccccacgucaucgaggaggugaugaacaucgugcugaucgcccucagccugcuggccauccucaaggggaucuacaacgucgcgaccugcggccugcuggggcucguguccuuccugcugcucugcggccgcagcugcuccacgaccuacaaggggguguacgagcugcagacccuggagcucgacauggccagccugaacaugaccaugccgcuguccugcacgaagaacaacagccaccacuacaucauggucggcaacgagaccggccucgagcugacccugaccaacacguccaucaucaaccacaaguucugcaaccucagcgacgcccacaagaagaaccuguacgaccacgcccugauguccaucaucagcaccuuccaccucuccauccccaacuucaaccaguacgaggccaugagcugcgacuucaacgggggccggaucuccgugcaguacaaccugagccacuccuacgcgguggacgccgccaaccacugcgggaccaucgccaacggcguccugcagaccuucaugcgcauggcguggggcgggagcuacaucgcccucgacuccggcaaggggagcugggacugcaucaugacguccuaccaguaccugaucauccagaacaccaccugggaggaccacugccaguucagccggcccagccccaucggcuaccuggggcuccugucccagcgcacccgggacaucuacaucagccgccggcugcucggcacguucaccuggacccuguccgacagcgagggcaacgagacccccgggggcuacugccugacgcgcuggaugcucaucgaggccgagcugaagugcuucgggaacaccgccguggccaagugcaacgagaagcacgacgaggaguucugcgacaugcugcggcuguucgacuucaacaagcaggcgauccgccggcugaagaccgaggcccagauguccauccagcugaucaacaaggccgugaacgcccucaucaacgaccagcugaucaugaagaaccaccuccgcgacaucaugggcaucccguacugcaacuacagcaaguacugcuaccucaaccacaccgucacggggaagaccucccugccccggugcugccuggugagcaacggcuccuaccucaacgagacccacuucagcgacgacaucgagcagcaggccgacaacaugaucaccgagcugcugcagaaggaguacaucgaccgccagggcaagacgccccuggggcucguggaccuguucgucuucuccaccagcuucuaccugaucuccaucuuccuccaccuggugaagaucccgacccaccggcacaucaccggcaagcccugccccaagccccaccgccugaaccacauggggaucugcagcugcggccucuacaaccacccgggggugcccgucaaguggaagcggugaggacuagucccuguucccagagcccacuuuuuuuucuuuuuuugaaauaaaauagccugucuuucagaucucaaaggcucuuuucagagccaccaaaaaaaaaaaaaaaaaaaaaaaaaaaaaaaaaaaaaaaaaaaaaaaaaaaaaaaaaaaaaaaaaaaaaaaaaaaaaaaaaaaaaaaaaaaaaaaaaaaaa

SEQ ID NO: 38545 - RNA, 1745 nt, Artificial Sequence
  mRNA product Design a-1 (hSL-A100) comprising derived and/or modified sequence from LASV(Lassa virus/H.sapiens-wt/NGA/2016/ISTH_0017;Clade II)__AVO03567__GPCmut11 (opt1)
aggagagucccgcagucggcguccagcggcucugcuuguucgugugugugucguugcaggccuuauucaagcuuaccaugggccagaucaucaccuucuuccaggaggugccccacgucaucgaggaggugaugaacaucgugcugaucgcccucagccugcuggccauccucaaggggaucuacaacgucgcgaccugcggccuguucgggcugguguccuuccuccugcugugcggccgcagcugcuccacgaccuacaaggggguguacgagcuccagacccuggagcuggacauggccagccucaacaugaccaugccgcuguccugcacgaagaacaacagccaccacuacaucauggucggcaacgagaccggccuggagcucacccugaccaacacguccaucaucaaccacaaguucugcaaccugagcgacgcccacaagaagaaccucuacgaccacgcccugauguccaucaucagcaccuuccaccuguccauccccaacuucaaccaguacgaggccaugagcugcgacuucaacgggggcaagaucuccgugcaguacaaccucagccacaccuacgcgaucgacgccgccaaccacugcgggaccaucgccaacggcgugcugcagacguucaugcggauggcguggggcggguccuacaucgcccuggacagcggcaagggguccugggacugcaucaugaccagcuaccaguaccucaucauccagaacaccaccugggaggaccacugccaguucucccgccccagccccaucggcuaccuggggcugcucagccagcggacgcgcgacaucuacaucucccggcgccugcugggcaccuucaccuggacccucagcgacuccgagggcaacgagacgcccgggggcuacugccugacccgguggaugcugaucgaggccgagcucaagugcuucgggaacaccgccgucgccaagugcaacgagaagcacgacgaggaguucugcgacaugcugcgccuguucgacuucaacaagcaggcgauccggcgccucaagaccgaggcccagaugagcauccagcugaucaacaaggccgugaacgcccugaucaacgaccagcucaucaugaagaaccaccuccgggacaucaugggcauccccuacugcaacuacuccaaguacugcuaccugaaccacacggugaccgggaagaccagccugccccgcugcugccuggucuccaacggcagcuaccugaacgagacccacuucuccgacgacaucgagcagcaggccgacaacaugaucacggagcuccugcagaaggaguacauggaccggcagggcaagaccccgcuggggcugguggaccucuucguguucagcaccuccuucuaccugaucagcaucuuccugcaccucguccgcaucccgacccaccggcacgugaucggcaagcccugccccaagccccaccgccugaaccacauggggaucugcuccugcggccuguacaagcacccgggggugcccgucaaguggaagcggugaggacuagucccuguucccagagcccacuuuuuuuucuuuuuuugaaauaaaauagccugucuuucagaucucaaaggcucuuuucagagccaccaaaaaaaaaaaaaaaaaaaaaaaaaaaaaaaaaaaaaaaaaaaaaaaaaaaaaaaaaaaaaaaaaaaaaaaaaaaaaaaaaaaaaaaaaaaaaaaaaaaaa

SEQ ID NO: 38546 - RNA, 1745 nt, Artificial Sequence
  mRNA product Design a-1 (hSL-A100) comprising derived and/or modified sequence from LASV(Lassa virus/H.sapiens-wt/NGA/2018/ISTH_0959;Clade II)__AVV65099__GPCmut11 (opt1)
aggagagucccgcagucggcguccagcggcucugcuuguucgugugugugucguugcaggccuuauucaagcuuaccaugggccagaucaucaccuucuuccaggaggugccccacgucaucgaggaggugaugaacaucgugcugaucgcccucagccugcuggccauccucaaggggaucuacaacgucgugaccugcggccuguucgggcugguguccuuccuccugcugugcggccgcagcugcuccacgaccuacaagggggucuacgagcuccagacccuggagcuggacauggcgagccucaacaugaccaugccgcuguccugcacgaagaacaacagccaccacuacaucauggugggcaacgagaccggccuggagcucacccugaccaacacguccaucaucaaccacaaguucugcaaccugagcgacgcccacaagaagaaccucuacgaccacgcccugauguccaucaucagcaccuuccaccuguccauccccaacuucaaccaguacgaggccaugagcugcgacuucaacgggggcaagaucuccgugcaguacaaccucagccacgccuacgcgaucgacgccgccaaccacugcgggaccaucgccaacggcguccugcagaccuucaugcggauggcguggggcggguccuacaucgcccuggacagcggcaagggguccugggacugcaucaugacgagcuaccaguaccucaucauccagaacaccaccugggaggaccacugccaguucucccgccccagccccaucggcuaccuggggcugcucagccagcggacccgcgacaucuacaucucccggcgccugcugggcacguucaccuggacccucagcgacuccgagggcaacgagacccccgggggcuacugccugacgcgguggaugcugaucgaggccgagcucaagugcuucgggaacaccgccguggccaagugcaacgagaagcacgacgaggaguucugcgacaugcugcgccuguucgacuucaacaagcaggcgauccggcgccucaagaccgaggcccagaugagcauccagcugaucaacaaggccgugaacgcccugaucaacgaccagcucaucaugaagaaccaccuccgggacaucaugggcaucccguacugcaacuacuccaaguacugcuaccugaaccacaccgucacggggaagaccagccugccccgcugcugccugguguccaacggcagcuaccugaacgagacccacuucuccgacgacaucgagcagcaggccgacaacaugaucaccgagcuccugcagaaggaguacaucgaccggcagggcaagacgccccuggggcugguggaccucuucgucuucagcaccuccuucuaccugaucagcaucuuccugcaccucgugaagaucccgacccaccgccacgugaucggcaagcccugccccaagccccaccggcugaaccacauggggaucugcuccugcggccuguacaagcacccggggguccccgugaaguggaagcgcugaggacuagucccuguucccagagcccacuuuuuuuucuuuuuuugaaauaaaauagccugucuuucagaucucaaaggcucuuuucagagccaccaaaaaaaaaaaaaaaaaaaaaaaaaaaaaaaaaaaaaaaaaaaaaaaaaaaaaaaaaaaaaaaaaaaaaaaaaaaaaaaaaaaaaaaaaaaaaaaaaaaaa

SEQ ID NO: 38547 - RNA, 1745 nt, Artificial Sequence
  mRNA product Design a-1 (hSL-A100) comprising derived and/or modified sequence from LASV(LASV003-NIG-2008;Clade II)__AIT17580__GPCmut11 (opt1)
aggagagucccgcagucggcguccagcggcucugcuuguucgugugugugucguugcaggccuuauucaagcuuaccaugggccagaucaucaccuucuuccaggaggugccccacgucaucgaggaggugaugaacaucgugcugaucgcccucagccugcuggccauccucaaggggaucuacaacgucgcgaccugcggccuguucgggcugguguccuuccuccugcugugcggccgcagcugcuccacgaccuacaaggggguguacgagcuccagacccuggagcuggacauggccagccucaacaugaccaugccgcuguccugcacgaagaacaacagccaccacuacaucauggucggcaacgagaccggccuggagcucacccugaccaacacguccaucaucaaccacaaguucugcaaccugagcgacgcccacaagaagaaccucuacgaccacgcccugauguccaucaucagcaccuuccaccuguccauccccaacuucaaccaguacgaggccaugagcugcgacuucaacgggggcaagaucuccgugcaguacaaccucagccacaccuacgcgguggacgccgccaaccacugcgggaccaucgccaacggcguccugcagacguucaugcggauggcguggggcggguccuacaucgcccuggacagcggcaagggguccugggacugcaucaugaccagcuaccaguaccucaucauccagaacaccaccugggaggaccacugccaguucucccgccccagccccaucggcuaccuggggcugcucagccagcggacgcgcgacaucuacaucucccggcgccugcugggcaccuucaccuggacccucagcgacuccgagagcaacgagacgccgggcggguacugccugacccgguggaugcugaucgaggccgagcucaagugcuucggcaacaccgccguggccaagugcaacgagaagcacgacgaggaguucugcgacaugcugcgccuguucgacuucaacaagcaggcgauccggcgccucaaggccgaggcccagauguccauccagcugaucaacaaggccgugaacgcccugaucaacgaccagcucaucaugaagaaccaccuccgggacaucauggggauccccuacugcaacuacagcaaguacugcuaccugaaccacaccgucacgggccgcaccucccugccccggugcugccuggugagcaacggguccuaccugaacgagacccacuucagcgacgacaucgagcagcaggcggacaacaugaucaccgagcuccugcagaaggaguacauggaccgccagggcaagacgccccugggccugguggaccucuucgucuucuccaccagcuucuaccugaucuccaucuuccugcaccucgugaagaucccgacccaccggcacgugaucgggaagcccugccccaagccccaccgccugaaccacaugggcaucugcagcugcgggcuguacaagcacccgggcguccccgugaaguggaagcggugaggacuagucccuguucccagagcccacuuuuuuuucuuuuuuugaaauaaaauagccugucuuucagaucucaaaggcucuuuucagagccaccaaaaaaaaaaaaaaaaaaaaaaaaaaaaaaaaaaaaaaaaaaaaaaaaaaaaaaaaaaaaaaaaaaaaaaaaaaaaaaaaaaaaaaaaaaaaaaaaaaaaa

SEQ ID NO: 38548 - RNA, 1745 nt, Artificial Sequence
  mRNA product Design a-1 (hSL-A100) comprising derived and/or modified sequence from LASV(LASV035-NIG-2009;Clade II)__AIT17588__GPCmut11 (opt1)
aggagagucccgcagucggcguccagcggcucugcuuguucgugugugugucguugcaggccuuauucaagcuuaccaugggccagaucaucaccuucuuccaggaggugccccacgucaucgaggaggugaugaacaucgugcugaucgcccucagccugcuggccauccucaaggggaucuacaacgucgcgaccugcggccuguucgggcugguguccuuccuccugcugugcggccgcagcugcuccacgaccuacaaggggguguacgagcuccagacccuggagcuggacauggccagccucaacaugaccaugccgcuguccugcacgaagaacaacagccaccacuacaucauggucggcaacgagaccggccuggagcucacccugaccaacacguccaucaucaaccacaaguucugcaaccugagcgacgcccacaagaagaaccucuacgaccacgcccugauguccaucaucagcaccuuccaccuguccauccccaacuucaaccaguacgaggccaugagcugcgacuucaacgggggcaagaucuccgugcaguacaaccucagccacgcguacgccguggacgccgccaaccacugcgggaccaucgcgaacggcguccugcagaccuucaugcggauggccuggggcggguccuacaucgcccuggacagcggcaagggguccugggacugcaucaugacgagcuaccaguaccucaucauccagaacaccaccugggaggaccacugccaguucucccgccccagccccaucggcuaccuggggcugcucagccagcggacccgcgacaucuacaucucccggcgccugcugggcacguucaccuggacccucagcgacuccgagggcaacgagacccccgggggcuacugccugacgcgguggaugcugaucgaggccgagcucaagugcuucgggaacaccgccguggcgaagugcaacgagaagcacgacgaggaguucugcgacaugcugcgccuguucgacuucaacaagcaggccauccggcgccucaaggccgaggcccagaugagcauccagcugaucaacaaggccgugaacgcgcugaucaacgaccagcucaucaugaagaaccaccuccgggacaucaugggcauccccuacugcaacuacuccaaguacugcuaccugaaccacaccgucaccgggaagacgagccugccccgcugcugccugguguccaacggcagcuaccugaacgagacccacuucuccgacgacaucgagcagcaggccgacaacaugaucaccgagcuccugcagaaggaguacaucgaccggcagggcaagaccccgcuggggcugguggaccucuucgucuucagcacguccuucuaccugaucagcaucuuccugcaccucgugaagaucccgacccaccgccacgugaucggcaagcccugccccaagccccaccggcugaaccacauggggaucugcuccugcggccuguacaagcacccggggguccccgugaaguggaagcgcugaggacuagucccuguucccagagcccacuuuuuuuucuuuuuuugaaauaaaauagccugucuuucagaucucaaaggcucuuuucagagccaccaaaaaaaaaaaaaaaaaaaaaaaaaaaaaaaaaaaaaaaaaaaaaaaaaaaaaaaaaaaaaaaaaaaaaaaaaaaaaaaaaaaaaaaaaaaaaaaaaaaaa

SEQ ID NO: 38549 - RNA, 1745 nt, Artificial Sequence
  mRNA product Design a-1 (hSL-A100) comprising derived and/or modified sequence from LASV(LASV1000-NIG-2009;Clade II)__AIT17782__GPCmut11 (opt1)
aggagagucccgcagucggcguccagcggcucugcuuguucgugugugugucguugcaggccuuauucaagcuuaccaugggccagaucaucaccuucuuccaggaggugccccacgucaucgaggaggugaugaacaucgugcugaucgcccucagccugcuggccauccucaaggggaucuacaacgucgcgaccugcggccuguucgggcugguguccuuccuccugcugugcggccgcagcugcuccacgaccuacaaggggguguacgagcuccagacccuggagcuggacauggccagccucaacaugaccaugccgcuguccugcacgaagaacaacagccaccacuacaucauggucggcaacgagaccggccuggagcucacccugaccaacacguccaucaucaaccacaaguucugcaaccugagcgacgcccacaagaagaaccucuacgaccacgcccugauguccaucaucagcaccuuccaccuguccauccccaacuucaaccaguacgaggccaugagcugcgacuucaacgggggcaagaucuccgugcaguacaaccucagccacaccuacgcgguggacgccgccaaccacugcgggaccaucgccaacggcguccugcagacguucaugcggauggcguggggcggguccuacaucgcccuggacagcggcaagggguccugggacugcaucaugaccagcuaccaguaccucaucauccagaacaccaccugggaggaccacugccaguucucccgccccagccccaucggcuaccuggggcugcucagccagcggacgcgcgacaucuacaucucccggcgccugcugggcaccuucaccuggacccucagcgacuccgagggcaacgagacgcccgggggcuacugccugacccgguggaugcugaucgaggccgagcucaagugcuucgggaacaccgccguggccaagugcaacgagaagcacgacgaggaguucugcgacaugcugcgccuguucgacuucaacaagcaggcgaucaagcggcucaagaccgaggcccagaugagcauccagcugaucaacaaggccgugaacgcccugaucaacgaccagcucaucaugaagaaccaccuccgcgacaucaugggcauccccuacugcaacuacuccaaguacugcuaccugaaccacacggucaccgggaagaccagccugccccggugcugccugguguccaacggcagcuaccugaacgagacccacuucuccgacgacaucgagcagcaggccgacaacaugaucacggagcuccugcagaaggaguacaucgaccgccagggcaagaccccgcuggggcugguggaccucuucgucuucagcaccuccuucuaccugaucagcaucuuccugcaccucgugaagaucccgacccaccggcacguggucggcaagcccugccccaagccccaccgccugaaccacauggggaucugcuccugcggccuguacaagcacccgggggugcccgugaaguggaagcggugaggacuagucccuguucccagagcccacuuuuuuuucuuuuuuugaaauaaaauagccugucuuucagaucucaaaggcucuuuucagagccaccaaaaaaaaaaaaaaaaaaaaaaaaaaaaaaaaaaaaaaaaaaaaaaaaaaaaaaaaaaaaaaaaaaaaaaaaaaaaaaaaaaaaaaaaaaaaaaaaaaaaa

SEQ ID NO: 38550 - RNA, 1745 nt, Artificial Sequence
  mRNA product Design a-1 (hSL-A100) comprising derived and/or modified sequence from LASV(LASV221-NIG-2010;Clade II)__AIT17624__GPCmut11 (opt1)
aggagagucccgcagucggcguccagcggcucugcuuguucgugugugugucguugcaggccuuauucaagcuuaccaugggccagaucaucaccuucuuccaggaggugccccacgucaucgaggaggugaugaacaucgugcugaucgcccucagccugcuggccauccucaaggggaucuacaacgucgcgaccugcggccuguucgggcugguguccuuccuccugcugugcggccgcagcugcuccacgaccuacaaggggguguacgagcuccagacccuggagcuggacauggccagccucaacaugaccaugccgcuguccugcacgaagaacaacagccaccacuacaucauggucggcaacgagaccggccuggagcucacccugaccaacacguccaucaucaaccacaaguucugcaaccugagcgacgcccacaagaagaaccucuacgaccacgcccugauguccaucaucagcaccuuccaccuguccauccccaacuucaaccaguacgaggccaugagcugcgacuucaacgggggcaagaucuccgugcaguacaaccucagccacaccuacgcgaucgacgccgccaaccacugcgggaccaucgccaacggcgugcugcagacguucaugcggauggcguggggcggguccuacaucgcccuggacagcggcaagggguccugggacugcaucaugaccagcuaccaguaccucaucauccagaacaccaccugggaggaccacugccaguucucccgccccagccccaucggcuaccuggggcugcucagccagcggacgcgcgacaucuacaucucccggcgccugcugggcaccuucaccuggacccucagcgacuccgagggcaacgagacgcccgggggcuacugccugacccgguggaugcugaucgaggccgagcucaagugcuucgggaacaccgccgucgccaagugcaacgagaagcacgacgaggaguucugcgacaugcugcgccuguucgacuucaacaagcaggcgauccggcgccucaagaccgaggcccagaugagcauccagcugaucaacaaggccgugaacgcccugaucaacgaccagcucaucaugaagaaccaccuccgggacaucaugggcauccccuacugcaacuacuccaaguacugcuaccugaaccacacggugaccgggaagaccagccugccccgcugcugccuggucuccaacggcagcuaccugaacgagacccacuucuccgacgacaucgagcagcaggccgacaacaugaucacggagaugcuccagaaggaguacauggaccggcagggcaagaccccgcuggggcugguggaccuguucguguucagcaccuccuucuaccucaucagcaucuuccugcaccuggucaagaucccgacccaccgccacgugaucggcaagcccugccccaagccccaccggcucaaccacauggggaucugcuccugcggccuguacaagcacccgggggugcccgucaaguggaagcgcugaggacuagucccuguucccagagcccacuuuuuuuucuuuuuuugaaauaaaauagccugucuuucagaucucaaaggcucuuuucagagccaccaaaaaaaaaaaaaaaaaaaaaaaaaaaaaaaaaaaaaaaaaaaaaaaaaaaaaaaaaaaaaaaaaaaaaaaaaaaaaaaaaaaaaaaaaaaaaaaaaaaaa

SEQ ID NO: 38551 - RNA, 1745 nt, Artificial Sequence
  mRNA product Design a-1 (hSL-A100) comprising derived and/or modified sequence from LASV(LASV237-NIG-2010;Clade II)__AIT17638__GPCmut11 (opt1)
aggagagucccgcagucggcguccagcggcucugcuuguucgugugugugucguugcaggccuuauucaagcuuaccaugggccagaucaucaccuucuuccaggaggugccccacgucaucgaggaggugaugaacaucgugcugaucgcccucagccugcuggccauccucaaggggaucuacaacgucgcgaccugcggccuguucgggcugguguccuuccuccugcugugcggccgcagcugcuccacgaccuacaaggggguguacgagcuccagacccuggagcuggacauggccagccucaacaugaccaugccgcuguccugcacgaagaacaacagccaccacuacaucauggucggcaacgagaccggccuggagcucacccugaccaacacguccaucaucaaccacaaguucugcaaccugagcgacgcccacaagaaggaccucuacgaccacgcccugauguccaucaucagcaccuuccaccuguccauccccaacuucaaccaguacgaggccaugagcugcgacuucaacgggggcaagaucuccgugcaguacaaccucagccacaccuacgcgguggacgccgccaaccacugcgggaccaucgccaacggcguccugcagacguucaugcggauggcguggggcggguccuacaucgcccuggacagcggcaagggguccugggacugcaucaugaccagcuaccaguaccucaucauccagaacaccaccugggaggaccacugccaguucucccgccccagccccaucggcuaccuggggcugcucagccagcggacgcgcgacaucuacaucucccggcgccugcugggcaccuucaccuggacccucagcgacuccgagggcaacgagacgcccgggggcuacugccugacccgguggaugcugaucgaggccgagcucaagugcuucgggaacaccgccguggccaagugcaacgagaagcacgacgaggaguucugcgacaugcugcgccuguucgacuucaacaagcaggcgauccggcgccucaagaccgaggcccagaugagcauccagcugaucaacaaggccgugaacgcccugaucaacgaccagcucaucaugaagaaccaccuccgggacaucaugggcauccccuacugcaacuacuccaaguacugcuaccugaaccacacggucaccgggaagaccagccugccccgcugcugccugguguccaacggcagcuaccugaacgagacccacuucuccgacgacaucgagcagcaggccgacaacaugaucacggagcuccugcagaaggaguacauggaccggcagggcaagaccccgcuggggcugguggaccucuucgucuucagcaccuccuucuaccugaucagcaucuuccugcaccucaucaagaucccgacccaccgccacaucacgggcaagcccugccccaagccccaccggcugaaccacauggggaucugcuccugcggccuguacaagcacccgggggugcccgugaaguggaagcgcugaggacuagucccuguucccagagcccacuuuuuuuucuuuuuuugaaauaaaauagccugucuuucagaucucaaaggcucuuuucagagccaccaaaaaaaaaaaaaaaaaaaaaaaaaaaaaaaaaaaaaaaaaaaaaaaaaaaaaaaaaaaaaaaaaaaaaaaaaaaaaaaaaaaaaaaaaaaaaaaaaaaaa

SEQ ID NO: 38552 - RNA, 1745 nt, Artificial Sequence
  mRNA product Design a-1 (hSL-A100) comprising derived and/or modified sequence from LASV(LASV253-NIG-2011;Clade II)__AIT17670__GPCmut11 (opt1)
aggagagucccgcagucggcguccagcggcucugcuuguucgugugugugucguugcaggccuuauucaagcuuaccaugggccagaucaucaccuucuuccaggaggugccccacgucaucgaggaggugaugaacaucgugcugaucgcccucagccugcuggccauccucaaggggaucuacaacgucgcgaccugcggccuguucgggcugguguccuuccuccugcugugcggccgcagcugcuccacgaccuacaaggggguguacgagcuccagacccuggagcuggacauggccagccucaacaugaccaugccgcuguccugcacgaagaacaacagccaccacuacaucauggucggcaacgagaccggccuggagcucacccugaccaacacguccaucaucaaccacaaguucugcaaccugagcgacgcccacaagaagaaccucuacgaccacgcccugauguccaucaucagcaccuuccaccuguccauccccaacuucaaccaguacgaggccaugagcugcgacuucaacgggggcaagaucuccgugcaguacaaccucagccacaccuacgcgguggacgccgccaaccacugcgggaccaucgccaacggcguccugcagacguucaugcggauggcguggggcggguccuacaucgcccuggacagcggcaagggguccugggacugcaucaugaccagcuaccaguaccucaucauccagaacaccaccugggaggaccacugccaguucucccgccccagccccaucggcuaccuggggcugcucagccagcggacgcgcgacaucuacaucucccggcgccugcugggcaccuucaccuggacccucagcgacuccgagggcaacgagacgcccgggggcuacugccugacccgguggaugcugaucgaggccgagcucaagugcuucgggaacaccgccguggccaagugcaacgagaagcacgacgaggaguucugcgacaugcugcgccuguucgacuucaacaagcaggcgauccggcgccucaaggccgaggcccagaugagcauccagcugaucaacaaggccgugaacgcccugaucaacgaccagcucaucaugaagaaccaccuccgggacaucaugggcaucccguacugcaacuacuccaaguacugcuaccugaaccacaccgucacggggcgcaccagccugccccggugcugccugguguccaacggcagcuaccugaacgagacccacuucuccgacgacaucgagcagcaggcggacaacaugaucaccgagcuccugcagaaggaguacaucgaccgccagggcaagacgccccuggggcugguggaccucuucgucuucagcaccuccuucuaccugaucagcaucuuccugcaccucgugaagaucccgacccaccggcacaucaucggcaagcccugccccaagccccaccgccugaaccacauggggaucugcuccugcggccuguacaagcacccgggggugcccgucaaguggaagcggugaggacuagucccuguucccagagcccacuuuuuuuucuuuuuuugaaauaaaauagccugucuuucagaucucaaaggcucuuuucagagccaccaaaaaaaaaaaaaaaaaaaaaaaaaaaaaaaaaaaaaaaaaaaaaaaaaaaaaaaaaaaaaaaaaaaaaaaaaaaaaaaaaaaaaaaaaaaaaaaaaaaaa

SEQ ID NO: 38553 - RNA, 1745 nt, Artificial Sequence
  mRNA product Design a-1 (hSL-A100) comprising derived and/or modified sequence from LASV(LASV254-NIG-2011;Clade II)__AIT17674__GPCmut11 (opt1)
aggagagucccgcagucggcguccagcggcucugcuuguucgugugugugucguugcaggccuuauucaagcuuaccaugggccagaucaucaccuucuuccaggaggugccccacgucaucgaggaggugaugaacaucgugcugaucgcccucagccugcuggccauccucaaggggaucuacaacgucgcgaccugcggccuguucgggcugguguccuuccuccugcugugcggccgcagcugcuccacgaccuacaaggggguguacgagcuccagacccuggagcuggacaugaccaaccucaacaugacgaugccgcugagcugcaccaagaacaacucccaccacuacaucauggucggcaacgagaccggccuggagcucacccugacgaacaccagcaucaucaaccacaaguucugcaaccuguccgacgcccacaagaagaaccucuacaaccacgcccugaugagcaucaucuccaccuuccaccugagcauccccaacuucaaccaguacgaggccauguccugcgacuucaacgggggcaagaucagcgugcaguacaaccucucccacagcuacgccguggacgcggccaaccacugcgggaccaucgccaacggcguccugcagacguucaugcggauggccuggggcggguccuacaucgcgcuggacagcggcaaggggaacugggacugcaucaugaccuccuaccaguaccucaucauccagaacaccaccugggaggaccacugccaguucagccgccccucccccaucggcuaccuggggcugcucagccagcggacgcgcgacaucuacaucagccggcgccugcugggcaccuucaccuggacccucuccgacagcgagggcaacgagacgcccgggggcuacugccugacccgguggaugcugaucgaggccgagcucaagugcuucgggaacaccgccguggccaagugcaacgagaagcacgacgaggaguucugcgacaugcugcgccuguucgacuucaacaagcaggccauccggcgccucaagaccgaggcgcaggccaacauccagcugaucaacaaggccgugaacgcccugaucaacgaccagcucaucaugaagaaccaccuccgggacaucaugggcauccccuacugcaacuacuccaaguacugcuaccugaaccacacggucaccgggaagaccagccugccccgcugcugccugguguccaacggcagcuaccugaacgagacccacuucuccgacgacaucgagcagcaggccgacaacaugaucacggagcuccugcagaaggaguacauggaccggcagggcaagaccccgcuggggcugguggaccucuucgucuucagcaccuccuucuaccugaucagcaucuuccugcaccucgugaagaucccgacccaccgccacgugaucggcaagcccugccccaagccccaccggcugaaccacauggggaucugcuccugcggccuguacaagcacccggggguccccgugaaguggaagcgcugaggacuagucccuguucccagagcccacuuuuuuuucuuuuuuugaaauaaaauagccugucuuucagaucucaaaggcucuuuucagagccaccaaaaaaaaaaaaaaaaaaaaaaaaaaaaaaaaaaaaaaaaaaaaaaaaaaaaaaaaaaaaaaaaaaaaaaaaaaaaaaaaaaaaaaaaaaaaaaaaaaaaa

SEQ ID NO: 38554 - RNA, 1745 nt, Artificial Sequence
  mRNA product Design a-1 (hSL-A100) comprising derived and/or modified sequence from LASV(Nig08-A19;Clade III)__ADU56618__GPCmut11 (opt1)
aggagagucccgcagucggcguccagcggcucugcuuguucgugugugugucguugcaggccuuauucaagcuuaccaugggccagaucgugaccuucuuccaggaggucccccacgugaucgaggaggugaugaacaucguccugaucgcccucagcauccuggccauccugaaggggcucuacaacaucgcgaccugcggccugaucgggcuggugacguuccuccugcuguccggccgcagcugcuccaugaccuacaaggggguguacgagcuccagacccuggagcugaacaugaacacccucaacaugacgaugccgcugagcugcaccaagaacaacucccaccacuacaucauggucggcaacgagaccggccuggagcucacccugacgaacaccagccugcuccaccacaaguucugcaaccuguccgacgcccacaagaagaaccuguacgaccacacccucaugagcaucaucuccaccuuccaccugagcauccccaacuucaaccaguacgaggccauguccugcgacuucaacgggggcaagaucacggugcaguacaaccugagccacuccuacgccaucgacgccgcgaaccacugcgggaccguggccaacggcguccuccagaccuucaugcggauggccuggggcgggagcuacaucgcccuggacuccggccgcgggaagugggacugcaucaugaccagcuaccaguaccugaucauccagaacacgaccugggaggaccacugccaguucucccggcccagccccaucggcuaccucgggcugcugucccagcgcacccgggacaucuacaucagccgccggcuccugggcaccuucacguggacccugagcgacuccgagggcaacgagacccccgggggcuacugccucacccgcuggaugcugaucgaggcggagcugaagugcuucgggaacacggccguggccaagugcaacgagaagcacgacgaggaguucugcgacaugcuccggcuguucgacuucaacaagcaggccauccgccggcugaaggccgaggcgcagaugagcauccagcucaucaacaaggccgugaacgcccugaucaacgaccagcugaucaugaagaaccaccuccgcgacaucaugggcauccccuacugcaacuacuccaaguacugcuaccugaaccacaccagcaccgggcggaccucccugccccgcugcugccucgucagcaacggcuccuaccugaacgagacgcacuucagcgacgacaucgagcagcaggccgacaacaugaucaccgagaugcugcagaaggaguaccuggaccggcagggcaagaccccgcucgggcugguggaccuguucguguucuccaccagcuucuaccucaucuccaucuuccugcaccuggucaagaucccgacgcaccgccacaucgugggcaagcccugccccaagccccaccggcucaaccacauggggaucugcagcugcggccuguacaagcagccgggggugcccguccgcuggaagcggugaggacuagucccuguucccagagcccacuuuuuuuucuuuuuuugaaauaaaauagccugucuuucagaucucaaaggcucuuuucagagccaccaaaaaaaaaaaaaaaaaaaaaaaaaaaaaaaaaaaaaaaaaaaaaaaaaaaaaaaaaaaaaaaaaaaaaaaaaaaaaaaaaaaaaaaaaaaaaaaaaaaaa

SEQ ID NO: 38555 - RNA, 1748 nt, Artificial Sequence
  mRNA product Design a-1 (hSL-A100) comprising derived and/or modified sequence from LASV(G1180-SLE-2010;Clade IV)__AIT17168__GPCmut11 (opt1)
aggagagucccgcagucggcguccagcggcucugcuuguucgugugugugucguugcaggccuuauucaagcuuaccaugggccagaucgugaccuucuuccaggaggucccccacgugaucgaggaggugaugaacaucguccugaucgcccucagcauccuggccgugcugaaggggcucuacaacuucgcgaccugcggccugguggggcugcucaccuuccugcugcucugcggccgcuccugcaccgccagccgguacaagggggucuacgagcugcagacccuggagcucaacauggagacccugaacaugacgaugccgcuguccugcaccaagaacaacagccaccacuacaucauggugggcaacgagaccggccucgagcugacccugacgaacaccuccaucaucaaccacaaguucugcaaccucagcgacgcccacaagaagaaccuguacgaccacgcccugauguccaucaucagcaccuuccaccucuccauccccaacuucaaccaguacgaggccaugagcugcgacuucaacgggggcaagaucuccgugcaguacaaccugagccacuccuacgcgggggacgccgccaaccacugcggcaccgucgccaacggggugcugcagacguucaugcgcauggcguggggcggcagcuacaucgcccucgacuccgggcacggcagcugggacugcaucaugaccuccuaccaguaccugaucauccagaacaccaccugggaggaccacugccaguucagccggcccucccccaucggguaccugggccuccugagccagcgcacgcgggacaucuacaucagccgccggcugcucggcaccuucaccuggacccuguccgacagcgaggggaaggacacgccgggcggguacugccugacccgcuggaugcucaucgaggccgagcugaagugcuucggcaacaccgccguggccaagugcaacgagaagcacgacgaggaguucugcgacaugcugcggcuguucgacuucaacaagcaggcgauccagcgccugaaggccgaggcccagauguccauccagcugaucaacaaggccgucaacgcccucaucaacgaccagcugaucaugaagaaccaccuccgggacaucauggggauccccuacugcaacuacagcaaguacugcuaccucaaccacaccacgaccggcaagaccucccugcccaagugcugccuggugagcaacggcuccuaccucaacgagacccacuucagcgacgacaucgagcagcaggcggacaacaugaucacggagaugcugcagaaggaguacauggagcgccaggggaagacgccccugggccugguggaccucuucgucuucuccaccagcuucuaccugaucuccaucuuccugcaccucgugaagaucccgacccaccggcacaucgugggcaagagcugccccaagccccaccgccugaaccacauggggaucugcuccugcgggcuguacaagcagcccggcgucccggugaaguggaagcggugaggacuagucccuguucccagagcccacuuuuuuuucuuuuuuugaaauaaaauagccugucuuucagaucucaaaggcucuuuucagagccaccaaaaaaaaaaaaaaaaaaaaaaaaaaaaaaaaaaaaaaaaaaaaaaaaaaaaaaaaaaaaaaaaaaaaaaaaaaaaaaaaaaaaaaaaaaaaaaaaaaaaa

SEQ ID NO: 38556 - RNA, 1748 nt, Artificial Sequence
  mRNA product Design a-1 (hSL-A100) comprising derived and/or modified sequence from LASV(G1442-SLE-2011;Clade IV)__AIT17180__GPCmut11 (opt1)
aggagagucccgcagucggcguccagcggcucugcuuguucgugugugugucguugcaggccuuauucaagcuuaccaugggccagaucgugaccuucuuccaggaggucccccacgugaucgaggaggugaugaacaucguccugaucgcccucagcauccuggccgugcugaaggggcucuacaacguggcgaccugcggccugaucgggcuggucacguuccuccugcugugcggccgcuccugcaccaccacccucuacaaggggguguacgagcugcagacgcuggagcucaacauggagacccugaacaugaccaugccgcugagcugcaccaagaacaacucccaccacuacauccgggugggcaacgagacgggccucgagcugacccugaccaacaccagcaucaucaaccacaaguucugcaaccucuccgacgcccacaagaagaaccuguacgaccacgcccugaugagcaucaucuccacguuccaccucagcauccccaacuucaaccaguacgaggccauguccugcgacuucaacgggggcaagaucagcguccaguacaaccugucccacagcuacgccggggacgcggccaaccacugcggcaccguggccaacggggugcugcagaccuucaugcgcauggccuggggcggcuccuacaucgcgcucgacagcgggcggggcaacugggacugcaucaugaccuccuaccaguaccugaucauccagaacacgaccugggacgaccacugccaguucagccgccccucccccaucggguaccugggccuccugagccagcggacccgcgacgucuacaucucccggcgccugcucggcaccuucacguggacccugagcgacagcgaggggaaggacaccccgggcggguacugccugacccgguggaugcucaucgaggccgagcugaagugcuucggcaacacggccguggccaagugcaacgagaagcacgacgaggaguucugcgacaugcugcgccucuucgacuucaacaagcaggccauccagcggcugaaggcggaggcccagauguccauccagcugaucaacaaggccgugaacgcccucaucaacgaccagcugaucaugaagaaccaccuccgcgacaucauggggauccccuacugcaacuacagcaaguacugcuaccugaacaacaccgccaccggcaagaccucccugcccaagugcugccugaucagcaacggcuccuaccucaacgagacgcacuucagcgacgacaucgagcaggaggcggacaacaugaucaccgagaugcugcagaaggaguacauggagcggcaggggaagacgccccugggccuggucgaccucuucguguucuccaccagcuucuaccugaucuccaucuuccugcaccucgugaagaucccgacccaccgccacaucgucggcaagagcugccccaagccccaccggcugaaccacauggggaucugcuccugcgggcuguacaagcagcccggcgugccggugcgcuggaagcggugaggacuagucccuguucccagagcccacuuuuuuuucuuuuuuugaaauaaaauagccugucuuucagaucucaaaggcucuuuucagagccaccaaaaaaaaaaaaaaaaaaaaaaaaaaaaaaaaaaaaaaaaaaaaaaaaaaaaaaaaaaaaaaaaaaaaaaaaaaaaaaaaaaaaaaaaaaaaaaaaaaaaa

SEQ ID NO: 38557 - RNA, 1748 nt, Artificial Sequence
  mRNA product Design a-1 (hSL-A100) comprising derived and/or modified sequence from LASV(G3010-SLE-2013;Clade IV)__AIT17344__GPCmut11 (opt1)
aggagagucccgcagucggcguccagcggcucugcuuguucgugugugugucguugcaggccuuauucaagcuuaccaugggccagaucgugaccuucuuccaggaggucccccacgugaucgaggaggugaugaacaucguccugaucgcccucagcauccuggccgugcugaaggggcucuacaacuucgcgaccugcggccugguggggcuggucacguuccuccugcugugcggccgcuccugcaccaccagccucuacaaggggguguacgagcugcagacccuggagcucaacauggagacgcugaacaugaccaugccgcuguccugcaccaagaacaacagccaccacuacaucauggugggcaacgagaccggccucgagcugacgcugaccaacaccuccaucaucaaccacaaguucugcaaccucagcgacgcccacaagaagaaccuguacaaccacgcccugauguccaucaucagcaccuuccaccucuccauccccaacuucaaccaguacgaggccaugagcugcgacuucaacgggggcaagaucuccguccaguacaaccugagccacuccuacgccggggacgcggccagccacugcggcacgguggccaacggggugcugcagaccuucaugcggauggccuggggcggcuccuacaucgcgcucgacagcggguacggcaagugggacugcaucaugaccuccuaccaguaccugaucauccagaacaccacgugggaggaccacugccaguucagccgccccucccccaucggguaccugggccuccugagccagcggacccgcgacaucuacaucagccggcgccugcucggcaccuucaccuggacgcuguccgacagcgaggggaaggacaccccgggcggguacugccugacccgguggaugcucaucgaggccgagcugaagugcuucggcaacaccgccgucgccaagugcaacgagaagcacgacgaggaguucugcgacaugcugcgccucuucgacuucaacaagcaggccauccagcggcugaagacggaggcgcagauguccauccagcugaucaacaaggccgugaacgcccucaucaacgaccagcugaucaugaagaaccaccuccgcgacaucauggggauccccuacugcaacuacagcaaguacugcuaccugaaccacaccaccaccggcaagacgucccugcccaagugcugccuggugagcaacggcuccuaccucaacgagacccacuucagcgacgacaucgagcagcaggccgacaacaugaucaccgagaugcugcagaaggaguacauggagcggcaggggaagacgccccugggccuggucgaccucuucguguucuccaccagcuucuaccugaucuccaucuuccugcaccucgugaagaucccgacccaccgccacaucgucggcaagagcugccccaagccccaccggcugaaccacauggggaucugcuccugcgggcuguacaagcagcccggcgugccggugcgcuggaagcggugaggacuagucccuguucccagagcccacuuuuuuuucuuuuuuugaaauaaaauagccugucuuucagaucucaaaggcucuuuucagagccaccaaaaaaaaaaaaaaaaaaaaaaaaaaaaaaaaaaaaaaaaaaaaaaaaaaaaaaaaaaaaaaaaaaaaaaaaaaaaaaaaaaaaaaaaaaaaaaaaaaaaa

SEQ ID NO: 38558 - RNA, 1748 nt, Artificial Sequence
  mRNA product Design a-1 (hSL-A100) comprising derived and/or modified sequence from LASV(G502-SLE-2009;Clade IV)__AIT17126__GPCmut11 (opt1)
aggagagucccgcagucggcguccagcggcucugcuuguucgugugugugucguugcaggccuuauucaagcuuaccaugggccagaucgugaccuucuuccaggaggucccccacgugaucgaggaggugaugaacaucguccugaucgcccucagcauccuggccgugcugaaggggcucuacaacuucgcgaccugcggccugguggggcugcucacguuccugcugcucugcggccgcuccugcaccaccgggcuguacaagggcgucuacgagcugcagacccucgagcugaacauggagacgcugaacaugaccaugccgcucagcugcaccaagaacaacucccaccacuacaucauggugggcaacgagaccgggcuggagcugacgcucaccaacaccagcaucaucaaccacaaguucugcaaccuguccgacgcccacaagaagaaccuguacgaccacgcccucaugagcaucaucuccaccuuccaccugagcauccccaacuucaaccaguacgaggccauguccugcgacuucaacggcgggaagaucagcgugcaguacaaccugucccacagcuacgccggcgacgcggccgaccacugcgggacggucgccaacggcgugcuccagaccuucaugcggauggccuggggcggguccuacaucgcgcuggacagcggccgcgggcggugggacugcaucaugaccuccuaccaguaccugaucauccagaacaccacgugggaggaccacugccaguucagccgccccucccccaucggcuaccucggccugcugagccagcggacccgcgacaucuacaucucccggcgccuccuggggaccuucaccuggacgcugagcgacagcgagggcaaggacacccccgggggcuacugccucacccgguggaugcugaucgaggccgagcugaagugcuucgggaacaccgccguggccaagugcaacgagaagcacgacgaggaguucugcgacaugcuccgccuguucgacuucaacaagcaggccauccagcggcugaaggcggaggcccagauguccauccagcucaucaacaaggccgucaacgcccugaucaacgaccagcuggugaugaagaaccaccuccgcgacaucaugggcauccccuacugcaacuacagccgguacugcuaccugaaccacacgaccaccggccgcaccucccugcccaagugcugccucgugagcaacggguccuaccugaacgagacgcacuucagcgacgacaucgagcagcaggccgacaacaugaucaccgagaugcugcagaaggaguacauggagcggcagggcaagaccccgcuggggcucgucgaccuguucguguucuccaccagcuucuaccugaucuccaucuuccuccaccuggugaagaucccgacgcaccgccacaucgucggcaagagcugccccaagccccaccggcugaaccacauggggaucugcuccugcggccucuacaagcagcccggcgugccggugaaguggaagcgcugaggacuagucccuguucccagagcccacuuuuuuuucuuuuuuugaaauaaaauagccugucuuucagaucucaaaggcucuuuucagagccaccaaaaaaaaaaaaaaaaaaaaaaaaaaaaaaaaaaaaaaaaaaaaaaaaaaaaaaaaaaaaaaaaaaaaaaaaaaaaaaaaaaaaaaaaaaaaaaaaaaaaa

SEQ ID NO: 38559 - RNA, 1748 nt, Artificial Sequence
  mRNA product Design a-1 (hSL-A100) comprising derived and/or modified sequence from LASV(G733-SLE-2010;Clade IV)__AIT17154__GPCmut11 (opt1)
aggagagucccgcagucggcguccagcggcucugcuuguucgugugugugucguugcaggccuuauucaagcuuaccaugggccagaucgugaccuucuuccaggaggucccccacgugaucgaggaggugaugaacaucguccugaucgcccucagcauccuggccgugcugaaggggcucuacaacuucgcgaccugcggcaucguggggcuggucuccuuccugcuccugugcggccgcagcugcacgaccucccuguacaaggggguguacgagcuccagacccuggagcugaacauggagacccucaacaugacgaugccgcugagcugcaccaagaacaacucccaccacuacaucauggugggcaacgagaccggccuggagcucacccugacgaacaccagcaucaucaaccacaaguucugcaaccuguccgacgcccacaagaagaaccucuacgaccacgcccugaugagcaucaucuccaccuuccaccugagcauccccaacuucaaccaguacgaggccauguccugcgacuucaacgggggcaagaucagcguccaguacaaccucucccacagcuacgccggggacgcggccaaccacugcggcaccaucgccaacggggugcugcagacguucaugcggauggccuggggcggcuccuacaucgcgcuggacagcgggcgcgaccggugggacugcaucaugaccuccuaccaguaccucaucauccagaacaccaccugggaggaccacugccaguucagccgccccucccccaucggcuaccuggggcugcucagccagcggacgcgcgacaucuacaucagccggcgccugcugggcaccuucaccuggacccucuccgacagcgagggcaaggacacgcccgggggcuacugccugacccgguggaugcugaucgaggccgagcucaagugcuucgggaacaccgccguggccaagugcaacgagaagcacgacgaggaguucugcgacaugcugcgccuguucgacuucaacaagcaggccauccagcggcucaaggcggaggcccagauguccauccagcugaucaacaaggccgucaacgcccugaucaacgaccagcucaucaugaagaaccaccuccgcgacaucaugggcauccccuacugcaacuacagcaaguacugcuaccugaaccacaccacgaccgggaagaccucccugcccaagugcugccuggugagcaacggcuccuaccugaacgagacccacuucagcgacgacaucgagcagcaggccgacaacaugaucacggagaugcuccagaaggaguacauggagcggcagggcaagaccccgcuggggcugguggaccuguucgucuucuccaccagcuucuaccucaucuccaucuuccugcaccuggugaagaucccgacccaccgccacguggucggcaagagcugccccaagccccaccggcucaaccacauggggaucugcuccugcggccuguacgggcagcccggcgugccggugaaguggaagcgcugaggacuagucccuguucccagagcccacuuuuuuuucuuuuuuugaaauaaaauagccugucuuucagaucucaaaggcucuuuucagagccaccaaaaaaaaaaaaaaaaaaaaaaaaaaaaaaaaaaaaaaaaaaaaaaaaaaaaaaaaaaaaaaaaaaaaaaaaaaaaaaaaaaaaaaaaaaaaaaaaaaaaa

SEQ ID NO: 38560 - RNA, 1748 nt, Artificial Sequence
  mRNA product Design a-1 (hSL-A100) comprising derived and/or modified sequence from MOPV/LASV reassortant(IGS-1;Clade IV)__AFY05576__GPCmut11 (opt1)
aggagagucccgcagucggcguccagcggcucugcuuguucgugugugugucguugcaggccuuauucaagcuuaccaugggccagaucgugaccuucuuccaggaggucccccacgugaucgaggaggugaugaacaucguccugaucgcccucagcgugcuggccgugcugaaggggcucuacaacuucgcgaccugcggccuggucgggcuggugacguuccuccugcugugcggccgcuccugcaccaccagccucuacaaggggguguacgagcugcagacccuggagcucaacauggagacgcugaacaugaccaugccgcuguccugcaccaagaacaacagccaccacuacaucauggucggcaacgagaccggccucgagcugacgcugaccaacaccuccaucaucaaccacaaguucugcaaccucagcgacgcccacaagaagaaccuguacgaccacgcccugauguccaucaucagcaccuuccaccucuccauccccaacuucaaccaguacgaggccaugagcugcgacuucaacgggggcaagaucuccgugcaguacaaccugagccacuccuacgccggggacgcggccaaccacugcggcacgguggccaacgggguccugcagaccuucaugcggauggccuggggcggcagcuacaucgcgcucgacuccgggcgcggcaacugggacugcaucaugaccagcuaccaguaccugaucauccagaacaccacgugggaggaccacugccaguucucccggcccagccccaucggguaccugggccuccugucccagcgcacccgggacaucuacaucagccgccggcugcucggcaccuucaccuggacgcugagcgacuccgagggggaggacaccccgggcggguacugccugacccgcuggaugcucaucgaggccgagcugaagugcuucggcaacaccgccguggccaagugcaacgagaagcacgacgaggaguucugcgacaugcugcggcuguucgacuucaacaagcaggccauccagcgccugaaggcggaggcccagaugagcauccagcugaucaacaaggccgugaacgcccucaucaacgaccagcugaucaugaagaaccaccuccgggacaucauggggauccccuacugcaacuacuccaaguacugcuaccucaaccacacgaccaccggccgcaccagccugcccaagugcugccuggucuccaacggcagcuaccucaacgagacgcacuucuccgacgacaucgagcagcaggccgacaacaugaucaccgagaugcugcagaaggaguacauggagcggcaggggaagacgccccugggccugguggaccucuucguguucagcaccuccuucuaccugaucagcaucuuccugcaccucgucaagaucccgacccaccgccacaucguggggaaguccugccccaagccccaccggcugaaccacaugggcaucugcagcugcgggcuguacaagcagcccggcgugccggucaaguggaagcgcugaggacuagucccuguucccagagcccacuuuuuuuucuuuuuuugaaauaaaauagccugucuuucagaucucaaaggcucuuuucagagccaccaaaaaaaaaaaaaaaaaaaaaaaaaaaaaaaaaaaaaaaaaaaaaaaaaaaaaaaaaaaaaaaaaaaaaaaaaaaaaaaaaaaaaaaaaaaaaaaaaaaaa

SEQ ID NO: 38561 - RNA, 1748 nt, Artificial Sequence
  mRNA product Design a-1 (hSL-A100) comprising derived and/or modified sequence from LASV(LM765-SLE-2012;Clade IV)__AIT17814__GPCmut11 (opt1)
aggagagucccgcagucggcguccagcggcucugcuuguucgugugugugucguugcaggccuuauucaagcuuaccaugggccagaucgugaccuucuuccaggaggucccccacgugaucgaggaggugaugaacaucguccugaucgcccucagcauccuggccgugcugaaggggcucuacaacuucgcgaccugcggccugguggggcuggucacguuccuccugcugugcggccgcuccugcaccaccagccucuacaaggggguguacgagcugcagacccuggagcucaacauggagacgcugaacaugaccaugccgcuguccugcaccaagaacaacagccaccacuacaucauggugggcaacgagaccggccucgagcugacgcugaccaacaccuccaucaucgaccacaaguucugcaaccucagcgacgcccaccggaagaaccuguacgaccacgcccugauguccaucaucagcaccuuccaccucuccauccccaacuucaaccaguacgaggccaugagcugcgacuucaacgggggcaagaucuccguccaguacaaccugagccacuccuacgccaaggacgcggccgaccacugcgggacgguggccaacggcgugcugcagaccuucaugcgcauggccuggggcgggagcuacaucgcgcucgacuccggccgggggcgcugggacugcaucaugaccagcuaccaguaccugaucauccagaacaccacgugggaggaccacugccaguucucccggcccagccccaucggcuaccuggggcuccugucccagcgcacccgggacaucuacaucagccgccggcugcucggcaccuucaccuggacgcugagcgacuccgagggcaaggacacccccgggggcuacugccugacccgcuggaugcucaucgaggccgagcugaagugcuucgggaacaccgccgucgccaagugcaacgagaagcacgacgaggaguucugcgacaugcugcggcuguucgacuucaacaagcaggccauccagcgccugaaggcggaggcccagaugagcauccagcugaucaacaaggccgugaacgcccucaucaacgaccagcugaucaugaagaaccaccuccgggacaucaugggcauccccuacugcaacuacuccaaguacugcuaccucaaccacacgaccaccgggaagaccagccugcccaagugcugccugguguccaacggcagcuaccucaacgagacgcacuucuccgacgacaucgagcagcaggccgacaacaugaucaccgagaugcugcagaaggaguacauggagcgccagggcaagaccccgcuggggcuggucgaccucuucguguucagcaccuccuucuaccugaucagcaucuuccugcaccucgugaagaucccgacgcaccggcacaucgucggcaagcccugccccaagccccaccgccugaaccacauggggaucugcuccugcggccuguacaagcagccgggggugcccgugaaguggaagcggugaggacuagucccuguucccagagcccacuuuuuuuucuuuuuuugaaauaaaauagccugucuuucagaucucaaaggcucuuuucagagccaccaaaaaaaaaaaaaaaaaaaaaaaaaaaaaaaaaaaaaaaaaaaaaaaaaaaaaaaaaaaaaaaaaaaaaaaaaaaaaaaaaaaaaaaaaaaaaaaaaaaaa

SEQ ID NO: 38562 - RNA, 1748 nt, Artificial Sequence
  mRNA product Design a-1 (hSL-A100) comprising derived and/or modified sequence from LASV(LM776-SLE-2012;Clade IV)__AIT17824__GPCmut11 (opt1)
aggagagucccgcagucggcguccagcggcucugcuuguucgugugugugucguugcaggccuuauucaagcuuaccaugggccagaucgugaccuucuuccaggaggucccccacgugaucgaggaggugaugaacaucguccugaucgcccucagcauccuggccgugcugaaggggcucuacaacuucgcgaccugcggccugguggggcuggucacguuccuccugcugugcggccgcuccugcaccaccagcguguacaaggggguguacgagcuccagacccuggagcugaacauggagacgcucaacaugaccaugccgcuguccugcaccaagaacaacagccaccacuacaucauggucggcaacgagaccggccuggagcucacgcugaccaacaccuccaucaucaaccacaaguucugcaaccugagcgacgcccacaagaagaaccucuacgaccacgcccugauguccaucaucagcaccuuccaccuguccauccccaacuucaaccaguacgaggccaugagcugcgacuucaacgggggcaagaucuccgugcaguacaaccucagccacuccuacgccggggacgcggccaaccacugcggcacgguggccaacgggguccugcagaccuucaugcggauggccuggggcggcagcuacaucgcgcuggacuccgggcacggcaagugggacugcaucaugaccagcuaccaguaccucaucauccagaacaccacgugggaggaccacugccaguucucccgccccagccccaucggguaccugggccugcucucccagcggacccgcgacaucuacaucagccggcgccugcugggcaccuucaccuggacgcucagcgacuccgaggggaaggacaccccgggcggguacugccugacccgguggaugcugaucgaggccgagcucaagugcuucggcaacaccgccguggccaagugcaacgagaagcacgacgaggaguucugcgacaugcugcgccuguucgacuucaacaagcaggccauccagcggcucaaggcggaggcccagaugagcauccagcugaucaacaaggccgugaacgcccugaucaacgaccagcucaucaugaagaaccaccuccgcgacaucauggggauccccuacugcaacuacuccaaguacugcuaccugaaccacacgaccaccggcaagaccagccugcccaagugcugccuggucuccaacggcagcuaccugaacgagacgcacuucuccgacgacaucgagcagcaggccgacaacaugaucaccgagaugcuccagaaggaguacauggagcggcaggggaagacgccccugggccugguggaccuguucguguucagcaccuccuucuaccucaucagcaucuuccugcaccuggucaagaucccgacccaccgccacaucguggggaaguccugccccaagccccaccggcucaaccacaugggcaucugcagcugcgggcuguacaagcagcccggcgugccgguccgcuggaagcggugaggacuagucccuguucccagagcccacuuuuuuuucuuuuuuugaaauaaaauagccugucuuucagaucucaaaggcucuuuucagagccaccaaaaaaaaaaaaaaaaaaaaaaaaaaaaaaaaaaaaaaaaaaaaaaaaaaaaaaaaaaaaaaaaaaaaaaaaaaaaaaaaaaaaaaaaaaaaaaaaaaaaa

SEQ ID NO: 38563 - RNA, 1748 nt, Artificial Sequence
  mRNA product Design a-1 (hSL-A100) comprising derived and/or modified sequence from LASV(Mad39;Clade IV)__ANH09722__GPCmut11 (opt1)
aggagagucccgcagucggcguccagcggcucugcuuguucgugugugugucguugcaggccuuauucaagcuuaccaugggccagaucgugaccuucuuccaggaggucccccacgugaucgaggaggugaugaacaucguccugaucgcccucagcauccuggccgugcugaaggggcucuacaacguggcgaccugcggccugaucgggcuggucacguuccuccugcugugcggccgcuccugcaccaccacccucuacaaggggguguacgagcugcaggcccuggagcucaacauggagacgcugaacaugaccaugccgcugagcugcaccaagaacaacucccaccacuacauccgggugggcaacgagaccggccucgagcugacgcugaccaacaccagccucaucaaccacaaguucugcaaccuguccgacgcccacaagaagaaccuguacgaccacgcccucaugagcaucaucuccaccuuccaccugagcauccccaacuucaaccaguacgaggccauguccugcgacuucaacgacgggaagaucagcguccaguacaaccugucccacacguacgcgggcgacaccgccaaccacugcgggaccguggccaacggcgugcuccagaccuucaugcgcauggccuggggcgggagcuacaucgcgcuggacuccggccgcgggggcugggacugcaucaugacgagcuaccaguaccugaucauccagaacaccaccugggaggaccacugccaguucucccggcccagccccaucggguaccucggccugcugucccagcggacccgcgacaucuacaucagccggcgccuccugggcacguucaccuggacccuguccgacagcgaggggaaggacaccccgggcggguacugccucacgcgguggaugcugaucgaggccgagcugaagugcuucggcaacaccgccgucgccaagugcaacgagaagcacgacgaggaguucugcgacaugcuccgccuguucgacuucaacaagcaggccauccagcggcugaaggcggaggcccagaugagcauccagcucaucaacaaggccgugaacgcccugaucaacgaccagcugaucaugaagaaccaccuccgcgacaucauggggauccccuacugcaacuacuccaaguacugcuaccugaaccacaccgugaccggcaagacgagccugcccaagugcugccucgucuccaacggcagcuaccugaacgagacccacuucuccgacgacaucgagcagcaggccgacaacaugaucaccgagaugcugcagaaggaguacauggagcggcaggggaagacgccccugggccucguggaccuguucguguucagcaccuccuucuaccugaucagcaucuuccuccaccuggucaagaucccgacccaccgccacgugguggggaagcccugccccaagccccaccggcugaaccacaugggcaucugcuccugcggguucuacaagcagccgggcguccccgugcgcuggaagcggugaggacuagucccuguucccagagcccacuuuuuuuucuuuuuuugaaauaaaauagccugucuuucagaucucaaaggcucuuuucagagccaccaaaaaaaaaaaaaaaaaaaaaaaaaaaaaaaaaaaaaaaaaaaaaaaaaaaaaaaaaaaaaaaaaaaaaaaaaaaaaaaaaaaaaaaaaaaaaaaaaaaaa

SEQ ID NO: 38564 - RNA, 1748 nt, Artificial Sequence
  mRNA product Design a-1 (hSL-A100) comprising derived and/or modified sequence from LASV(Z0947-SLE-2011;Clade IV)__AIT17840__GPCmut11 (opt1)
aggagagucccgcagucggcguccagcggcucugcuuguucgugugugugucguugcaggccuuauucaagcuuaccaugggccagaucgugaccuucuuccaggaggucccccacgugaucgaggaggugaugaacaucguccugaucgcccucagcauccuggccgugcugaaggggcucuacaacuucgcgaccugcggccugguggggcuggucacguuccuccugcugugcggccgcuccugcaccaucagccucuacaaggggguguacgagcugcagacccuggagcucaacauggagacccugaacaugacgaugccgcuguccugcaccaagaacaacagccaccacuacaucauggugggcaacgagaccggccucgagcugacccugacgaacaccuccaucaucaaccacaaguucugcaaccucagcgacgcccacaagaagaaccuguacgaccacgcccugauguccaucaucagcaccuuccaccucuccauccccaacuucaaccaguacgaggccaugagcugcgacuucaacgggggcaagaucuccguccaguacaaccugagccacuccuacgccggggacgcggccaaccacugcggcaccguggccaacggggugcugcagacguucaugcggauggccuggggcggcagcuacaucgcgcucgacuccgggcgcgaccggugggacugcaucaugaccagcuaccaguaccugaucauccagaacaccaccugggaggaccacugccaguucucccgccccagccccaucggcuaccuggggcuccugucccagcggacgcgcgacaucuacaucagccggcgccugcucggcaccuucaccuggacccugagcgacuccgagggcaaggacacgcccgggggcuacugccugacccgguggaugcucaucgaggccgagcugaagugcuucgggaacaccgccgucgccaagugcaacgagaagcacgacgaggaguucugcgacaugcugcgccucuucgacuucaacaagcaggccauccagcggcugaaggcggaggcccagaugagcauccagcugaucaacaaggccgugaacgcccucaucaacgaccagcugaucaugaagaaccaccuccgcgacaucaugggcauccccuacugcaacuacuccaaguacugcuaccugaaccacaccacgaccgggaagaccagccugcccaagugcugccugguguccaacggcagcuaccucaacgagacccacuucuccgacgacaucgagcagcaggccgacaacaugaucacggagaugcugcagaaggaguacauggagcggcagggcaagaccccgcuggggcuggucgaccucuucguguucagcaccuccuucuaccugaucagcaucuuccugcaccucgugaagaucccgacccaccgccacaucgucggcaagcccugccccaagccccaccggcugaaccacauggggaucugcuccugcggccuguacaagcagccgggggugcccgugaaguggaagcgcugaggacuagucccuguucccagagcccacuuuuuuuucuuuuuuugaaauaaaauagccugucuuucagaucucaaaggcucuuuucagagccaccaaaaaaaaaaaaaaaaaaaaaaaaaaaaaaaaaaaaaaaaaaaaaaaaaaaaaaaaaaaaaaaaaaaaaaaaaaaaaaaaaaaaaaaaaaaaaaaaaaaaa

SEQ ID NO: 38565 - RNA, 1748 nt, Artificial Sequence
  mRNA product Design a-1 (hSL-A100) comprising derived and/or modified sequence from LASV(Josiah;Clade IV)__NP_694870__GPCmut11 (opt4)
aggagagucccgcagucggcguccagcggcucugcuuguucgugugugugucguugcaggccuuauucaagcuuaccaugggccagaucgugaccuucuuccaggaggugccccacgugaucgaggaggugaugaacaucgugcugaucgcccugagcgugcuggccgugcugaagggccuguacaacuucgccaccugcggccuggugggccuggugaccuuccugcugcugugcggcagaagcugcaccaccagccuguacaagggcguguacgagcugcagacccuggagcugaacauggagacccugaacaugaccaugccccugagcugcaccaagaacaacagccaccacuacaucauggugggcaacgagaccggccuggagcugacccugaccaacaccagcaucaucaaccacaaguucugcaaccugagcgacgcccacaagaagaaccuguacgaccacgcccugaugagcaucaucagcaccuuccaccugagcauccccaacuucaaccaguacgaggccaugagcugcgacuucaacggcggcaagaucagcgugcaguacaaccugagccacagcuacgccggcgacgccgccaaccacugcggcaccguggccaacggcgugcugcagaccuucaugagaauggccuggggcggcagcuacaucgcccuggacagcggcagaggcaacugggacugcaucaugaccagcuaccaguaccugaucauccagaacaccaccugggaggaccacugccaguucagcagacccagccccaucggcuaccugggccugcugagccagagaaccagagacaucuacaucagcagaagacugcugggcaccuucaccuggacccugagcgacagcgagggcaaggacacccccggcggcuacugccugaccagauggaugcugaucgaggccgagcugaagugcuucggcaacaccgccguggccaagugcaacgagaagcacgacgaggaguucugcgacaugcugagacuguucgacuucaacaagcaggccauccagagacugaaggccgaggcccagaugagcauccagcugaucaacaaggccgugaacgcccugaucaacgaccagcugaucaugaagaaccaccugagagacaucaugggcauccccuacugcaacuacagcaaguacugcuaccugaaccacaccaccaccggcagaaccagccugcccaagugcugccuggugagcaacggcagcuaccugaacgagacccacuucagcgacgacaucgagcagcaggccgacaacaugaucaccgagaugcugcagaaggaguacauggagagacagggcaagaccccccugggccugguggaccuguucguguucagcaccagcuucuaccugaucagcaucuuccugcaccuggugaagauccccacccacagacacaucgugggcaagagcugccccaagccccacagacugaaccacaugggcaucugcagcugcggccuguacaagcagcccggcgugcccgugaaguggaagagaugaggacuagucccuguucccagagcccacuuuuuuuucuuuuuuugaaauaaaauagccugucuuucagaucucaaaggcucuuuucagagccaccaaaaaaaaaaaaaaaaaaaaaaaaaaaaaaaaaaaaaaaaaaaaaaaaaaaaaaaaaaaaaaaaaaaaaaaaaaaaaaaaaaaaaaaaaaaaaaaaaaaaa

SEQ ID NO: 38566 - RNA, 1745 nt, Artificial Sequence
  mRNA product Design a-1 (hSL-A100) comprising derived and/or modified sequence from LASV(LP;Clade I)__AAF86701__GPCmut11 (opt4)
aggagagucccgcagucggcguccagcggcucugcuuguucgugugugugucguugcaggccuuauucaagcuuaccaugggccagaucaucaccuucuuccaggaggugccccacgugaucgaggaggugaugaacaucgugcugaucgcccugagccugcuggccauccugaagggccuguacaacaucgccaccugcggcaucaucggccugguggccuuccuguuccugugcggcaagagcugcagccugacccugaagggcggcuacgagcugcagacccuggagcugaacauggagacccugaacaugaccaugccccugagcugcaccaagaacagcagccaccacuacaucagagugggcaacgagaccggccuggagcugacccugaccaacaccagcaucaucaaccacaaguucugcaaccugagcgacgcccacaagaagaaccuguacgaccacgcccugaugagcaucaucagcaccuuccaccugagcauccccaacuucaaccaguacgaggccaugagcugcgacuucaacggcggcaagaucagcgugcaguacaaccugagccacagcuacgccggcgacgccgccgagcacugcggcaccguggccaacggcgugcugcagaccuucaugagaauggccuggggcggcagauacaucgcccuggacagcggcaagggcaacugggacugcaucaugaccagcuaccaguaccugaucauccagaacaccaccugggaggaccacugccaguucagcagacccagccccaucggcuaccugggccugcugagccagagaaccagagacaucuacaucagcagaagacugcugggcaccuucaccuggacccugagcgacagcgagggcaacgagacccccggcggcuacugccugaccagauggaugcugaucgaggccgagcugaagugcuucggcaacaccgccguggccaagugcaacgagaagcacgacgaggaguucugcgacaugcugagacuguucgacuucaacaagcaggccaucagaagacugaaggccgaggcccagaugagcauccagcugaucaacaaggccgugaacgcccugaucaacgaccagcugaucaugaagaaccaccugagagacaucaugggcauccccuacugcaacuacagcaaguacugcuaccugaaccacaccagcagcggcagaaccagccugcccaagugcugccugaucagcaacggcagcuaccugaacgagacccaguucagcgacgacaucgagcagcaggccgacaacaugaucaccgagaugcugcagaaggaguacaucgagagacagggcaagaccccccugggccugguggacaucuucaucuucagcaccagcuucuaccugaucagcaucuuccugcaccugaucaagauccccacccacagacacaucgugggcaagcccugccccaagccccacagacugaaccacaugggcgugugcagcugcggccuguacaagcaccccggcgugcccaccaaguggaagagaugaggacuagucccuguucccagagcccacuuuuuuuucuuuuuuugaaauaaaauagccugucuuucagaucucaaaggcucuuuucagagccaccaaaaaaaaaaaaaaaaaaaaaaaaaaaaaaaaaaaaaaaaaaaaaaaaaaaaaaaaaaaaaaaaaaaaaaaaaaaaaaaaaaaaaaaaaaaaaaaaaaaaa

SEQ ID NO: 38567 - RNA, 1745 nt, Artificial Sequence
  mRNA product Design a-1 (hSL-A100) comprising derived and/or modified sequence from LASV(803213;Clade II)__AAF86703__GPCmut11 (opt4)
aggagagucccgcagucggcguccagcggcucugcuuguucgugugugugucguugcaggccuuauucaagcuuaccaugggccagaucaucaccuucuuccaggaggugccccacgugaucgaggaggugaugaacaucgugcugaucgcccugagccugcuggccauccugaagggcaucuacaacguggccaccugcggccuguucggccugaucagcuuccugcugcugugcggcagaagcugcagcgugaccuacaagggcguguacgagcugcagacccuggagcugaacauggccaaccugaacaugaccaugccccugagcugcaccaagaacaacagccaccacuacaucauggugggcaacgagaccggccuggagcugacccugaccaacaccagcaucaucaaccacaaguucugcaaccugagcgacgcccacaagaagaaccuguacgaccacgcccugaugagcaucaucagcaccuuccaccugagcauccccaacuucaaccaguacgaggccaugagcugcgacuucaacggcggcaagaucagcgugcaguacaaccugagccacagcuucgccguggacgccgccaaccacugcggcaccaucgccaacggcgugcugcagaccuucaugagaauggccuggggcggcagcuacaucgcccuggacagcggcaagggcaacugggacugcaucaugaccagcuaccaguaccugaucauccagaacaccaccugggaggaccacugccaguucagcagacccagccccaucggcuaccugggccugcugagccagagaaccagagacaucuacaucagcagaagacugcugggcaccuucaccuggacccugagcgacagcgagggcaacgaggcccccggcggcuacugccugaccagauggaugcugaucgaggccgagcugaagugcuucggcaacaccgccguggccaagugcaacgagaagcacgacgaggaguucugcgacaugcugagacuguucgacuucaacaagcaggccaucaagagacugaagaccgaggcccagaugagcauccagcugaucaacaaggccgugaacgcccugaucaacgaccagcugaucaugaagaaccaccugagagacaucaugggcauccccuacugcaacuacagcagauacugcuaccugaaccacaccgugaccggcaagaccagccugcccagaugcugccuggugagcaacggcagcuaccugaacgagacccacuucagcgacgacaucgagcagcaggccgacaacaugaucaccgagaugcugcagaaggaguacauggacagacagggcaagaccccccugggccugguggaccuguucguguucagcaccagcuucuaccugaucagcaucuuccugcaccuggugaagauccccacccacagacacaucgugggcaagcccugccccaagccccacagacugaaccacaugggcaucugcagcugcggccuguacaagcaccccggcgugcccgugaaguggaagagaugaggacuagucccuguucccagagcccacuuuuuuuucuuuuuuugaaauaaaauagccugucuuucagaucucaaaggcucuuuucagagccaccaaaaaaaaaaaaaaaaaaaaaaaaaaaaaaaaaaaaaaaaaaaaaaaaaaaaaaaaaaaaaaaaaaaaaaaaaaaaaaaaaaaaaaaaaaaaaaaaaaaaa

SEQ ID NO: 38568 - RNA, 1745 nt, Artificial Sequence
  mRNA product Design a-1 (hSL-A100) comprising derived and/or modified sequence from LASV(GA391;Clade III)__CAA36645__GPCmut11 (opt4)
aggagagucccgcagucggcguccagcggcucugcuuguucgugugugugucguugcaggccuuauucaagcuuaccaugggccagaucgugaccuucuuccaggaggugccccacgugaucgaggaggugaugaacaucgugcugaucgcccugagcauccuggccauccugaagggccuguacaacguggccaccugcggccugaucggccuggugaccuuccugcugcugagcggcagaagcugcagccugaucuacaagggcaccuacgagcugcagacccuggagcugaacauggagacccugaacaugaccaugccccugagcugcaccaagaacaacagccaccacuacaucagagugggcaacgagaccggccuggagcugacccugaccaacaccagcauccugaaccacaaguucugcaaccugagcgacgcccacaagagaaaccuguacgaccacagccugaugagcaucaucagcaccuuccaccugagcauccccaacuucaaccaguacgaggccaugagcugcgacuucaacggcggcaagaucaccgugcaguacaaccugagccacagcuucgccguggacgccgccggccacugcggcacccuggccaacggcgugcugcagaccuucaugagaauggccuggggcggcagcuacaucgcccuggacagcggcagaggcaacugggacugcaucaugaccagcuaccaguaccugaucauccagaacaccaccugggacgaccacugccaguucagcagacccagccccaucggcuaccugggccugcugagccagagaaccagagacaucuacaucagcagaagacugcugggcaccuucaccuggacccugagcgacagcgagggcaacgagacccccggcggcuacugccugaccagauggaugcugaucgaggccgagcugaagugcuucggcaacaccgccguggccaagugcaacgagaagcacgacgaggaguucugcgacaugcugagacuguucgacuucaacaagcaggccaucagaagacugaagaccgaggcccagaugagcauccagcugaucaacaaggccgugaacgcccugaucaacgaccagcugaucaugaagaaccaccugagagacaucaugggcauccccuacugcaacuacagcagauacugcuaccugaaccacaccagcaccggcaagaccagccugcccagaugcugccugaucagcaacggcagcuaccugaacgagaccaaguucagcgacgacaucgagcagcaggccgacaacaugaucaccgagaugcugcagaaggaguacaucgacagacagggcaagaccccccugggccugguggaccuguucguguucagcaccagcuucuaccugaucagcaucuuccugcaccuggugaagauccccacccacagacacaucgugggcaagcccugccccaagccccacagacugaaccacaugggcaucugcagcugcggccuguacaagcagcccggcgugcccgugagauggaagagaugaggacuagucccuguucccagagcccacuuuuuuuucuuuuuuugaaauaaaauagccugucuuucagaucucaaaggcucuuuucagagccaccaaaaaaaaaaaaaaaaaaaaaaaaaaaaaaaaaaaaaaaaaaaaaaaaaaaaaaaaaaaaaaaaaaaaaaaaaaaaaaaaaaaaaaaaaaaaaaaaaaaaa

SEQ ID NO: 38569 - RNA, 1748 nt, Artificial Sequence
  mRNA product Design a-1 (hSL-A100) comprising derived and/or modified sequence from LASV(AV;Clade V)__CCA30314__GPCmut11 (opt4)
aggagagucccgcagucggcguccagcggcucugcuuguucgugugugugucguugcaggccuuauucaagcuuaccaugggccagaucgugaccuucuuccaggaggugccccacgugaucgaggaggugaugaacaucgugcugaucgcccugagcauccuggccgugcugaagggccuguacaacaucgccaccugcggccugaucggccugaucaccuuccugcugcugugcggcagaagcugcagcagcaaccuguacaagggcguguacgagcugcagagccuggaccugaacauggagacccugaacaugaccaugccccugagcugcaccaagaacaacagccaccacuacaucagagugggcaacgacaccggccuggagcugacccugaccaacaccagcauccugaaccacaaguucugcaaccugagcgacgcccacaagaaggaccuguacgaccacgcccugaugagcaucaucagcaccuuccaccugagcauccccaacuucaaccaguacgaggccaugagcugcgacuucaacggcggcaagaucagcgugcaguacaaccugagccacagcuacgccaucgacgccgccaaccacugcggcaccguggccaacggcauccugcagaccuucaugagaauggccuggggcggcagcuacaucgcccuggacagcggcagaggcaacugggacugcaucaugaccagcuaccaguaccugaucauccagaacaccaccugggagaaccacugccaguucagcagacccagccccaucggcuaccugggccugcugagccagagaaccagagacaucuacaucagcagaagacugcugggcaccuucaccuggacccugagcgacagcgagggcaacgccacccccggcggcuacugccugaccagauggaugcugaucgaggccgagcugaagugcuucggcaacaccgccguggccaagugcaacgagaagcacgacgaggaguucugcgacaugcugagacuguucgacuucaacaagcaggccaucagcagacugaagagcgaggcccagaugagcauccagcugaucaacaaggccgugaacgcccugaucaacgaccagcugaucaugaagaaccaccugagagacaucaugggcauccccuacugcaacuacagcaaguacugcuaccugaaccacaccaucaccggcaagaccagccugcccaagugcugccuggugagcaacggcagcuaccugaacgagacccacuucagcgacgacaucgagcagcaggccgacaacaugaucaccgagaugcugcagaaggaguacauggagagacagggcaagaccccccugggccugguggaccuguucguguucagcaccagcuucuaccugaucagcaucuuccugagacuggugaagauccccacccacagacacaucgugggcaagcccugccccaagccccacagacugaaccacaugggcaucugcagcugcggccuguacaagcagcccggcgugcccgugagauggaagagaugaggacuagucccuguucccagagcccacuuuuuuuucuuuuuuugaaauaaaauagccugucuuucagaucucaaaggcucuuuucagagccaccaaaaaaaaaaaaaaaaaaaaaaaaaaaaaaaaaaaaaaaaaaaaaaaaaaaaaaaaaaaaaaaaaaaaaaaaaaaaaaaaaaaaaaaaaaaaaaaaaaaaa

SEQ ID NO: 38570 - RNA, 1745 nt, Artificial Sequence
  mRNA product Design a-1 (hSL-A100) comprising derived and/or modified sequence from LASV(Togo/2016/7082;Clade VI)__AMR44577__GPCmut11 (opt4)
aggagagucccgcagucggcguccagcggcucugcuuguucgugugugugucguugcaggccuuauucaagcuuaccaugggccagaucaucaccuucuuccaggaggugccccacgugaucgaggaggugaugaacaucgugcugaucgcccugagccugcuggccauccugaagggcguguacaacguggccaccugcggcaucaucggccuggugaccuuccuguuccugugcggcagaagcugcagccugaucuacaagggcagcuacgagcugcagacccuggagcugaacauggagacccugaacaugaccaugccccugagcugcaccaagaacagcagccaccacuacaucagagugggcaacgagaccggccuggagcugacccugaccaacaccagcaucaucaaccacaaguucugcaaccugagcgacgcccacaagagaaaccuguacgaccacgcccugaugagcauccugagcaccuuccaccugagcauccccaacuucaaccaguacgaggccaugagcugcgacuucaacggcggcaagaucagcgugcaguacaaccugagccacgccuacgccguggacgccgccgagcacugcggcaccguggccaacggcgugcugcagaccuucaugagaauggccuggggcggcagcuacaucgcccuggacagcggcagaggcaacugggacugcaucaugaccagcuaccaguaccugaucauccagaacaccaccugggaggaccacugccaguucagcagacccagccccaucggcuaccugggccugcugagccagagaaccagagacaucuacaucagcagaagacugcugggcaccuucaccuggacccugagcgacagcgagggcaacgagacccccggcggcuacugccugaccagauggaugcugaucgaggccgagcugaagugcuucggcaacaccgccguggccaagugcaacgagaagcacgacgaggaguucugcgacaugcugagacuguucgacuucaacaagcaggccauccagagacugaagagcgaggcccagaugagcauccagcugaucaacaaggccgugaacgcccugaucaacgaccagcugaucaugaagaaccaccugagagacaugaugggcauccccuacugcaacuacagcaaguacugcuaccugaaccacaccagcagcggcagaaccagccugcccaagugcugccuggugagcaacggcagcuaccugaacgagacccacuucagcgacgacaucgagcagcaggccgacaacaugaucaccgagaugcugcagaaggaguacaucgacagacagggcaagaccccccugggccugguggaccuguucguguucagcaccagcuucuaccugaucagcaucuuccugcaccugaucaagauccccacccacagacacaucgugggcaagcccugccccaagccccacagacugaaccacaugggcaucugcagcugcggccuguacaagcagcccggcgugcccaccagauggaagagaugaggacuagucccuguucccagagcccacuuuuuuuucuuuuuuugaaauaaaauagccugucuuucagaucucaaaggcucuuuucagagccaccaaaaaaaaaaaaaaaaaaaaaaaaaaaaaaaaaaaaaaaaaaaaaaaaaaaaaaaaaaaaaaaaaaaaaaaaaaaaaaaaaaaaaaaaaaaaaaaaaaaaa

SEQ ID NO: 38571 - RNA, 1745 nt, Artificial Sequence
  mRNA product Design a-1 (hSL-A100) comprising derived and/or modified sequence from LASV(KAK-428;Clade n.d. (VII))__ANH09740__GPCmut11 (opt4)
aggagagucccgcagucggcguccagcggcucugcuuguucgugugugugucguugcaggccuuauucaagcuuaccaugggccagaucgugaccuucuuccaggaggugccccacgugaucgaggaggugaugaacaucgugcugaucgcccugagccugcuggccauccugaagggccuguacaacuucgccaccugcggcgugaucggccugaucaccuuccugcugcugugcggcagaagcugcagcgccaccuacaagggccaguacgagcugcagacccuggagcugaacauggagagccugaacaugaccaugccccugagcugcaccaagaacaacagccaccacuacaucagagccggcaacaacaccggccuggagcugacccugaccaacaccagcaucaucagccacaaguucugcaaccugagcgacgcccacaagaagaaccuguacgaccacacccugaugagcaucaucaccaccuuccaccugagcauccccaacuucaaccaguacgaggccaugagcugcgacuucaacggcggcaagaucagcauccaguacaaccugagccacagcuacgccggcgacgccgcccagcacugcggcaccguggccaacggcgugcugcagaccuucaugagaauggccuggggcggcagcuaccuggcccuggacagcggcagaagaggcugggacugcaucaucagcagcuaccaguaccugaucauccagaacaccaccugggacgaccacugccaguucagcagacccagccccaucggcuaccugggcuucgugagccagaagaccagagacaucuacaucagcagaagacugcugggcaccuucaccuggacccugagcgacagcgagggccacgacaugcccggcggcuacugccugaccagauggaugcugaucgaggccgaccugaagugcuucggcaacaccgccguggccaagugcaacgagaagcacgacgaggaguucugcgacauguggagacuguucgacuucaacaagcaggccauccagagacugaaggccgaggcccagaugaacauccagcugaucaacaaggccgugaacgcccugaucaacgaccagcugaugaugaagaaccaccugagagacaucaugggcauccccuacugcaacuacagcaaguucugcuaccugaacaacaccaccaccggcagaaccagccugcccagaugcugccugaucagcaacggcagcuaccugaacgagacccacuucagcgacgacaucgagcagcaggccgacaacaugaucaccgagaugcugcagaaggaguacauggacagacagggcaagaccccccugggccugguggaccuguucguguucagcaccagcuucuaccugaucaccaucuuccugcaccuggugaagauccccacccacagacacaucgugggcaagcccugccccaagccccacagacugaaccacaugggcaucugcagcugcggccuguacaagcagcccggcgugcccgugagauggaagagaugaggacuagucccuguucccagagcccacuuuuuuuucuuuuuuugaaauaaaauagccugucuuucagaucucaaaggcucuuuucagagccaccaaaaaaaaaaaaaaaaaaaaaaaaaaaaaaaaaaaaaaaaaaaaaaaaaaaaaaaaaaaaaaaaaaaaaaaaaaaaaaaaaaaaaaaaaaaaaaaaaaaaa

SEQ ID NO: 38572 - RNA, 1745 nt, Artificial Sequence; identical to SEQ ID NO: 38566
  mRNA product Design a-1 (hSL-A100) comprising derived and/or modified sequence from LASV(Pinneo-NIG-1969;Clade I)__AIT17836__GPCmut11 (opt4)

SEQ ID NO: 38573 - RNA, 1745 nt, Artificial Sequence
  mRNA product Design a-1 (hSL-A100) comprising derived and/or modified sequence from LASV(ISTH0009-NIG-2011;Clade II)__AIT17404__GPCmut11 (opt4)
aggagagucccgcagucggcguccagcggcucugcuuguucgugugugugucguugcaggccuuauucaagcuuaccaugggccagaucaucaccuucuuccaggaggugccccacgugaucgaggaggugaugaacaucgugcugaucgcccugagccugcuggccauccugaagggcaucuacaacguggccaccugcggccuguucggccuggugagcuuccugcugcugugcggcagaagcugcagcaccaccuacaagggcguguacgagcugcagacccuggagcuggacauggccagccugaacaugaccaugccccugagcugcaccaagaacaacagccaccacuacaucauggugggcaacgagaccggccuggagcugacccugaccaacaccagcaucaucaaccacaaguucugcaaccugagcgacgcccacaagaagaaccuguacgaccacgcccugaugagcaucaucagcaccuuccaccugagcauccccaacuucaaccaguacgaggccaugagcugcgacuucaacggcggcaagaucagcgugcaguacaaccugagccacgccuacgccguggacgccgccaaccacugcggcaccaucgccaacggcgugcugcagaccuucaugagaauggccuggggcggcagcuacaucgcccuggacagcggcaagggcagcugggacugcaucaugaccagcuaccaguaccugaucauccagaacaccaccugggaggaccacugccaguucagcagacccagccccaucggcuaccugggccugcugagccagagaaccagagacaucuacaucagcagaagacugcugggcaccuucaccuggacccugagcgacagcgagggcaacgagacccccggcggcuacugccugaccagauggaugcugaucgaggccgagcugaagugcuucggcaacaccgccguggccaagugcaacgagaagcacgacgaggaguucugcgacaugcugagacuguucgacuucaacaagcaggccaucagaagacugaagaccgaggcccagaugagcauccagcugaucaacaaggccgugaacgcccugaucaacgaccagcugaucaugaagaaccaccugagagacaucaugggcauccccuacugcaacuacagcaaguacugcuaccugaaccacaccgugaccggcaagaccagccugcccagaugcugccuggugagcaacggcagcuaccugaacgagacccacuucagcgacgacaucgagcagcaggccgacaacaugaucaccgagcugcugcagaaggaguacauggacagacagggcaagaccccccugggccugguggaccuguucguguucagcaccagcuucuaccugaucagcaucuuccugcaccugaucaagauccccacccacagacacaucaccggcaagcccugccccaagccccacagacugaaccacaugggcaucugcagcugcggccuguacaagcaccccggcgugcccgugaaguggaagagaugaggacuagucccuguucccagagcccacuuuuuuuucuuuuuuugaaauaaaauagccugucuuucagaucucaaaggcucuuuucagagccaccaaaaaaaaaaaaaaaaaaaaaaaaaaaaaaaaaaaaaaaaaaaaaaaaaaaaaaaaaaaaaaaaaaaaaaaaaaaaaaaaaaaaaaaaaaaaaaaaaaaaa

SEQ ID NO: 38574 - RNA, 1745 nt, Artificial Sequence
  mRNA product Design a-1 (hSL-A100) comprising derived and/or modified sequence from LASV(ISTH2010-NIG-2012;Clade II)__AIT17482__GPCmut11 (opt4)
aggagagucccgcagucggcguccagcggcucugcuuguucgugugugugucguugcaggccuuauucaagcuuaccaugggccagaucaucaccuucuuccaggaggugccccacgugaucgaggaggugaugaacaucgugcugaucgcccugagccugcuggccauccugaagggcaucuacaacguggccaccugcggccuguucggccuggugagcuuccugcugcugugcggcagaagcugcagcaccaccuacaagggcguguacgagcugcagacccuggagcuggacauggccagccugaacaugaccaugccccugagcugcaccaagaacaacagccaccacuacaucauggugggcaacgagaccggccuggagcugacccugaccaacaccagcaucaucaaccacaaguucugcaaccugagcgacgcccacaagaagaaccuguacgaccacgcccugaugagcaucaucagcaccuuccaccugagcauccccaacuucaaccaguacgaggccaugagcugcgacuucaacggcggcaagaucagcgugcaguacaaccugagccacgccuacgccguggacgccgccaaccacugcggcaccaucgccaacggcgugcugcagaccuucaugagaauggccuggggcggcagcuacaucgcccuggacagcggcaagggcagcugggacugcaucaugaccagcuaccaguaccugaucauccagaacaucaccugggaggaccacugccaguucagcagacccagccccaucggcuaccugggccugcugagccagagaaccagagacaucuacaucagcagaagacugcugggcaccuucaccuggacccugagcgacagcgagggcaacgagacccccggcggcuacugccugaccagauggaugcugaucgaggccgagcugaagugcuucggcaacaccgccguggccaagugcaacgagaagcacgacgaggaguucugcgacaugcugagacuguucgacuucaacaagcaggccaucagaagacugaagaccgaggcccagaugagcauccagcugaucaacaaggccgugaacgcccugaucaacgaccagcugaucaugaagaaccaccugagagacaucaugggcauccccuacugcaacuacagcaaguacugcuaccugaaccacaccgugaccggcaagaccagccugcccagaugcugccuggugagcaacggcagcuaccugaacgagacccacuucagcgacgacaucgagcagcaggccgacaacaugaucaccgagcugcugcagaaggaguacaucgacagacagggcaagaccccccugggccugguggaccuguucguguucagcaccagcuucuaccugaucagcaucuuccugcaccuggugaagauccccacccacagacacguggugggcaagcccugccccaagccccacagacugaaccacaugggcaucugcagcugcggccuguacaagcaccccggcgugcccgugaaguggaagagaugaggacuagucccuguucccagagcccacuuuuuuuucuuuuuuugaaauaaaauagccugucuuucagaucucaaaggcucuuuucagagccaccaaaaaaaaaaaaaaaaaaaaaaaaaaaaaaaaaaaaaaaaaaaaaaaaaaaaaaaaaaaaaaaaaaaaaaaaaaaaaaaaaaaaaaaaaaaaaaaaaaaaa

SEQ ID NO: 38575 - RNA, 1745 nt, Artificial Sequence
  mRNA product Design a-1 (hSL-A100) comprising derived and/or modified sequence from LASV(Lassa virus/H.sapiens-wt/NGA/2015/ISTH_0543;Clade II)__AVO03639__GPCmut11 (opt4)
aggagagucccgcagucggcguccagcggcucugcuuguucgugugugugucguugcaggccuuauucaagcuuaccaugggccagaucaucaccuucuuccaggaggugccccacgugaucgaggaggugaugaacaucgugcugaucgcccugagccugcuggccauccugaagggcaucuacaacguggccaccugcggccuguucggccuggugagcuuccugcugcugugcggcagaagcugcagcaccaccuacaagggcguguacgagcugcagacccuggagcuggacauggccaaccugaacaugaccaugccccugagcugcaccaagaacaacagccaccacuacaucauggugggcaacgagaccggccuggagcugacccugaccaacaccagcaucaucaaccacaaguucugcaaccugagcgacgcccacaagaagaaccuguacgaccacgcccugaugagcaucaucagcaccuuccaccugagcauccccaacuucaaccaguacgaggccaugagcugcgacuucaacggcggcaagaucagcgugcaguacaaccugagccacaccuacgccguggacgccgccaaccacugcggcaccaucgccaacggcgugcugcagaccuucaugagaauggccuggggcggcagcuacaucgcccuggacagcggcaagggcagcugggacugcaucaugaccagcuaccaguaccuggugauccagaacaccaccugggaggaccacugccaguucagcagacccagccccaucggcuaccugggccugcugagccagagaaccagagacaucuacaucagcagaagacugcugggcaccuucaccuggacccugagcgacagcgagggcaacgagacccccggcggcuacugccugaccagauggaugcugaucgaggccgagcugaagugcuucggcaacaccgccguggccaagugcaacgagaagcacgacgaggaguucugcgacaugcugagacuguucgacuucaacaagcaggccaucagaagacugaagaccgaggcccagaugagcauccagcugaucaacaaggccgugaacgcccugaucaacgaccagcugaucaugaagaaccaccugagagacaucaugggcauccccuacugcaacuacagcaaguacugcuaccugaaccacaccgugaccggcaagaccagccugcccagaugcugccuggugagcaacggcagcuaccugaacgagacccacuucagcgacgacaucgagcagcaggccgacaacaugaucaccgagcugcugcagaaggaguacaucgacagacagggcaagaccccccugggccugguggaccuguucguguucagcaccagcuucuaccugaucagcaucuuccugcaccuggugaagauccccacccacagacacaucaccggcaagcccugccccaagccccacagacugaaccacaugggcaucugcagcugcggccuguacaagcaccccggcgugcccgugaaguggaagagaugaggacuagucccuguucccagagcccacuuuuuuuucuuuuuuugaaauaaaauagccugucuuucagaucucaaaggcucuuuucagagccaccaaaaaaaaaaaaaaaaaaaaaaaaaaaaaaaaaaaaaaaaaaaaaaaaaaaaaaaaaaaaaaaaaaaaaaaaaaaaaaaaaaaaaaaaaaaaaaaaaaaaa

SEQ ID NO: 38576 - RNA, 1745 nt, Artificial Sequence
  mRNA product Design a-1 (hSL-A100) comprising derived and/or modified sequence from LASV(Lassa virus/H.sapiens-wt/NGA/2016/ISTH_0009;Clade II)__AVO03571__GPCmut11 (opt4)
aggagagucccgcagucggcguccagcggcucugcuuguucgugugugugucguugcaggccuuauucaagcuuaccaugggccagaucaucaccuucuuccaggaggugccccacgugaucgaggaggugaugaacaucgugcugaucgcccugagccugcuggccauccugaagggcaucuacaacguggccaccugcggccugcugggccuggugagcuuccugcugcugugcggcagaagcugcagcaccaccuacaagggcguguacgagcugcagacccuggagcuggacauggccagccugaacaugaccaugccccugagcugcaccaagaacaacagccaccacuacaucauggugggcaacgagaccggccuggagcugacccugaccaacaccagcaucaucaaccacaaguucugcaaccugagcgacgcccacaagaagaaccuguacgaccacgcccugaugagcaucaucagcaccuuccaccugagcauccccaacuucaaccaguacgaggccaugagcugcgacuucaacggcggcagaaucagcgugcaguacaaccugagccacagcuacgccguggacgccgccaaccacugcggcaccaucgccaacggcgugcugcagaccuucaugagaauggccuggggcggcagcuacaucgcccuggacagcggcaagggcagcugggacugcaucaugaccagcuaccaguaccugaucauccagaacaccaccugggaggaccacugccaguucagcagacccagccccaucggcuaccugggccugcugagccagagaaccagagacaucuacaucagcagaagacugcugggcaccuucaccuggacccugagcgacagcgagggcaacgagacccccggcggcuacugccugaccagauggaugcugaucgaggccgagcugaagugcuucggcaacaccgccguggccaagugcaacgagaagcacgacgaggaguucugcgacaugcugagacuguucgacuucaacaagcaggccaucagaagacugaagaccgaggcccagaugagcauccagcugaucaacaaggccgugaacgcccugaucaacgaccagcugaucaugaagaaccaccugagagacaucaugggcauccccuacugcaacuacagcaaguacugcuaccugaaccacaccgugaccggcaagaccagccugcccagaugcugccuggugagcaacggcagcuaccugaacgagacccacuucagcgacgacaucgagcagcaggccgacaacaugaucaccgagcugcugcagaaggaguacaucgacagacagggcaagaccccccugggccugguggaccuguucguguucagcaccagcuucuaccugaucagcaucuuccugcaccuggugaagauccccacccacagacacaucaccggcaagcccugccccaagccccacagacugaaccacaugggcaucugcagcugcggccuguacaaccaccccggcgugcccgugaaguggaagagaugaggacuagucccuguucccagagcccacuuuuuuuucuuuuuuugaaauaaaauagccugucuuucagaucucaaaggcucuuuucagagccaccaaaaaaaaaaaaaaaaaaaaaaaaaaaaaaaaaaaaaaaaaaaaaaaaaaaaaaaaaaaaaaaaaaaaaaaaaaaaaaaaaaaaaaaaaaaaaaaaaaaaa

SEQ ID NO: 38577 - RNA, 1745 nt, Artificial Sequence
  mRNA product Design a-1 (hSL-A100) comprising derived and/or modified sequence from LASV(Lassa virus/H.sapiens-wt/NGA/2016/ISTH_0017;Clade II)__AVO03567__GPCmut11 (opt4)
aggagagucccgcagucggcguccagcggcucugcuuguucgugugugugucguugcaggccuuauucaagcuuaccaugggccagaucaucaccuucuuccaggaggugccccacgugaucgaggaggugaugaacaucgugcugaucgcccugagccugcuggccauccugaagggcaucuacaacguggccaccugcggccuguucggccuggugagcuuccugcugcugugcggcagaagcugcagcaccaccuacaagggcguguacgagcugcagacccuggagcuggacauggccagccugaacaugaccaugccccugagcugcaccaagaacaacagccaccacuacaucauggugggcaacgagaccggccuggagcugacccugaccaacaccagcaucaucaaccacaaguucugcaaccugagcgacgcccacaagaagaaccuguacgaccacgcccugaugagcaucaucagcaccuuccaccugagcauccccaacuucaaccaguacgaggccaugagcugcgacuucaacggcggcaagaucagcgugcaguacaaccugagccacaccuacgccaucgacgccgccaaccacugcggcaccaucgccaacggcgugcugcagaccuucaugagaauggccuggggcggcagcuacaucgcccuggacagcggcaagggcagcugggacugcaucaugaccagcuaccaguaccugaucauccagaacaccaccugggaggaccacugccaguucagcagacccagccccaucggcuaccugggccugcugagccagagaaccagagacaucuacaucagcagaagacugcugggcaccuucaccuggacccugagcgacagcgagggcaacgagacccccggcggcuacugccugaccagauggaugcugaucgaggccgagcugaagugcuucggcaacaccgccguggccaagugcaacgagaagcacgacgaggaguucugcgacaugcugagacuguucgacuucaacaagcaggccaucagaagacugaagaccgaggcccagaugagcauccagcugaucaacaaggccgugaacgcccugaucaacgaccagcugaucaugaagaaccaccugagagacaucaugggcauccccuacugcaacuacagcaaguacugcuaccugaaccacaccgugaccggcaagaccagccugcccagaugcugccuggugagcaacggcagcuaccugaacgagacccacuucagcgacgacaucgagcagcaggccgacaacaugaucaccgagcugcugcagaaggaguacauggacagacagggcaagaccccccugggccugguggaccuguucguguucagcaccagcuucuaccugaucagcaucuuccugcaccuggugagaauccccacccacagacacgugaucggcaagcccugccccaagccccacagacugaaccacaugggcaucugcagcugcggccuguacaagcaccccggcgugcccgugaaguggaagagaugaggacuagucccuguucccagagcccacuuuuuuuucuuuuuuugaaauaaaauagccugucuuucagaucucaaaggcucuuuucagagccaccaaaaaaaaaaaaaaaaaaaaaaaaaaaaaaaaaaaaaaaaaaaaaaaaaaaaaaaaaaaaaaaaaaaaaaaaaaaaaaaaaaaaaaaaaaaaaaaaaaaaa

SEQ ID NO: 38578 - RNA, 1745 nt, Artificial Sequence
  mRNA product Design a-1 (hSL-A100) comprising derived and/or modified sequence from LASV(Lassa virus/H.sapiens-wt/NGA/2018/ISTH_0959;Clade II)__AVV65099__GPCmut11 (opt4)
aggagagucccgcagucggcguccagcggcucugcuuguucgugugugugucguugcaggccuuauucaagcuuaccaugggccagaucaucaccuucuuccaggaggugccccacgugaucgaggaggugaugaacaucgugcugaucgcccugagccugcuggccauccugaagggcaucuacaacguggugaccugcggccuguucggccuggugagcuuccugcugcugugcggcagaagcugcagcaccaccuacaagggcguguacgagcugcagacccuggagcuggacauggccagccugaacaugaccaugccccugagcugcaccaagaacaacagccaccacuacaucauggugggcaacgagaccggccuggagcugacccugaccaacaccagcaucaucaaccacaaguucugcaaccugagcgacgcccacaagaagaaccuguacgaccacgcccugaugagcaucaucagcaccuuccaccugagcauccccaacuucaaccaguacgaggccaugagcugcgacuucaacggcggcaagaucagcgugcaguacaaccugagccacgccuacgccaucgacgccgccaaccacugcggcaccaucgccaacggcgugcugcagaccuucaugagaauggccuggggcggcagcuacaucgcccuggacagcggcaagggcagcugggacugcaucaugaccagcuaccaguaccugaucauccagaacaccaccugggaggaccacugccaguucagcagacccagccccaucggcuaccugggccugcugagccagagaaccagagacaucuacaucagcagaagacugcugggcaccuucaccuggacccugagcgacagcgagggcaacgagacccccggcggcuacugccugaccagauggaugcugaucgaggccgagcugaagugcuucggcaacaccgccguggccaagugcaacgagaagcacgacgaggaguucugcgacaugcugagacuguucgacuucaacaagcaggccaucagaagacugaagaccgaggcccagaugagcauccagcugaucaacaaggccgugaacgcccugaucaacgaccagcugaucaugaagaaccaccugagagacaucaugggcauccccuacugcaacuacagcaaguacugcuaccugaaccacaccgugaccggcaagaccagccugcccagaugcugccuggugagcaacggcagcuaccugaacgagacccacuucagcgacgacaucgagcagcaggccgacaacaugaucaccgagcugcugcagaaggaguacaucgacagacagggcaagaccccccugggccugguggaccuguucguguucagcaccagcuucuaccugaucagcaucuuccugcaccuggugaagauccccacccacagacacgugaucggcaagcccugccccaagccccacagacugaaccacaugggcaucugcagcugcggccuguacaagcaccccggcgugcccgugaaguggaagagaugaggacuagucccuguucccagagcccacuuuuuuuucuuuuuuugaaauaaaauagccugucuuucagaucucaaaggcucuuuucagagccaccaaaaaaaaaaaaaaaaaaaaaaaaaaaaaaaaaaaaaaaaaaaaaaaaaaaaaaaaaaaaaaaaaaaaaaaaaaaaaaaaaaaaaaaaaaaaaaaaaaaaa

SEQ ID NO: 38579 - RNA, 1745 nt, Artificial Sequence
  mRNA product Design a-1 (hSL-A100) comprising derived and/or modified sequence from LASV(LASV003-NIG-2008;Clade II)__AIT17580__GPCmut11 (opt4)
aggagagucccgcagucggcguccagcggcucugcuuguucgugugugugucguugcaggccuuauucaagcuuaccaugggccagaucaucaccuucuuccaggaggugccccacgugaucgaggaggugaugaacaucgugcugaucgcccugagccugcuggccauccugaagggcaucuacaacguggccaccugcggccuguucggccuggugagcuuccugcugcugugcggcagaagcugcagcaccaccuacaagggcguguacgagcugcagacccuggagcuggacauggccagccugaacaugaccaugccccugagcugcaccaagaacaacagccaccacuacaucauggugggcaacgagaccggccuggagcugacccugaccaacaccagcaucaucaaccacaaguucugcaaccugagcgacgcccacaagaagaaccuguacgaccacgcccugaugagcaucaucagcaccuuccaccugagcauccccaacuucaaccaguacgaggccaugagcugcgacuucaacggcggcaagaucagcgugcaguacaaccugagccacaccuacgccguggacgccgccaaccacugcggcaccaucgccaacggcgugcugcagaccuucaugagaauggccuggggcggcagcuacaucgcccuggacagcggcaagggcagcugggacugcaucaugaccagcuaccaguaccugaucauccagaacaccaccugggaggaccacugccaguucagcagacccagccccaucggcuaccugggccugcugagccagagaaccagagacaucuacaucagcagaagacugcugggcaccuucaccuggacccugagcgacagcgagagcaacgagacccccggcggcuacugccugaccagauggaugcugaucgaggccgagcugaagugcuucggcaacaccgccguggccaagugcaacgagaagcacgacgaggaguucugcgacaugcugagacuguucgacuucaacaagcaggccaucagaagacugaaggccgaggcccagaugagcauccagcugaucaacaaggccgugaacgcccugaucaacgaccagcugaucaugaagaaccaccugagagacaucaugggcauccccuacugcaacuacagcaaguacugcuaccugaaccacaccgugaccggcagaaccagccugcccagaugcugccuggugagcaacggcagcuaccugaacgagacccacuucagcgacgacaucgagcagcaggccgacaacaugaucaccgagcugcugcagaaggaguacauggacagacagggcaagaccccccugggccugguggaccuguucguguucagcaccagcuucuaccugaucagcaucuuccugcaccuggugaagauccccacccacagacacgugaucggcaagcccugccccaagccccacagacugaaccacaugggcaucugcagcugcggccuguacaagcaccccggcgugcccgugaaguggaagagaugaggacuagucccuguucccagagcccacuuuuuuuucuuuuuuugaaauaaaauagccugucuuucagaucucaaaggcucuuuucagagccaccaaaaaaaaaaaaaaaaaaaaaaaaaaaaaaaaaaaaaaaaaaaaaaaaaaaaaaaaaaaaaaaaaaaaaaaaaaaaaaaaaaaaaaaaaaaaaaaaaaaaa

SEQ ID NO: 38580 - RNA, 1745 nt, Artificial Sequence
  mRNA product Design a-1 (hSL-A100) comprising derived and/or modified sequence from LASV(LASV035-NIG-2009;Clade II)__AIT17588__GPCmut11 (opt4)
aggagagucccgcagucggcguccagcggcucugcuuguucgugugugugucguugcaggccuuauucaagcuuaccaugggccagaucaucaccuucuuccaggaggugccccacgugaucgaggaggugaugaacaucgugcugaucgcccugagccugcuggccauccugaagggcaucuacaacguggccaccugcggccuguucggccuggugagcuuccugcugcugugcggcagaagcugcagcaccaccuacaagggcguguacgagcugcagacccuggagcuggacauggccagccugaacaugaccaugccccugagcugcaccaagaacaacagccaccacuacaucauggugggcaacgagaccggccuggagcugacccugaccaacaccagcaucaucaaccacaaguucugcaaccugagcgacgcccacaagaagaaccuguacgaccacgcccugaugagcaucaucagcaccuuccaccugagcauccccaacuucaaccaguacgaggccaugagcugcgacuucaacggcggcaagaucagcgugcaguacaaccugagccacgccuacgccguggacgccgccaaccacugcggcaccaucgccaacggcgugcugcagaccuucaugagaauggccuggggcggcagcuacaucgcccuggacagcggcaagggcagcugggacugcaucaugaccagcuaccaguaccugaucauccagaacaccaccugggaggaccacugccaguucagcagacccagccccaucggcuaccugggccugcugagccagagaaccagagacaucuacaucagcagaagacugcugggcaccuucaccuggacccugagcgacagcgagggcaacgagacccccggcggcuacugccugaccagauggaugcugaucgaggccgagcugaagugcuucggcaacaccgccguggccaagugcaacgagaagcacgacgaggaguucugcgacaugcugagacuguucgacuucaacaagcaggccaucagaagacugaaggccgaggcccagaugagcauccagcugaucaacaaggccgugaacgcccugaucaacgaccagcugaucaugaagaaccaccugagagacaucaugggcauccccuacugcaacuacagcaaguacugcuaccugaaccacaccgugaccggcaagaccagccugcccagaugcugccuggugagcaacggcagcuaccugaacgagacccacuucagcgacgacaucgagcagcaggccgacaacaugaucaccgagcugcugcagaaggaguacaucgacagacagggcaagaccccccugggccugguggaccuguucguguucagcaccagcuucuaccugaucagcaucuuccugcaccuggugaagauccccacccacagacacgugaucggcaagcccugccccaagccccacagacugaaccacaugggcaucugcagcugcggccuguacaagcaccccggcgugcccgugaaguggaagagaugaggacuagucccuguucccagagcccacuuuuuuuucuuuuuuugaaauaaaauagccugucuuucagaucucaaaggcucuuuucagagccaccaaaaaaaaaaaaaaaaaaaaaaaaaaaaaaaaaaaaaaaaaaaaaaaaaaaaaaaaaaaaaaaaaaaaaaaaaaaaaaaaaaaaaaaaaaaaaaaaaaaaa

SEQ ID NO: 38581 - RNA, 1745 nt, Artificial Sequence
  mRNA product Design a-1 (hSL-A100) comprising derived and/or modified sequence from LASV(LASV1000-NIG-2009;Clade II)__AIT17782__GPCmut11 (opt4)
aggagagucccgcagucggcguccagcggcucugcuuguucgugugugugucguugcaggccuuauucaagcuuaccaugggccagaucaucaccuucuuccaggaggugccccacgugaucgaggaggugaugaacaucgugcugaucgcccugagccugcuggccauccugaagggcaucuacaacguggccaccugcggccuguucggccuggugagcuuccugcugcugugcggcagaagcugcagcaccaccuacaagggcguguacgagcugcagacccuggagcuggacauggccagccugaacaugaccaugccccugagcugcaccaagaacaacagccaccacuacaucauggugggcaacgagaccggccuggagcugacccugaccaacaccagcaucaucaaccacaaguucugcaaccugagcgacgcccacaagaagaaccuguacgaccacgcccugaugagcaucaucagcaccuuccaccugagcauccccaacuucaaccaguacgaggccaugagcugcgacuucaacggcggcaagaucagcgugcaguacaaccugagccacaccuacgccguggacgccgccaaccacugcggcaccaucgccaacggcgugcugcagaccuucaugagaauggccuggggcggcagcuacaucgcccuggacagcggcaagggcagcugggacugcaucaugaccagcuaccaguaccugaucauccagaacaccaccugggaggaccacugccaguucagcagacccagccccaucggcuaccugggccugcugagccagagaaccagagacaucuacaucagcagaagacugcugggcaccuucaccuggacccugagcgacagcgagggcaacgagacccccggcggcuacugccugaccagauggaugcugaucgaggccgagcugaagugcuucggcaacaccgccguggccaagugcaacgagaagcacgacgaggaguucugcgacaugcugagacuguucgacuucaacaagcaggccaucaagagacugaagaccgaggcccagaugagcauccagcugaucaacaaggccgugaacgcccugaucaacgaccagcugaucaugaagaaccaccugagagacaucaugggcauccccuacugcaacuacagcaaguacugcuaccugaaccacaccgugaccggcaagaccagccugcccagaugcugccuggugagcaacggcagcuaccugaacgagacccacuucagcgacgacaucgagcagcaggccgacaacaugaucaccgagcugcugcagaaggaguacaucgacagacagggcaagaccccccugggccugguggaccuguucguguucagcaccagcuucuaccugaucagcaucuuccugcaccuggugaagauccccacccacagacacguggugggcaagcccugccccaagccccacagacugaaccacaugggcaucugcagcugcggccuguacaagcaccccggcgugcccgugaaguggaagagaugaggacuagucccuguucccagagcccacuuuuuuuucuuuuuuugaaauaaaauagccugucuuucagaucucaaaggcucuuuucagagccaccaaaaaaaaaaaaaaaaaaaaaaaaaaaaaaaaaaaaaaaaaaaaaaaaaaaaaaaaaaaaaaaaaaaaaaaaaaaaaaaaaaaaaaaaaaaaaaaaaaaaa

SEQ ID NO: 38582 - RNA, 1745 nt, Artificial Sequence
  mRNA product Design a-1 (hSL-A100) comprising derived and/or modified sequence from LASV(LASV221-NIG-2010;Clade II)__AIT17624__GPCmut11 (opt4)
aggagagucccgcagucggcguccagcggcucugcuuguucgugugugugucguugcaggccuuauucaagcuuaccaugggccagaucaucaccuucuuccaggaggugccccacgugaucgaggaggugaugaacaucgugcugaucgcccugagccugcuggccauccugaagggcaucuacaacguggccaccugcggccuguucggccuggugagcuuccugcugcugugcggcagaagcugcagcaccaccuacaagggcguguacgagcugcagacccuggagcuggacauggccagccugaacaugaccaugccccugagcugcaccaagaacaacagccaccacuacaucauggugggcaacgagaccggccuggagcugacccugaccaacaccagcaucaucaaccacaaguucugcaaccugagcgacgcccacaagaagaaccuguacgaccacgcccugaugagcaucaucagcaccuuccaccugagcauccccaacuucaaccaguacgaggccaugagcugcgacuucaacggcggcaagaucagcgugcaguacaaccugagccacaccuacgccaucgacgccgccaaccacugcggcaccaucgccaacggcgugcugcagaccuucaugagaauggccuggggcggcagcuacaucgcccuggacagcggcaagggcagcugggacugcaucaugaccagcuaccaguaccugaucauccagaacaccaccugggaggaccacugccaguucagcagacccagccccaucggcuaccugggccugcugagccagagaaccagagacaucuacaucagcagaagacugcugggcaccuucaccuggacccugagcgacagcgagggcaacgagacccccggcggcuacugccugaccagauggaugcugaucgaggccgagcugaagugcuucggcaacaccgccguggccaagugcaacgagaagcacgacgaggaguucugcgacaugcugagacuguucgacuucaacaagcaggccaucagaagacugaagaccgaggcccagaugagcauccagcugaucaacaaggccgugaacgcccugaucaacgaccagcugaucaugaagaaccaccugagagacaucaugggcauccccuacugcaacuacagcaaguacugcuaccugaaccacaccgugaccggcaagaccagccugcccagaugcugccuggugagcaacggcagcuaccugaacgagacccacuucagcgacgacaucgagcagcaggccgacaacaugaucaccgagaugcugcagaaggaguacauggacagacagggcaagaccccccugggccugguggaccuguucguguucagcaccagcuucuaccugaucagcaucuuccugcaccuggugaagauccccacccacagacacgugaucggcaagcccugccccaagccccacagacugaaccacaugggcaucugcagcugcggccuguacaagcaccccggcgugcccgugaaguggaagagaugaggacuagucccuguucccagagcccacuuuuuuuucuuuuuuugaaauaaaauagccugucuuucagaucucaaaggcucuuuucagagccaccaaaaaaaaaaaaaaaaaaaaaaaaaaaaaaaaaaaaaaaaaaaaaaaaaaaaaaaaaaaaaaaaaaaaaaaaaaaaaaaaaaaaaaaaaaaaaaaaaaaaa

SEQ ID NO: 38583 - RNA, 1745 nt, Artificial Sequence
  mRNA product Design a-1 (hSL-A100) comprising derived and/or modified sequence from LASV(LASV237-NIG-2010;Clade II)__AIT17638__GPCmut11 (opt4)
aggagagucccgcagucggcguccagcggcucugcuuguucgugugugugucguugcaggccuuauucaagcuuaccaugggccagaucaucaccuucuuccaggaggugccccacgugaucgaggaggugaugaacaucgugcugaucgcccugagccugcuggccauccugaagggcaucuacaacguggccaccugcggccuguucggccuggugagcuuccugcugcugugcggcagaagcugcagcaccaccuacaagggcguguacgagcugcagacccuggagcuggacauggccagccugaacaugaccaugccccugagcugcaccaagaacaacagccaccacuacaucauggugggcaacgagaccggccuggagcugacccugaccaacaccagcaucaucaaccacaaguucugcaaccugagcgacgcccacaagaaggaccuguacgaccacgcccugaugagcaucaucagcaccuuccaccugagcauccccaacuucaaccaguacgaggccaugagcugcgacuucaacggcggcaagaucagcgugcaguacaaccugagccacaccuacgccguggacgccgccaaccacugcggcaccaucgccaacggcgugcugcagaccuucaugagaauggccuggggcggcagcuacaucgcccuggacagcggcaagggcagcugggacugcaucaugaccagcuaccaguaccugaucauccagaacaccaccugggaggaccacugccaguucagcagacccagccccaucggcuaccugggccugcugagccagagaaccagagacaucuacaucagcagaagacugcugggcaccuucaccuggacccugagcgacagcgagggcaacgagacccccggcggcuacugccugaccagauggaugcugaucgaggccgagcugaagugcuucggcaacaccgccguggccaagugcaacgagaagcacgacgaggaguucugcgacaugcugagacuguucgacuucaacaagcaggccaucagaagacugaagaccgaggcccagaugagcauccagcugaucaacaaggccgugaacgcccugaucaacgaccagcugaucaugaagaaccaccugagagacaucaugggcauccccuacugcaacuacagcaaguacugcuaccugaaccacaccgugaccggcaagaccagccugcccagaugcugccuggugagcaacggcagcuaccugaacgagacccacuucagcgacgacaucgagcagcaggccgacaacaugaucaccgagcugcugcagaaggaguacauggacagacagggcaagaccccccugggccugguggaccuguucguguucagcaccagcuucuaccugaucagcaucuuccugcaccugaucaagauccccacccacagacacaucaccggcaagcccugccccaagccccacagacugaaccacaugggcaucugcagcugcggccuguacaagcaccccggcgugcccgugaaguggaagagaugaggacuagucccuguucccagagcccacuuuuuuuucuuuuuuugaaauaaaauagccugucuuucagaucucaaaggcucuuuucagagccaccaaaaaaaaaaaaaaaaaaaaaaaaaaaaaaaaaaaaaaaaaaaaaaaaaaaaaaaaaaaaaaaaaaaaaaaaaaaaaaaaaaaaaaaaaaaaaaaaaaaaa

SEQ ID NO: 38584 - RNA, 1745 nt, Artificial Sequence
  mRNA product Design a-1 (hSL-A100) comprising derived and/or modified sequence from LASV(LASV253-NIG-2011;Clade II)__AIT17670__GPCmut11 (opt4)
aggagagucccgcagucggcguccagcggcucugcuuguucgugugugugucguugcaggccuuauucaagcuuaccaugggccagaucaucaccuucuuccaggaggugccccacgugaucgaggaggugaugaacaucgugcugaucgcccugagccugcuggccauccugaagggcaucuacaacguggccaccugcggccuguucggccuggugagcuuccugcugcugugcggcagaagcugcagcaccaccuacaagggcguguacgagcugcagacccuggagcuggacauggccagccugaacaugaccaugccccugagcugcaccaagaacaacagccaccacuacaucauggugggcaacgagaccggccuggagcugacccugaccaacaccagcaucaucaaccacaaguucugcaaccugagcgacgcccacaagaagaaccuguacgaccacgcccugaugagcaucaucagcaccuuccaccugagcauccccaacuucaaccaguacgaggccaugagcugcgacuucaacggcggcaagaucagcgugcaguacaaccugagccacaccuacgccguggacgccgccaaccacugcggcaccaucgccaacggcgugcugcagaccuucaugagaauggccuggggcggcagcuacaucgcccuggacagcggcaagggcagcugggacugcaucaugaccagcuaccaguaccugaucauccagaacaccaccugggaggaccacugccaguucagcagacccagccccaucggcuaccugggccugcugagccagagaaccagagacaucuacaucagcagaagacugcugggcaccuucaccuggacccugagcgacagcgagggcaacgagacccccggcggcuacugccugaccagauggaugcugaucgaggccgagcugaagugcuucggcaacaccgccguggccaagugcaacgagaagcacgacgaggaguucugcgacaugcugagacuguucgacuucaacaagcaggccaucagaagacugaaggccgaggcccagaugagcauccagcugaucaacaaggccgugaacgcccugaucaacgaccagcugaucaugaagaaccaccugagagacaucaugggcauccccuacugcaacuacagcaaguacugcuaccugaaccacaccgugaccggcagaaccagccugcccagaugcugccuggugagcaacggcagcuaccugaacgagacccacuucagcgacgacaucgagcagcaggccgacaacaugaucaccgagcugcugcagaaggaguacaucgacagacagggcaagaccccccugggccugguggaccuguucguguucagcaccagcuucuaccugaucagcaucuuccugcaccuggugaagauccccacccacagacacaucaucggcaagcccugccccaagccccacagacugaaccacaugggcaucugcagcugcggccuguacaagcaccccggcgugcccgugaaguggaagagaugaggacuagucccuguucccagagcccacuuuuuuuucuuuuuuugaaauaaaauagccugucuuucagaucucaaaggcucuuuucagagccaccaaaaaaaaaaaaaaaaaaaaaaaaaaaaaaaaaaaaaaaaaaaaaaaaaaaaaaaaaaaaaaaaaaaaaaaaaaaaaaaaaaaaaaaaaaaaaaaaaaaaa

SEQ ID NO: 38585 - RNA, 1745 nt, Artificial Sequence
  mRNA product Design a-1 (hSL-A100) comprising derived and/or modified sequence from LASV(LASV254-NIG-2011;Clade II)__AIT17674__GPCmut11 (opt4)
aggagagucccgcagucggcguccagcggcucugcuuguucgugugugugucguugcaggccuuauucaagcuuaccaugggccagaucaucaccuucuuccaggaggugccccacgugaucgaggaggugaugaacaucgugcugaucgcccugagccugcuggccauccugaagggcaucuacaacguggccaccugcggccuguucggccuggugagcuuccugcugcugugcggcagaagcugcagcaccaccuacaagggcguguacgagcugcagacccuggagcuggacaugaccaaccugaacaugaccaugccccugagcugcaccaagaacaacagccaccacuacaucauggugggcaacgagaccggccuggagcugacccugaccaacaccagcaucaucaaccacaaguucugcaaccugagcgacgcccacaagaagaaccuguacaaccacgcccugaugagcaucaucagcaccuuccaccugagcauccccaacuucaaccaguacgaggccaugagcugcgacuucaacggcggcaagaucagcgugcaguacaaccugagccacagcuacgccguggacgccgccaaccacugcggcaccaucgccaacggcgugcugcagaccuucaugagaauggccuggggcggcagcuacaucgcccuggacagcggcaagggcaacugggacugcaucaugaccagcuaccaguaccugaucauccagaacaccaccugggaggaccacugccaguucagcagacccagccccaucggcuaccugggccugcugagccagagaaccagagacaucuacaucagcagaagacugcugggcaccuucaccuggacccugagcgacagcgagggcaacgagacccccggcggcuacugccugaccagauggaugcugaucgaggccgagcugaagugcuucggcaacaccgccguggccaagugcaacgagaagcacgacgaggaguucugcgacaugcugagacuguucgacuucaacaagcaggccaucagaagacugaagaccgaggcccaggccaacauccagcugaucaacaaggccgugaacgcccugaucaacgaccagcugaucaugaagaaccaccugagagacaucaugggcauccccuacugcaacuacagcaaguacugcuaccugaaccacaccgugaccggcaagaccagccugcccagaugcugccuggugagcaacggcagcuaccugaacgagacccacuucagcgacgacaucgagcagcaggccgacaacaugaucaccgagcugcugcagaaggaguacauggacagacagggcaagaccccccugggccugguggaccuguucguguucagcaccagcuucuaccugaucagcaucuuccugcaccuggugaagauccccacccacagacacgugaucggcaagcccugccccaagccccacagacugaaccacaugggcaucugcagcugcggccuguacaagcaccccggcgugcccgugaaguggaagagaugaggacuagucccuguucccagagcccacuuuuuuuucuuuuuuugaaauaaaauagccugucuuucagaucucaaaggcucuuuucagagccaccaaaaaaaaaaaaaaaaaaaaaaaaaaaaaaaaaaaaaaaaaaaaaaaaaaaaaaaaaaaaaaaaaaaaaaaaaaaaaaaaaaaaaaaaaaaaaaaaaaaaa

SEQ ID NO: 38586 - RNA, 1745 nt, Artificial Sequence
  mRNA product Design a-1 (hSL-A100) comprising derived and/or modified sequence from LASV(Nig08-A19;Clade III)__ADU56618__GPCmut11 (opt4)
aggagagucccgcagucggcguccagcggcucugcuuguucgugugugugucguugcaggccuuauucaagcuuaccaugggccagaucgugaccuucuuccaggaggugccccacgugaucgaggaggugaugaacaucgugcugaucgcccugagcauccuggccauccugaagggccuguacaacaucgccaccugcggccugaucggccuggugaccuuccugcugcugagcggcagaagcugcagcaugaccuacaagggcguguacgagcugcagacccuggagcugaacaugaacacccugaacaugaccaugccccugagcugcaccaagaacaacagccaccacuacaucauggugggcaacgagaccggccuggagcugacccugaccaacaccagccugcugcaccacaaguucugcaaccugagcgacgcccacaagaagaaccuguacgaccacacccugaugagcaucaucagcaccuuccaccugagcauccccaacuucaaccaguacgaggccaugagcugcgacuucaacggcggcaagaucaccgugcaguacaaccugagccacagcuacgccaucgacgccgccaaccacugcggcaccguggccaacggcgugcugcagaccuucaugagaauggccuggggcggcagcuacaucgcccuggacagcggcagaggcaagugggacugcaucaugaccagcuaccaguaccugaucauccagaacaccaccugggaggaccacugccaguucagcagacccagccccaucggcuaccugggccugcugagccagagaaccagagacaucuacaucagcagaagacugcugggcaccuucaccuggacccugagcgacagcgagggcaacgagacccccggcggcuacugccugaccagauggaugcugaucgaggccgagcugaagugcuucggcaacaccgccguggccaagugcaacgagaagcacgacgaggaguucugcgacaugcugagacuguucgacuucaacaagcaggccaucagaagacugaaggccgaggcccagaugagcauccagcugaucaacaaggccgugaacgcccugaucaacgaccagcugaucaugaagaaccaccugagagacaucaugggcauccccuacugcaacuacagcaaguacugcuaccugaaccacaccagcaccggcagaaccagccugcccagaugcugccuggugagcaacggcagcuaccugaacgagacccacuucagcgacgacaucgagcagcaggccgacaacaugaucaccgagaugcugcagaaggaguaccuggacagacagggcaagaccccccugggccugguggaccuguucguguucagcaccagcuucuaccugaucagcaucuuccugcaccuggugaagauccccacccacagacacaucgugggcaagcccugccccaagccccacagacugaaccacaugggcaucugcagcugcggccuguacaagcagcccggcgugcccgugagauggaagagaugaggacuagucccuguucccagagcccacuuuuuuuucuuuuuuugaaauaaaauagccugucuuucagaucucaaaggcucuuuucagagccaccaaaaaaaaaaaaaaaaaaaaaaaaaaaaaaaaaaaaaaaaaaaaaaaaaaaaaaaaaaaaaaaaaaaaaaaaaaaaaaaaaaaaaaaaaaaaaaaaaaaaa

SEQ ID NO: 38587 - RNA, 1748 nt, Artificial Sequence
  mRNA product Design a-1 (hSL-A100) comprising derived and/or modified sequence from LASV(G1180-SLE-2010;Clade IV)__AIT17168__GPCmut11 (opt4)
aggagagucccgcagucggcguccagcggcucugcuuguucgugugugugucguugcaggccuuauucaagcuuaccaugggccagaucgugaccuucuuccaggaggugccccacgugaucgaggaggugaugaacaucgugcugaucgcccugagcauccuggccgugcugaagggccuguacaacuucgccaccugcggccuggugggccugcugaccuuccugcugcugugcggcagaagcugcaccgccagcagauacaagggcguguacgagcugcagacccuggagcugaacauggagacccugaacaugaccaugccccugagcugcaccaagaacaacagccaccacuacaucauggugggcaacgagaccggccuggagcugacccugaccaacaccagcaucaucaaccacaaguucugcaaccugagcgacgcccacaagaagaaccuguacgaccacgcccugaugagcaucaucagcaccuuccaccugagcauccccaacuucaaccaguacgaggccaugagcugcgacuucaacggcggcaagaucagcgugcaguacaaccugagccacagcuacgccggcgacgccgccaaccacugcggcaccguggccaacggcgugcugcagaccuucaugagaauggccuggggcggcagcuacaucgcccuggacagcggccacggcagcugggacugcaucaugaccagcuaccaguaccugaucauccagaacaccaccugggaggaccacugccaguucagcagacccagccccaucggcuaccugggccugcugagccagagaaccagagacaucuacaucagcagaagacugcugggcaccuucaccuggacccugagcgacagcgagggcaaggacacccccggcggcuacugccugaccagauggaugcugaucgaggccgagcugaagugcuucggcaacaccgccguggccaagugcaacgagaagcacgacgaggaguucugcgacaugcugagacuguucgacuucaacaagcaggccauccagagacugaaggccgaggcccagaugagcauccagcugaucaacaaggccgugaacgcccugaucaacgaccagcugaucaugaagaaccaccugagagacaucaugggcauccccuacugcaacuacagcaaguacugcuaccugaaccacaccaccaccggcaagaccagccugcccaagugcugccuggugagcaacggcagcuaccugaacgagacccacuucagcgacgacaucgagcagcaggccgacaacaugaucaccgagaugcugcagaaggaguacauggagagacagggcaagaccccccugggccugguggaccuguucguguucagcaccagcuucuaccugaucagcaucuuccugcaccuggugaagauccccacccacagacacaucgugggcaagagcugccccaagccccacagacugaaccacaugggcaucugcagcugcggccuguacaagcagcccggcgugcccgugaaguggaagagaugaggacuagucccuguucccagagcccacuuuuuuuucuuuuuuugaaauaaaauagccugucuuucagaucucaaaggcucuuuucagagccaccaaaaaaaaaaaaaaaaaaaaaaaaaaaaaaaaaaaaaaaaaaaaaaaaaaaaaaaaaaaaaaaaaaaaaaaaaaaaaaaaaaaaaaaaaaaaaaaaaaaaa

SEQ ID NO: 38588 - RNA, 1748 nt, Artificial Sequence
  mRNA product Design a-1 (hSL-A100) comprising derived and/or modified sequence from LASV(G1442-SLE-2011;Clade IV)__AIT17180__GPCmut11 (opt4)
aggagagucccgcagucggcguccagcggcucugcuuguucgugugugugucguugcaggccuuauucaagcuuaccaugggccagaucgugaccuucuuccaggaggugccccacgugaucgaggaggugaugaacaucgugcugaucgcccugagcauccuggccgugcugaagggccuguacaacguggccaccugcggccugaucggccuggugaccuuccugcugcugugcggcagaagcugcaccaccacccuguacaagggcguguacgagcugcagacccuggagcugaacauggagacccugaacaugaccaugccccugagcugcaccaagaacaacagccaccacuacaucagagugggcaacgagaccggccuggagcugacccugaccaacaccagcaucaucaaccacaaguucugcaaccugagcgacgcccacaagaagaaccuguacgaccacgcccugaugagcaucaucagcaccuuccaccugagcauccccaacuucaaccaguacgaggccaugagcugcgacuucaacggcggcaagaucagcgugcaguacaaccugagccacagcuacgccggcgacgccgccaaccacugcggcaccguggccaacggcgugcugcagaccuucaugagaauggccuggggcggcagcuacaucgcccuggacagcggcagaggcaacugggacugcaucaugaccagcuaccaguaccugaucauccagaacaccaccugggacgaccacugccaguucagcagacccagccccaucggcuaccugggccugcugagccagagaaccagagacguguacaucagcagaagacugcugggcaccuucaccuggacccugagcgacagcgagggcaaggacacccccggcggcuacugccugaccagauggaugcugaucgaggccgagcugaagugcuucggcaacaccgccguggccaagugcaacgagaagcacgacgaggaguucugcgacaugcugagacuguucgacuucaacaagcaggccauccagagacugaaggccgaggcccagaugagcauccagcugaucaacaaggccgugaacgcccugaucaacgaccagcugaucaugaagaaccaccugagagacaucaugggcauccccuacugcaacuacagcaaguacugcuaccugaacaacaccgccaccggcaagaccagccugcccaagugcugccugaucagcaacggcagcuaccugaacgagacccacuucagcgacgacaucgagcaggaggccgacaacaugaucaccgagaugcugcagaaggaguacauggagagacagggcaagaccccccugggccugguggaccuguucguguucagcaccagcuucuaccugaucagcaucuuccugcaccuggugaagauccccacccacagacacaucgugggcaagagcugccccaagccccacagacugaaccacaugggcaucugcagcugcggccuguacaagcagcccggcgugcccgugagauggaagagaugaggacuagucccuguucccagagcccacuuuuuuuucuuuuuuugaaauaaaauagccugucuuucagaucucaaaggcucuuuucagagccaccaaaaaaaaaaaaaaaaaaaaaaaaaaaaaaaaaaaaaaaaaaaaaaaaaaaaaaaaaaaaaaaaaaaaaaaaaaaaaaaaaaaaaaaaaaaaaaaaaaaaa

SEQ ID NO: 38589 - RNA, 1748 nt, Artificial Sequence
  mRNA product Design a-1 (hSL-A100) comprising derived and/or modified sequence from LASV(G3010-SLE-2013;Clade IV)__AIT17344__GPCmut11 (opt4)
aggagagucccgcagucggcguccagcggcucugcuuguucgugugugugucguugcaggccuuauucaagcuuaccaugggccagaucgugaccuucuuccaggaggugccccacgugaucgaggaggugaugaacaucgugcugaucgcccugagcauccuggccgugcugaagggccuguacaacuucgccaccugcggccuggugggccuggugaccuuccugcugcugugcggcagaagcugcaccaccagccuguacaagggcguguacgagcugcagacccuggagcugaacauggagacccugaacaugaccaugccccugagcugcaccaagaacaacagccaccacuacaucauggugggcaacgagaccggccuggagcugacccugaccaacaccagcaucaucaaccacaaguucugcaaccugagcgacgcccacaagaagaaccuguacaaccacgcccugaugagcaucaucagcaccuuccaccugagcauccccaacuucaaccaguacgaggccaugagcugcgacuucaacggcggcaagaucagcgugcaguacaaccugagccacagcuacgccggcgacgccgccagccacugcggcaccguggccaacggcgugcugcagaccuucaugagaauggccuggggcggcagcuacaucgcccuggacagcggcuacggcaagugggacugcaucaugaccagcuaccaguaccugaucauccagaacaccaccugggaggaccacugccaguucagcagacccagccccaucggcuaccugggccugcugagccagagaaccagagacaucuacaucagcagaagacugcugggcaccuucaccuggacccugagcgacagcgagggcaaggacacccccggcggcuacugccugaccagauggaugcugaucgaggccgagcugaagugcuucggcaacaccgccguggccaagugcaacgagaagcacgacgaggaguucugcgacaugcugagacuguucgacuucaacaagcaggccauccagagacugaagaccgaggcccagaugagcauccagcugaucaacaaggccgugaacgcccugaucaacgaccagcugaucaugaagaaccaccugagagacaucaugggcauccccuacugcaacuacagcaaguacugcuaccugaaccacaccaccaccggcaagaccagccugcccaagugcugccuggugagcaacggcagcuaccugaacgagacccacuucagcgacgacaucgagcagcaggccgacaacaugaucaccgagaugcugcagaaggaguacauggagagacagggcaagaccccccugggccugguggaccuguucguguucagcaccagcuucuaccugaucagcaucuuccugcaccuggugaagauccccacccacagacacaucgugggcaagagcugccccaagccccacagacugaaccacaugggcaucugcagcugcggccuguacaagcagcccggcgugcccgugagauggaagagaugaggacuagucccuguucccagagcccacuuuuuuuucuuuuuuugaaauaaaauagccugucuuucagaucucaaaggcucuuuucagagccaccaaaaaaaaaaaaaaaaaaaaaaaaaaaaaaaaaaaaaaaaaaaaaaaaaaaaaaaaaaaaaaaaaaaaaaaaaaaaaaaaaaaaaaaaaaaaaaaaaaaaa

SEQ ID NO: 38590 - RNA, 1748 nt, Artificial Sequence
  mRNA product Design a-1 (hSL-A100) comprising derived and/or modified sequence from LASV(G502-SLE-2009;Clade IV)__AIT17126__GPCmut11 (opt4)
aggagagucccgcagucggcguccagcggcucugcuuguucgugugugugucguugcaggccuuauucaagcuuaccaugggccagaucgugaccuucuuccaggaggugccccacgugaucgaggaggugaugaacaucgugcugaucgcccugagcauccuggccgugcugaagggccuguacaacuucgccaccugcggccuggugggccugcugaccuuccugcugcugugcggcagaagcugcaccaccggccuguacaagggcguguacgagcugcagacccuggagcugaacauggagacccugaacaugaccaugccccugagcugcaccaagaacaacagccaccacuacaucauggugggcaacgagaccggccuggagcugacccugaccaacaccagcaucaucaaccacaaguucugcaaccugagcgacgcccacaagaagaaccuguacgaccacgcccugaugagcaucaucagcaccuuccaccugagcauccccaacuucaaccaguacgaggccaugagcugcgacuucaacggcggcaagaucagcgugcaguacaaccugagccacagcuacgccggcgacgccgccgaccacugcggcaccguggccaacggcgugcugcagaccuucaugagaauggccuggggcggcagcuacaucgcccuggacagcggcagaggcagaugggacugcaucaugaccagcuaccaguaccugaucauccagaacaccaccugggaggaccacugccaguucagcagacccagccccaucggcuaccugggccugcugagccagagaaccagagacaucuacaucagcagaagacugcugggcaccuucaccuggacccugagcgacagcgagggcaaggacacccccggcggcuacugccugaccagauggaugcugaucgaggccgagcugaagugcuucggcaacaccgccguggccaagugcaacgagaagcacgacgaggaguucugcgacaugcugagacuguucgacuucaacaagcaggccauccagagacugaaggccgaggcccagaugagcauccagcugaucaacaaggccgugaacgcccugaucaacgaccagcuggugaugaagaaccaccugagagacaucaugggcauccccuacugcaacuacagcagauacugcuaccugaaccacaccaccaccggcagaaccagccugcccaagugcugccuggugagcaacggcagcuaccugaacgagacccacuucagcgacgacaucgagcagcaggccgacaacaugaucaccgagaugcugcagaaggaguacauggagagacagggcaagaccccccugggccugguggaccuguucguguucagcaccagcuucuaccugaucagcaucuuccugcaccuggugaagauccccacccacagacacaucgugggcaagagcugccccaagccccacagacugaaccacaugggcaucugcagcugcggccuguacaagcagcccggcgugcccgugaaguggaagagaugaggacuagucccuguucccagagcccacuuuuuuuucuuuuuuugaaauaaaauagccugucuuucagaucucaaaggcucuuuucagagccaccaaaaaaaaaaaaaaaaaaaaaaaaaaaaaaaaaaaaaaaaaaaaaaaaaaaaaaaaaaaaaaaaaaaaaaaaaaaaaaaaaaaaaaaaaaaaaaaaaaaaa

SEQ ID NO: 38591 - RNA, 1748 nt, Artificial Sequence
  mRNA product Design a-1 (hSL-A100) comprising derived and/or modified sequence from LASV(G733-SLE-2010;Clade IV)__AIT17154__GPCmut11 (opt4)
aggagagucccgcagucggcguccagcggcucugcuuguucgugugugugucguugcaggccuuauucaagcuuaccaugggccagaucgugaccuucuuccaggaggugccccacgugaucgaggaggugaugaacaucgugcugaucgcccugagcauccuggccgugcugaagggccuguacaacuucgccaccugcggcaucgugggccuggugagcuuccugcugcugugcggcagaagcugcaccaccagccuguacaagggcguguacgagcugcagacccuggagcugaacauggagacccugaacaugaccaugccccugagcugcaccaagaacaacagccaccacuacaucauggugggcaacgagaccggccuggagcugacccugaccaacaccagcaucaucaaccacaaguucugcaaccugagcgacgcccacaagaagaaccuguacgaccacgcccugaugagcaucaucagcaccuuccaccugagcauccccaacuucaaccaguacgaggccaugagcugcgacuucaacggcggcaagaucagcgugcaguacaaccugagccacagcuacgccggcgacgccgccaaccacugcggcaccaucgccaacggcgugcugcagaccuucaugagaauggccuggggcggcagcuacaucgcccuggacagcggcagagacagaugggacugcaucaugaccagcuaccaguaccugaucauccagaacaccaccugggaggaccacugccaguucagcagacccagccccaucggcuaccugggccugcugagccagagaaccagagacaucuacaucagcagaagacugcugggcaccuucaccuggacccugagcgacagcgagggcaaggacacccccggcggcuacugccugaccagauggaugcugaucgaggccgagcugaagugcuucggcaacaccgccguggccaagugcaacgagaagcacgacgaggaguucugcgacaugcugagacuguucgacuucaacaagcaggccauccagagacugaaggccgaggcccagaugagcauccagcugaucaacaaggccgugaacgcccugaucaacgaccagcugaucaugaagaaccaccugagagacaucaugggcauccccuacugcaacuacagcaaguacugcuaccugaaccacaccaccaccggcaagaccagccugcccaagugcugccuggugagcaacggcagcuaccugaacgagacccacuucagcgacgacaucgagcagcaggccgacaacaugaucaccgagaugcugcagaaggaguacauggagagacagggcaagaccccccugggccugguggaccuguucguguucagcaccagcuucuaccugaucagcaucuuccugcaccuggugaagauccccacccacagacacguggugggcaagagcugccccaagccccacagacugaaccacaugggcaucugcagcugcggccuguacggccagcccggcgugcccgugaaguggaagagaugaggacuagucccuguucccagagcccacuuuuuuuucuuuuuuugaaauaaaauagccugucuuucagaucucaaaggcucuuuucagagccaccaaaaaaaaaaaaaaaaaaaaaaaaaaaaaaaaaaaaaaaaaaaaaaaaaaaaaaaaaaaaaaaaaaaaaaaaaaaaaaaaaaaaaaaaaaaaaaaaaaaaa

SEQ ID NO: 38592 - RNA, 1748 nt, Artificial Sequence
  mRNA product Design a-1 (hSL-A100) comprising derived and/or modified sequence from MOPV/LASV reassortant(IGS-1;Clade IV)__AFY05576__GPCmut11 (opt4)
aggagagucccgcagucggcguccagcggcucugcuuguucgugugugugucguugcaggccuuauucaagcuuaccaugggccagaucgugaccuucuuccaggaggugccccacgugaucgaggaggugaugaacaucgugcugaucgcccugagcgugcuggccgugcugaagggccuguacaacuucgccaccugcggccuggugggccuggugaccuuccugcugcugugcggcagaagcugcaccaccagccuguacaagggcguguacgagcugcagacccuggagcugaacauggagacccugaacaugaccaugccccugagcugcaccaagaacaacagccaccacuacaucauggugggcaacgagaccggccuggagcugacccugaccaacaccagcaucaucaaccacaaguucugcaaccugagcgacgcccacaagaagaaccuguacgaccacgcccugaugagcaucaucagcaccuuccaccugagcauccccaacuucaaccaguacgaggccaugagcugcgacuucaacggcggcaagaucagcgugcaguacaaccugagccacagcuacgccggcgacgccgccaaccacugcggcaccguggccaacggcgugcugcagaccuucaugagaauggccuggggcggcagcuacaucgcccuggacagcggcagaggcaacugggacugcaucaugaccagcuaccaguaccugaucauccagaacaccaccugggaggaccacugccaguucagcagacccagccccaucggcuaccugggccugcugagccagagaaccagagacaucuacaucagcagaagacugcugggcaccuucaccuggacccugagcgacagcgagggcgaggacacccccggcggcuacugccugaccagauggaugcugaucgaggccgagcugaagugcuucggcaacaccgccguggccaagugcaacgagaagcacgacgaggaguucugcgacaugcugagacuguucgacuucaacaagcaggccauccagagacugaaggccgaggcccagaugagcauccagcugaucaacaaggccgugaacgcccugaucaacgaccagcugaucaugaagaaccaccugagagacaucaugggcauccccuacugcaacuacagcaaguacugcuaccugaaccacaccaccaccggcagaaccagccugcccaagugcugccuggugagcaacggcagcuaccugaacgagacccacuucagcgacgacaucgagcagcaggccgacaacaugaucaccgagaugcugcagaaggaguacauggagagacagggcaagaccccccugggccugguggaccuguucguguucagcaccagcuucuaccugaucagcaucuuccugcaccuggugaagauccccacccacagacacaucgugggcaagagcugccccaagccccacagacugaaccacaugggcaucugcagcugcggccuguacaagcagcccggcgugcccgugaaguggaagagaugaggacuagucccuguucccagagcccacuuuuuuuucuuuuuuugaaauaaaauagccugucuuucagaucucaaaggcucuuuucagagccaccaaaaaaaaaaaaaaaaaaaaaaaaaaaaaaaaaaaaaaaaaaaaaaaaaaaaaaaaaaaaaaaaaaaaaaaaaaaaaaaaaaaaaaaaaaaaaaaaaaaaa

SEQ ID NO: 38593 - RNA, 1748 nt, Artificial Sequence
  mRNA product Design a-1 (hSL-A100) comprising derived and/or modified sequence from LASV(LM765-SLE-2012;Clade IV)__AIT17814__GPCmut11 (opt4)
aggagagucccgcagucggcguccagcggcucugcuuguucgugugugugucguugcaggccuuauucaagcuuaccaugggccagaucgugaccuucuuccaggaggugccccacgugaucgaggaggugaugaacaucgugcugaucgcccugagcauccuggccgugcugaagggccuguacaacuucgccaccugcggccuggugggccuggugaccuuccugcugcugugcggcagaagcugcaccaccagccuguacaagggcguguacgagcugcagacccuggagcugaacauggagacccugaacaugaccaugccccugagcugcaccaagaacaacagccaccacuacaucauggugggcaacgagaccggccuggagcugacccugaccaacaccagcaucaucgaccacaaguucugcaaccugagcgacgcccacagaaagaaccuguacgaccacgcccugaugagcaucaucagcaccuuccaccugagcauccccaacuucaaccaguacgaggccaugagcugcgacuucaacggcggcaagaucagcgugcaguacaaccugagccacagcuacgccaaggacgccgccgaccacugcggcaccguggccaacggcgugcugcagaccuucaugagaauggccuggggcggcagcuacaucgcccuggacagcggcagaggcagaugggacugcaucaugaccagcuaccaguaccugaucauccagaacaccaccugggaggaccacugccaguucagcagacccagccccaucggcuaccugggccugcugagccagagaaccagagacaucuacaucagcagaagacugcugggcaccuucaccuggacccugagcgacagcgagggcaaggacacccccggcggcuacugccugaccagauggaugcugaucgaggccgagcugaagugcuucggcaacaccgccguggccaagugcaacgagaagcacgacgaggaguucugcgacaugcugagacuguucgacuucaacaagcaggccauccagagacugaaggccgaggcccagaugagcauccagcugaucaacaaggccgugaacgcccugaucaacgaccagcugaucaugaagaaccaccugagagacaucaugggcauccccuacugcaacuacagcaaguacugcuaccugaaccacaccaccaccggcaagaccagccugcccaagugcugccuggugagcaacggcagcuaccugaacgagacccacuucagcgacgacaucgagcagcaggccgacaacaugaucaccgagaugcugcagaaggaguacauggagagacagggcaagaccccccugggccugguggaccuguucguguucagcaccagcuucuaccugaucagcaucuuccugcaccuggugaagauccccacccacagacacaucgugggcaagcccugccccaagccccacagacugaaccacaugggcaucugcagcugcggccuguacaagcagcccggcgugcccgugaaguggaagagaugaggacuagucccuguucccagagcccacuuuuuuuucuuuuuuugaaauaaaauagccugucuuucagaucucaaaggcucuuuucagagccaccaaaaaaaaaaaaaaaaaaaaaaaaaaaaaaaaaaaaaaaaaaaaaaaaaaaaaaaaaaaaaaaaaaaaaaaaaaaaaaaaaaaaaaaaaaaaaaaaaaaaa

SEQ ID NO: 38594 - RNA, 1748 nt, Artificial Sequence
  mRNA product Design a-1 (hSL-A100) comprising derived and/or modified sequence from LASV(LM776-SLE-2012;Clade IV)__AIT17824__GPCmut11 (opt4)
aggagagucccgcagucggcguccagcggcucugcuuguucgugugugugucguugcaggccuuauucaagcuuaccaugggccagaucgugaccuucuuccaggaggugccccacgugaucgaggaggugaugaacaucgugcugaucgcccugagcauccuggccgugcugaagggccuguacaacuucgccaccugcggccuggugggccuggugaccuuccugcugcugugcggcagaagcugcaccaccagcguguacaagggcguguacgagcugcagacccuggagcugaacauggagacccugaacaugaccaugccccugagcugcaccaagaacaacagccaccacuacaucauggugggcaacgagaccggccuggagcugacccugaccaacaccagcaucaucaaccacaaguucugcaaccugagcgacgcccacaagaagaaccuguacgaccacgcccugaugagcaucaucagcaccuuccaccugagcauccccaacuucaaccaguacgaggccaugagcugcgacuucaacggcggcaagaucagcgugcaguacaaccugagccacagcuacgccggcgacgccgccaaccacugcggcaccguggccaacggcgugcugcagaccuucaugagaauggccuggggcggcagcuacaucgcccuggacagcggccacggcaagugggacugcaucaugaccagcuaccaguaccugaucauccagaacaccaccugggaggaccacugccaguucagcagacccagccccaucggcuaccugggccugcugagccagagaaccagagacaucuacaucagcagaagacugcugggcaccuucaccuggacccugagcgacagcgagggcaaggacacccccggcggcuacugccugaccagauggaugcugaucgaggccgagcugaagugcuucggcaacaccgccguggccaagugcaacgagaagcacgacgaggaguucugcgacaugcugagacuguucgacuucaacaagcaggccauccagagacugaaggccgaggcccagaugagcauccagcugaucaacaaggccgugaacgcccugaucaacgaccagcugaucaugaagaaccaccugagagacaucaugggcauccccuacugcaacuacagcaaguacugcuaccugaaccacaccaccaccggcaagaccagccugcccaagugcugccuggugagcaacggcagcuaccugaacgagacccacuucagcgacgacaucgagcagcaggccgacaacaugaucaccgagaugcugcagaaggaguacauggagagacagggcaagaccccccugggccugguggaccuguucguguucagcaccagcuucuaccugaucagcaucuuccugcaccuggugaagauccccacccacagacacaucgugggcaagagcugccccaagccccacagacugaaccacaugggcaucugcagcugcggccuguacaagcagcccggcgugcccgugagauggaagagaugaggacuagucccuguucccagagcccacuuuuuuuucuuuuuuugaaauaaaauagccugucuuucagaucucaaaggcucuuuucagagccaccaaaaaaaaaaaaaaaaaaaaaaaaaaaaaaaaaaaaaaaaaaaaaaaaaaaaaaaaaaaaaaaaaaaaaaaaaaaaaaaaaaaaaaaaaaaaaaaaaaaaa

SEQ ID NO: 38595 - RNA, 1748 nt, Artificial Sequence
  mRNA product Design a-1 (hSL-A100) comprising derived and/or modified sequence from LASV(Mad39;Clade IV)__ANH09722__GPCmut11 (opt4)
aggagagucccgcagucggcguccagcggcucugcuuguucgugugugugucguugcaggccuuauucaagcuuaccaugggccagaucgugaccuucuuccaggaggugccccacgugaucgaggaggugaugaacaucgugcugaucgcccugagcauccuggccgugcugaagggccuguacaacguggccaccugcggccugaucggccuggugaccuuccugcugcugugcggcagaagcugcaccaccacccuguacaagggcguguacgagcugcaggcccuggagcugaacauggagacccugaacaugaccaugccccugagcugcaccaagaacaacagccaccacuacaucagagugggcaacgagaccggccuggagcugacccugaccaacaccagccugaucaaccacaaguucugcaaccugagcgacgcccacaagaagaaccuguacgaccacgcccugaugagcaucaucagcaccuuccaccugagcauccccaacuucaaccaguacgaggccaugagcugcgacuucaacgacggcaagaucagcgugcaguacaaccugagccacaccuacgccggcgacaccgccaaccacugcggcaccguggccaacggcgugcugcagaccuucaugagaauggccuggggcggcagcuacaucgcccuggacagcggcagaggcggcugggacugcaucaugaccagcuaccaguaccugaucauccagaacaccaccugggaggaccacugccaguucagcagacccagccccaucggcuaccugggccugcugagccagagaaccagagacaucuacaucagcagaagacugcugggcaccuucaccuggacccugagcgacagcgagggcaaggacacccccggcggcuacugccugaccagauggaugcugaucgaggccgagcugaagugcuucggcaacaccgccguggccaagugcaacgagaagcacgacgaggaguucugcgacaugcugagacuguucgacuucaacaagcaggccauccagagacugaaggccgaggcccagaugagcauccagcugaucaacaaggccgugaacgcccugaucaacgaccagcugaucaugaagaaccaccugagagacaucaugggcauccccuacugcaacuacagcaaguacugcuaccugaaccacaccgugaccggcaagaccagccugcccaagugcugccuggugagcaacggcagcuaccugaacgagacccacuucagcgacgacaucgagcagcaggccgacaacaugaucaccgagaugcugcagaaggaguacauggagagacagggcaagaccccccugggccugguggaccuguucguguucagcaccagcuucuaccugaucagcaucuuccugcaccuggugaagauccccacccacagacacguggugggcaagcccugccccaagccccacagacugaaccacaugggcaucugcagcugcggcuucuacaagcagcccggcgugcccgugagauggaagagaugaggacuagucccuguucccagagcccacuuuuuuuucuuuuuuugaaauaaaauagccugucuuucagaucucaaaggcucuuuucagagccaccaaaaaaaaaaaaaaaaaaaaaaaaaaaaaaaaaaaaaaaaaaaaaaaaaaaaaaaaaaaaaaaaaaaaaaaaaaaaaaaaaaaaaaaaaaaaaaaaaaaaa

SEQ ID NO: 38596 - RNA, 1748 nt, Artificial Sequence
  mRNA product Design a-1 (hSL-A100) comprising derived and/or modified sequence from LASV(Z0947-SLE-2011;Clade IV)__AIT17840__GPCmut11 (opt4)
aggagagucccgcagucggcguccagcggcucugcuuguucgugugugugucguugcaggccuuauucaagcuuaccaugggccagaucgugaccuucuuccaggaggugccccacgugaucgaggaggugaugaacaucgugcugaucgcccugagcauccuggccgugcugaagggccuguacaacuucgccaccugcggccuggugggccuggugaccuuccugcugcugugcggcagaagcugcaccaucagccuguacaagggcguguacgagcugcagacccuggagcugaacauggagacccugaacaugaccaugccccugagcugcaccaagaacaacagccaccacuacaucauggugggcaacgagaccggccuggagcugacccugaccaacaccagcaucaucaaccacaaguucugcaaccugagcgacgcccacaagaagaaccuguacgaccacgcccugaugagcaucaucagcaccuuccaccugagcauccccaacuucaaccaguacgaggccaugagcugcgacuucaacggcggcaagaucagcgugcaguacaaccugagccacagcuacgccggcgacgccgccaaccacugcggcaccguggccaacggcgugcugcagaccuucaugagaauggccuggggcggcagcuacaucgcccuggacagcggcagagacagaugggacugcaucaugaccagcuaccaguaccugaucauccagaacaccaccugggaggaccacugccaguucagcagacccagccccaucggcuaccugggccugcugagccagagaaccagagacaucuacaucagcagaagacugcugggcaccuucaccuggacccugagcgacagcgagggcaaggacacccccggcggcuacugccugaccagauggaugcugaucgaggccgagcugaagugcuucggcaacaccgccguggccaagugcaacgagaagcacgacgaggaguucugcgacaugcugagacuguucgacuucaacaagcaggccauccagagacugaaggccgaggcccagaugagcauccagcugaucaacaaggccgugaacgcccugaucaacgaccagcugaucaugaagaaccaccugagagacaucaugggcauccccuacugcaacuacagcaaguacugcuaccugaaccacaccaccaccggcaagaccagccugcccaagugcugccuggugagcaacggcagcuaccugaacgagacccacuucagcgacgacaucgagcagcaggccgacaacaugaucaccgagaugcugcagaaggaguacauggagagacagggcaagaccccccugggccugguggaccuguucguguucagcaccagcuucuaccugaucagcaucuuccugcaccuggugaagauccccacccacagacacaucgugggcaagcccugccccaagccccacagacugaaccacaugggcaucugcagcugcggccuguacaagcagcccggcgugcccgugaaguggaagagaugaggacuagucccuguucccagagcccacuuuuuuuucuuuuuuugaaauaaaauagccugucuuucagaucucaaaggcucuuuucagagccaccaaaaaaaaaaaaaaaaaaaaaaaaaaaaaaaaaaaaaaaaaaaaaaaaaaaaaaaaaaaaaaaaaaaaaaaaaaaaaaaaaaaaaaaaaaaaaaaaaaaaa

SEQ ID NO: 38597 - RNA, 1748 nt, Artificial Sequence
  mRNA product Design a-1 (hSL-A100) comprising derived and/or modified sequence from LASV(Josiah;Clade IV)__NP_694870__GPCmut11 (opt5)
aggagagucccgcagucggcguccagcggcucugcuuguucgugugugugucguugcaggccuuauucaagcuuaccaugggccagaucgugaccuucuuucaagaggucccccacguuauugaagaggugaugaacaucgugcugauugcccucagcguccuggcugugcuuaaggggcuguacaauuucgccacaugcggacucguuggccuggugacguuucuucugcucugugggagauccugcaccacaucucuguauaaaggagucuacgaacugcagacccucgagcugaacauggaaacacuuaauaugaccaugccucugagcuguacaaagaacaauucccaucacuauaucauggugggcaacgagaccgggcucgagcugacgcuuaccaauacaucuauuaucaaccauaaauucugcaaucugagcgacgcgcacaagaaaaaccucuacgaucaugcucugauguccaucauuucuaccuuucaccugagcaucccgaauuucaaccaguaugaagccauguccugugacuuuaauggaggcaagauuagcguucaguacaaccucucucacuccuaugccggcgaugcugccaaucauugcgggacaguggcuaacggaguccugcaaaccuucaugcggauggccuggggcgggagcuacaucgcgcuugacucuggacgcggcaacugggauuguauuaugacguccuaccaguaucugaucauucagaauacaaccugggaggaccacugccaguuuagcagacccucuccuaucggguaccucggacugcuuucccaacggacacgcgauaucuauauuagcagacggcugcucggcaccuucaccuggacacuguccgacucugaaggcaaggauacgcccgggggauacugucugacccgcuggaugcucaucgaggccgagcugaaaugcuuuggcaacacagcuguggccaaguguaaugaaaaacaugacgaggaguucugcgauaugcuuagacuguuugacuucaacaagcaggcuauucagcggcucaaagccgaagcgcagaugagcauccaacugauuaauaaggccgugaacgcucuuaucaaugaucagcugaucaugaagaaccaccuccgcgacauuauggggaucccuuauugcaauuacuccaaauauuguuaccugaaccacaccacaaccggaagaacgagccugcccaagugcugucucgucucuaauggcuccuaccugaacgaaacacauuucagcgacgauauugagcagcaagccgacaauaugaucaccgagaugcuucagaaagaauauauggagcggcaggggaagaccccucugggacucguugaucuguuuguguucucuaccagcuuuuaccugauuuccaucuuccuucaccucgugaaaaucccgacacaucgccacauugucggcaagucuugccccaaaccucauagacugaaccacaugggcaucuguagcugcgggcuguauaagcagcccggagugccuguuaaguggaaacggugaggacuagucccuguucccagagcccacuuuuuuuucuuuuuuugaaauaaaauagccugucuuucagaucucaaaggcucuuuucagagccaccaaaaaaaaaaaaaaaaaaaaaaaaaaaaaaaaaaaaaaaaaaaaaaaaaaaaaaaaaaaaaaaaaaaaaaaaaaaaaaaaaaaaaaaaaaaaaaaaaaaaa

SEQ ID NO: 38598 - RNA, 1745 nt, Artificial Sequence
  mRNA product Design a-1 (hSL-A100) comprising derived and/or modified sequence from LASV(LP;Clade I)__AAF86701__GPCmut11 (opt5)
aggagagucccgcagucggcguccagcggcucugcuuguucgugugugugucguugcaggccuuauucaagcuuaccaugggccagaucauuaccuucuuucaagaggugccccacgucaucgaagagguuaugaacauugugcugaucgcccucagccugcuugcuauucugaaggggcucuacaauaucgccacaugcggaaucauuggccugguggcguuccuuuuucugugugggaaauccugcucucucacgcugaagggaggcuaugaacugcagacccucgagcugaacauggaaacacuuaauaugaccaugccucugagcuguaccaaaaacuccucucaucacuacaucagagucgggaaugagacaggacucgagcugacacuuaccaacacgagcauuaucaaucauaaguucugcaaccuguccgacgcucacaaaaagaaucucuaugaucaugcccugaugucuauuaucagcaccuuucaccuguccauuccgaacuucaaucaguacgaagccaugagcugugacuuuaacggcggcaagaucucugugcaguauaaucucucccacagcuacgcuggggaugccgcugagcauugcggaacaguugccaacggcgugcugcaaaccuucaugcggauggcguggggagggcgcuauaucgcccuugacucuggcaaagggaauugggauuguauuaugacauccuaccaguaccugaucauucagaacaccacgugggaagaccacugccaguuuagcagacccucuccuaucggauaucucggccugcuuucccaacggacacgcgauauuuacaucagcagacggcugcucggcaccuucacauggacccuguccgacucugaggggaacgagacccccggaggcuauugucugacacgcuggaugcucaucgaagcugagcugaagugcuuugggaauacggccgucgcuaaauguaacgaaaagcaugaugaggaguucugcgacaugcuuagacuguuugauuucaauaaacaggccauucggcgccucaaggcggaagcccagaugagcauccagcugauuaacaaggcugugaaugcccuuaucaacgaccaacugauuaugaaaaaucaccucagagauaucaugggaaucccuuacugcaacuauuccaaguacuguuaucugaaucacaccagcucuggccggacaucccugcccaaaugcugucucauuagcaacgggucuuaccugaaugagacccaguucagcgacgacaucgaacagcaagcugauaacaugauuacagagaugcuucagaaggaauacaucgagcgccagggaaaaaccccucugggccucguugacauuuuuaucuucuccacgucuuuuuaucugauuagcaucuuccugcaucuuaucaagauuccgacacacagacauaucgugggcaaacccugcccuaagccccaccggcucaaucauaugggggucuguuccugcggacuguacaagcacccuggcgugcccaccaaauggaagcgcugaggacuagucccuguucccagagcccacuuuuuuuucuuuuuuugaaauaaaauagccugucuuucagaucucaaaggcucuuuucagagccaccaaaaaaaaaaaaaaaaaaaaaaaaaaaaaaaaaaaaaaaaaaaaaaaaaaaaaaaaaaaaaaaaaaaaaaaaaaaaaaaaaaaaaaaaaaaaaaaaaaaaa

SEQ ID NO: 38599 - RNA, 1745 nt, Artificial Sequence
  mRNA product Design a-1 (hSL-A100) comprising derived and/or modified sequence from LASV(803213;Clade II)__AAF86703__GPCmut11 (opt5)
aggagagucccgcagucggcguccagcggcucugcuuguucgugugugugucguugcaggccuuauucaagcuuaccaugggccagaucauuaccuucuuucaagaggugccccacgucaucgaagagguuaugaacauugugcugaucgcccucagccugcuugcuauucugaaggggaucuacaauguggccacaugcggacucuucggccugaucuccuuucuucugcucugugggagaucuugcagcgucacguauaaaggaguguacgaacugcagacccuggagcucaacauggcgaaucugaacaugacaaugccucuuuccuguaccaagaauaacucucaucacuauauuaugguuggcaaugaaacagggcuggagcucacccugacaaacaccagcaucauuaaucauaaauucugcaaccuuuccgacgcucacaagaaaaaucuguacgaucaugcccucaugucuaucauuagcacguuucaccuguccaucccgaacuucaaucaguaugaggccaugagcugugacuuuaacggaggcaagauuucugugcaguacaaucugucccacagcuucgcugucgaugccgcuaaccauugcggcaccaucgccaacggggugcuccaaacauuuaugcggauggcguggggaggcucuuauaucgcccuggacuccgggaagggaaauugggauuguauuaugaccagcuaccaguaccuuaucauucagaacacaaccugggaagaccacugccaguucucucgccccuccccuaucggcuaucuggggcuccugagccaaagaacgcgggauauuuacaucucccgcagacuucugggaacauuuaccuggacacucucugacagcgagggcaaugaagcucccggcggguauugucugacccgguggaugcugaucgaggccgagcucaaaugcuucggaaacaccgcuguugccaaguguaaugaaaaacaugaugaggaauuuugcgacaugcugcgccuuuucgauuucaacaagcaggcgauuaaaagacugaagacagaggcccagauguccauccagcucauuaauaaggcugugaacgcccugaucaaugaccaacuuauuaugaaaaaccaucugcgggauaucaugggcaucccuuacugcaauuauagccgcuacuguuaucucaaccacacggucaccgggaagacaucucugcccagaugcugucugguguccaauggaagcuaccucaacgaaacccacuuuucugacgacauugagcagcaggcugauaauaugaucacagagaugcugcaaaaagaauacauggaccggcagggcaagaccccucuugggcugguggaucucuucgucuuuagcacguccuucuaucugauuucuaucuuucugcaccuuguuaaaauuccgacacaucgccacaucgugggaaagcccugcccuaaaccccauagacucaaccacaugggcauuuguagcugcggccuguacaagcacccuggggugcccgucaaguggaaacggugaggacuagucccuguucccagagcccacuuuuuuuucuuuuuuugaaauaaaauagccugucuuucagaucucaaaggcucuuuucagagccaccaaaaaaaaaaaaaaaaaaaaaaaaaaaaaaaaaaaaaaaaaaaaaaaaaaaaaaaaaaaaaaaaaaaaaaaaaaaaaaaaaaaaaaaaaaaaaaaaaaaaa

SEQ ID NO: 38600 - RNA, 1745 nt, Artificial Sequence
  mRNA product Design a-1 (hSL-A100) comprising derived and/or modified sequence from LASV(GA391;Clade III)__CAA36645__GPCmut11 (opt5)
aggagagucccgcagucggcguccagcggcucugcuuguucgugugugugucguugcaggccuuauucaagcuuaccaugggccagaucgugaccuucuuucaagaggucccccacguuauugaagaggugaugaacaucgugcugauugcccucagcauccuggcuauucuuaaggggcuguacaaugucgccacaugcggacucaucggccuggugacguuccuucugcucuccgggagaucuuguagccugaucuauaaaggaaccuacgaacugcagacacucgagcugaacauggaaacccuuaauaugacaaugccucuguccugcaccaagaacaauucucaucacuauauucggguuggcaacgagacagggcucgagcugacccuuacgaauaccagcauccugaaccauaaauuuuguaaucucuccgacgcgcacaagcgcaaccuguacgaucauucucugaugagcauuaucuccacauuccaccucagcauuccgaauuuuaaccaguaugaagcuaugucuugcgacuucaauggaggcaaaaucaccgugcaguacaaccugucccacagcuuugccgucgaugccgcuggccauugugggacacuugccaauggagugcugcaaaccuucaugagaauggcuuggggcgggucuuauauugcccucgacuccggacggggcaacugggauugcaucaugacgagcuaccaguaccugaucauucagaacacaaccugggacgaucacugucaguuuucucgccccuccccuaucggguaucuuggacugcucagccaaagaacacgggacauuuacaucucccgcagacugcugggcaccuucaccuggacacucucugauagcgagggcaaugaaacgcccgggggauauugccugacccgguggaugcuuauugaggcggagcugaaguguuuuggcaacacagccguugcuaagugcaaugaaaaacaugacgaggaguucugugauaugcuccgccuguuugacuucaacaagcaggccaucagacggcuuaaaaccgaagcucagauguccauccagcugauuaauaaggccgugaacgcgcucaucaaugaucaacugauuaugaaaaaccaucugcgcgacaucauggggauuccuuacugcaauuauagcagauacugcuaucucaaccacacaucuaccggaaagacgucccugccccgguguugccuuaucagcaauggcucuuaccugaacgaaacaaaguucagcgacgauaucgagcagcaggccgacaauaugauuaccgagaugcuccaaaaagaauacaucgaucgccaggggaagaccccucugggacuggucgaccuuuuuguguucuccacaucuuuuuaucucauuagcaucuuccugcaccuggugaaaauuccgacccacagacauaucgucggcaagcccuguccuaaaccccaccggcucaaccauaugggcauuugcuccugugggcuguacaagcagccuggaguucccgugagauggaaacgcugaggacuagucccuguucccagagcccacuuuuuuuucuuuuuuugaaauaaaauagccugucuuucagaucucaaaggcucuuuucagagccaccaaaaaaaaaaaaaaaaaaaaaaaaaaaaaaaaaaaaaaaaaaaaaaaaaaaaaaaaaaaaaaaaaaaaaaaaaaaaaaaaaaaaaaaaaaaaaaaaaaaaa

SEQ ID NO: 38601 - RNA, 1748 nt, Artificial Sequence
  mRNA product Design a-1 (hSL-A100) comprising derived and/or modified sequence from LASV(AV;Clade V)__CCA30314__GPCmut11 (opt5)
aggagagucccgcagucggcguccagcggcucugcuuguucgugugugugucguugcaggccuuauucaagcuuaccaugggccagaucgugaccuucuuucaagaggucccccacguuauugaagaggugaugaacaucgugcugauugcccucagcauccuggcuguccuuaaggggcuguacaauauugccacaugcggacucaucggccugaucacguuccuucugcucugugggagauccugcucuagcaaccuguauaaaggaguguacgaacugcagucccucgaccugaauauggagacccuuaacaugacaaugccucugucuuguaccaagaauaacagccaucacuauauucggguuggcaaugauacagggcucgaacugacccuuacaaacaccuccauccugaaucauaaauuuugcaaccucucugacgcgcacaagaaagaucuguacgaccaugcucugaugagcauuaucuccacguuccaccucagcauuccgaauuuuaaccaguaugaggccaugucuugugauuucaauggaggcaagaucuccgugcaguacaaccugagccacucuuaugccauugacgcugccaaucauugcggcaccgucgcuaacgggauccuucaaacauuuaugcgcauggccuggggaggcuccuacaucgcgcuggauagcgggagaggaaacugggacuguauuaugaccucuuaccaguaucucaucauucagaauacaaccugggagaaccacugccaguucucccggcccagcccuaucggcuaccuggggcuucugucccaacgcacgagagauauuuauaucucucggcgccuccugggaacauuuaccuggacacugagcgacuccgaaggcaaugccacccccggcggguacugucucaccagauggaugcugaucgaggcugaacuuaagugcuucggaaacacagccguggcuaaauguaaugagaagcaugaugaggaauuuugcgacaugcugcgccucuucgauuuuaacaaacaggccauuagccggcugaagucugaggcgcagauguccauccagcuuauuaauaaagccguuaacgcucugaucaaugaccaacucauuaugaagaaccaccugagagacaucaugggcaucccuuauugcaauuacagcaaguauuguuaccugaaccacacgauuaccgggaaaacaucucuccccaagugcugucuggugagcaauggauccuaccuuaacgaaacccauuucucugaugacaucgagcagcaggccgauaauaugauuacagaaaugcugcaaaaagaguauauggagcggcagggcaagaccccucucgggcuggucgaccuguucguguuuagcacguccuucuaccuuaucagcauuuuucuccgccuggugaaaaucccgacacacagacauauugucggaaagcccugcccuaaaccccaccggcugaaccauaugggcaucuguucuugcggccucuauaagcagccugggguucccgugcgcuggaagagaugaggacuagucccuguucccagagcccacuuuuuuuucuuuuuuugaaauaaaauagccugucuuucagaucucaaaggcucuuuucagagccaccaaaaaaaaaaaaaaaaaaaaaaaaaaaaaaaaaaaaaaaaaaaaaaaaaaaaaaaaaaaaaaaaaaaaaaaaaaaaaaaaaaaaaaaaaaaaaaaaaaaaa

SEQ ID NO: 38602 - RNA, 1745 nt, Artificial Sequence
  mRNA product Design a-1 (hSL-A100) comprising derived and/or modified sequence from LASV(Togo/2016/7082;Clade VI)__AMR44577__GPCmut11 (opt5)
aggagagucccgcagucggcguccagcggcucugcuuguucgugugugugucguugcaggccuuauucaagcuuaccaugggccagaucauuaccuucuuucaagaggugccccacgucaucgaagagguuaugaacauugugcugaucgcccucagccugcuugcuauucugaaggggguguacaaugucgccacaugcggaaucaucggccucgugacguuccuguuucuuugugggagauccugcucucugauuuauaaaggaagcuacgaacuccagacccuggagcugaacauggaaacacucaauaugaccaugccucuguccuguacaaagaacucuagccaucacuauauccggguuggcaaugagaccgggcuugagcugacacucaccaacacguccauuaucaaucauaaauucugcaaccugucugacgcgcacaagcgcaaucuuuacgaucaugcucugaugagcauucucuccaccuuucaccugagcaucccgaacuucaaucaguaugaagccaugucuugugacuuuaacggaggcaaaauuuccgugcaguacaaucugagccacgccuaugcugucgaugccgcugagcauugcggcacaguggccaacgggguucuccaaaccuucaugagaauggcguggggaggcucuuacaucgcccuggacuccgggcggggaaauugggauuguaucaugacaagcuaccaguaucuuauuauccagaacaccacgugggaagaccacugccaguuuucucgccccuccccuauuggcuaccuggggcuccugagccaaagaacacgggauaucuauauuucccgcagacuucugggaaccuucacauggacccucucugacagcgagggcaacgagacccccggcggguacugucugacacgguggaugcugaucgaagcugagcucaagugcuuuggaaauacggccguggcuaaguguaacgaaaaacaugaugaggaguucugcgacaugcugcgccuuuuugauuucaauaagcaggccauccagagacugaaauccgaagcgcagaugagcauucaacucaucaacaaggccgucaaugcucugauuaacgaccagcuuaucaugaaaaaucaucugcgggauaugaugggcauuccuuauugcaacuacucuaaguauuguuaccucaaucacaccuccagcgggcgcacaucucugcccaagugcugucuggugagcaacggauccuaccucaaugagacccacuucucugacgacaucgaacagcaagccgauaacaugaucacagagaugcugcagaaagaauauauugacagacagggcaagaccccucuugggcugguggaucucuuugucuucagcacguccuuuuaccugaucagcauuuuccugcaccuuaucaaaauuccgacacaucggcacaucguuggaaagcccugcccuaaaccccaucgccucaaucacaugggcauuuguucuugcggccuguauaagcagccuggggugcccaccagauggaaacggugaggacuagucccuguucccagagcccacuuuuuuuucuuuuuuugaaauaaaauagccugucuuucagaucucaaaggcucuuuucagagccaccaaaaaaaaaaaaaaaaaaaaaaaaaaaaaaaaaaaaaaaaaaaaaaaaaaaaaaaaaaaaaaaaaaaaaaaaaaaaaaaaaaaaaaaaaaaaaaaaaaaaa

SEQ ID NO: 38603 - RNA, 1745 nt, Artificial Sequence
  mRNA product Design a-1 (hSL-A100) comprising derived and/or modified sequence from LASV(KAK-428;Clade n.d. (VII))__ANH09740__GPCmut11 (opt5)
aggagagucccgcagucggcguccagcggcucugcuuguucgugugugugucguugcaggccuuauucaagcuuaccaugggccagaucgugaccuucuuucaagaggucccccacguuauugaagaggugaugaacaucgugcugauugcccucagccugcuugcuauccugaaggggcucuacaauuucgccacaugcggagucauuggccugaucacguuucuucugcucugugggagauccugcucugcgaccuauaaaggacaguacgaacugcagacacuggagcucaacauggaaagccugaauaugaccaugccucuuuccuguacaaagaacaauucucaucacuauauccgggcuggcaacaauaccgggcuggagcucacacugaccaacacgagcauuaucucccauaaauucugcaaucuuucugacgcccacaagaaaaaccuguacgaucauacccucaugagcauuaucacaaccuuucaccuguccauuccgaauuucaaccaguaugaggccaugagcugugacuuuaauggaggcaagaucucuauucaauacaaccugucccacagcuaugcuggcgaugccgcucagcauugcgggacaguggccaauggaguucuccagaccuucaugcgcauggcguggggcgggucuuaccuggcccuugacuccggaagacggggcugggauuguaucaucagcucuuaccaguaucugauuauccaaaacacgacaugggacgaucacugccaguuuucccgccccagcccuauuggguaccucggauucgugucccagaagaccagagacaucuauauuucucggcgccugcuuggcacauuuaccuggacccugagcgauuccgaaggccaugacaugcccgggggauacugucucacaagauggaugcugaucgaggcugaucugaaaugcuucggcaacacggccgucgcuaaguguaaugaaaaacacgacgaggaguuuugcgauauguggcgccucuucgacuucaacaagcaggccauccaacggcugaaagcggaagcccagaugaauauucagcuuaucaacaaggcugugaaugcccugauuaacgaccaacucaugaugaagaaucaccugagagauaucauggggauuccuuauugcaacuacagcaaauuuuguuaucuuaauaacaccacaaccggacggacaucucugccccgcugcugucucaucuccaauggcagcuaccugaacgagacccauuucucugacgauaucgaacagcaggcugacaauaugauuacggagaugcugcagaaggaauacauggauagacaagggaaaacaccucucggacugguugaccuuuuuguguucagcaccuccuuuuaucugaucaccauuuuccuccaccuggucaagaucccgacacaucggcacauugugggcaaacccugcccuaagccccaucgccugaaccacaugggcaucuguucuugcgggcuuuacaaacagccuggagugcccgucagauggaagcggugaggacuagucccuguucccagagcccacuuuuuuuucuuuuuuugaaauaaaauagccugucuuucagaucucaaaggcucuuuucagagccaccaaaaaaaaaaaaaaaaaaaaaaaaaaaaaaaaaaaaaaaaaaaaaaaaaaaaaaaaaaaaaaaaaaaaaaaaaaaaaaaaaaaaaaaaaaaaaaaaaaaaa

SEQ ID NO: 38604 - RNA, 1745 nt, Artificial Sequence; identical to SEQ ID NO: 38598
  mRNA product Design a-1 (hSL-A100) comprising derived and/or modified sequence from LASV(Pinneo-NIG-1969;Clade I)__AIT17836__GPCmut11 (opt5)

SEQ ID NO: 38605 - RNA, 1745 nt, Artificial Sequence
  mRNA product Design a-1 (hSL-A100) comprising derived and/or modified sequence from LASV(ISTH0009-NIG-2011;Clade II)__AIT17404__GPCmut11 (opt5)
aggagagucccgcagucggcguccagcggcucugcuuguucgugugugugucguugcaggccuuauucaagcuuaccaugggccagaucauuaccuucuuucaagaggugccccacgucaucgaagagguuaugaacauugugcugaucgcccucagccugcuugcuauucugaaggggaucuacaauguggccacaugcggacucuucggccuggucuccuuucuucugcucugugggagaucuugcagcacgaccuauaaaggaguguacgaacugcagacacuggagcucgacauggcgucccugaacaugaccaugccucuuucuuguacaaagaauaacagccaucacuauaucaugguuggcaaugaaaccgggcuggagcucacacugaccaacacguccauuaucaaucauaaauucugcaaccuuucugaugcucacaagaaaaaucuguacgaccaugcccucaugagcauuaucuccaccuuucaccugagcauuccgaacuucaaucaguaugaggccaugucuugugauuuuaacggaggcaagaucuccgugcaguacaaucugagccacgcuuaugccgucgacgcugccaaccauugcggcacaauugcgaauggggugcuccaaaccuucaugcggauggccuggggaggcucuuacaucgcucuggauuccgggaagggaagcugggacuguaucaugacaucuuaccaguaucuuauuauccagaacaccacgugggaagaucacugccaguuuucccgccccagcccuauuggcuaccuggggcuccugucccaaagaacacgggacaucuauauuucucgcagacuucugggaaccuucacauggacccucagcgauuccgagggcaacgaaacccccggcggguacugucugacacgguggaugcugaucgaggccgagcucaaaugcuuuggaaauacggcuguugccaaguguaacgaaaaacaugacgaggaguucugcgauaugcugcgccuuuuugacuucaauaagcaggcgaucagacggcugaaaaccgaagcccagaugagcauucagcucaucaacaaggcugugaaugcccugauuaacgaucaacuuaucaugaagaaucaucugcgcgacauuaugggcaucccuuauugcaacuacucuaaauauuguuaccucaaucacacagucaccgggaagacaucccugcccagaugcugucuggugagcaacggaucuuaccucaaugaaacccacuucagcgacgauaucgagcagcaggcugacaacaugauuacggagcugcuucaaaaagaauauauggaucggcagggcaagacaccucuggggcucguggaccuguuugucuucuccaccucuuuuuaccugaucagcauuuuccuucaccucaucaaaauuccgacccaucgccacaucacaggaaagcccugcccuaaaccccauagacugaaucacaugggcauuuguuccugcggccuguauaagcacccugggguucccgugaaguggaaacggugaggacuagucccuguucccagagcccacuuuuuuuucuuuuuuugaaauaaaauagccugucuuucagaucucaaaggcucuuuucagagccaccaaaaaaaaaaaaaaaaaaaaaaaaaaaaaaaaaaaaaaaaaaaaaaaaaaaaaaaaaaaaaaaaaaaaaaaaaaaaaaaaaaaaaaaaaaaaaaaaaaaaa

SEQ ID NO: 38606 - RNA, 1745 nt, Artificial Sequence
  mRNA product Design a-1 (hSL-A100) comprising derived and/or modified sequence from LASV(ISTH2010-NIG-2012;Clade II)__AIT17482__GPCmut11 (opt5)
aggagagucccgcagucggcguccagcggcucugcuuguucgugugugugucguugcaggccuuauucaagcuuaccaugggccagaucauuaccuucuuucaagaggugccccacgucaucgaagagguuaugaacauugugcugaucgcccucagccugcuugcuauucugaaggggaucuacaauguggccacaugcggacucuucggccuggucuccuuucuucugcucugugggagaucuugcagcacgaccuauaaaggaguguacgaacugcagacacuggagcucgacauggcgucccugaacaugaccaugccucuuucuuguacaaagaauaacagccaucacuauaucaugguuggcaaugaaaccgggcuggagcucacacugaccaacacguccauuaucaaucauaaauucugcaaccuuucugaugcucacaagaaaaaucuguacgaccaugcccucaugagcauuaucuccaccuuucaccugagcauuccgaacuucaaucaguaugaggccaugucuugugauuuuaacggaggcaagaucuccgugcaguacaaucugagccacgcuuaugccgucgacgcugccaaccauugcggcacaauugcgaauggggugcuccaaaccuucaugcggauggccuggggaggcucuuacaucgcucuggauuccgggaagggaagcugggacuguaucaugacaucuuaccaguaucuuauuauccagaacauuaccugggaagaucacugccaguuuucccgccccagcccuaucggcuaccuggggcuccugucccaaagaacgcgggacauuuauaucucucgcagacuucugggaacauucaccuggacacucagcgauuccgagggcaacgaaacccccggcggguacugucugacccgguggaugcugaucgaggccgagcucaaaugcuuuggaaauacagcuguugccaaguguaacgaaaaacaugacgaggaguucugcgauaugcugcgccuuuuugacuucaauaagcaggcgauuagacggcugaaaacggaagcccagaugagcauccagcucauuaacaaggcugugaaugcccugaucaacgaucaacuuauuaugaagaaucaucugcgcgacaucaugggcaucccuuauugcaacuacucuaaauauuguuaccucaaucacaccgucacagggaagaccucccugcccagaugcugucuggugagcaacggaucuuaccucaaugaaacacacuucagcgacgauauugagcagcaggcugacaacaugaucaccgagcugcuucaaaaagaauauauugaucggcagggcaagacgccucuggggcucguggaccuguuugucuucuccacaucuuuuuaccugaucagcauuuuccuucaccucguuaaaaucccgacccaucgccacguggugggaaagcccugcccuaaaccccauagacugaaucacaugggcauuuguuccugcggccuguauaagcacccugggguccccgugaaguggaaacggugaggacuagucccuguucccagagcccacuuuuuuuucuuuuuuugaaauaaaauagccugucuuucagaucucaaaggcucuuuucagagccaccaaaaaaaaaaaaaaaaaaaaaaaaaaaaaaaaaaaaaaaaaaaaaaaaaaaaaaaaaaaaaaaaaaaaaaaaaaaaaaaaaaaaaaaaaaaaaaaaaaaaa

SEQ ID NO: 38607 - RNA, 1745 nt, Artificial Sequence
  mRNA product Design a-1 (hSL-A100) comprising derived and/or modified sequence from LASV(Lassa virus/H.sapiens-wt/NGA/2015/ISTH_0543;Clade II)__AVO03639__GPCmut11 (opt5)
aggagagucccgcagucggcguccagcggcucugcuuguucgugugugugucguugcaggccuuauucaagcuuaccaugggccagaucauuaccuucuuucaagaggugccccacgucaucgaagagguuaugaacauugugcugaucgcccucagccugcuugcuauucugaaggggaucuacaauguggccacaugcggacucuucggccuggucuccuuucuucugcucugugggagaucuugcagcacgaccuauaaaggaguguacgaacugcagacacuggagcucgacauggcgaaccugaauaugaccaugccucuuuccuguacaaagaacaauucucaucacuauaucaugguuggcaacgaaaccgggcuggagcucacacugaccaauacgagcauuaucaaccauaaauucugcaaucuuuccgaugcucacaagaaaaaccuguacgaccaugcccucaugucuauuaucagcaccuuucaccuguccauuccgaauuucaaccaguaugaggccaugagcugugauuuuaauggaggcaagaucucugugcaguacaaccugucccacacauaugcugucgacgccgcuaaucauugcggcaccauugccaacggggugcuccaaacauucaugcggauggcguggggaggcagcuacaucgcccuggauucugggaagggauccugggacuguaucaugaccagcuaccaguaucuuguuauucagaacacgacaugggaagaucacugccaguuuucucgccccuccccuaucggcuaccuggggcuccugagccaaagaacccgggacauuuauaucucccgcagacuucugggaacauucaccuggacccucucugauagcgagggcaaugaaacacccggcggguacugucugacgcgguggaugcugauugaggcugagcucaaaugcuuuggaaacaccgccguggcuaaguguaaugaaaaacaugacgaggaguucugcgauaugcugcgccuuuuugacuucaacaagcaggccaucagacggcugaaaacagaagcgcagauguccauccagcucauuaauaaggccgucaacgcucugaucaaugaucaacuuauuaugaagaaccaucugcgcgacaucaugggcauuccuuauugcaauuacagcaaauauuguuaccucaaccacaccgugacagggaagaccucucugcccagaugcugucugguguccaauggaagcuaccucaacgaaacgcacuucucugacgauaucgagcagcaggccgacaauaugaucacagagcugcuucaaaaagaauauauugaucggcagggcaagaccccucuggggcucgucgaccuguuuguuuucagcaccuccuuuuaccugaucucuauuuuccuucaccucgugaaaaucccgacacaucgccacauuaccggaaagcccugcccuaaaccccauagacugaaccacaugggcaucuguagcugcggccuguauaagcacccuggggugcccgucaaguggaaacggugaggacuagucccuguucccagagcccacuuuuuuuucuuuuuuugaaauaaaauagccugucuuucagaucucaaaggcucuuuucagagccaccaaaaaaaaaaaaaaaaaaaaaaaaaaaaaaaaaaaaaaaaaaaaaaaaaaaaaaaaaaaaaaaaaaaaaaaaaaaaaaaaaaaaaaaaaaaaaaaaaaaaa

SEQ ID NO: 38608 - RNA, 1745 nt, Artificial Sequence
  mRNA product Design a-1 (hSL-A100) comprising derived and/or modified sequence from LASV(Lassa virus/H.sapiens-wt/NGA/2016/ISTH_0009;Clade II)__AVO03571__GPCmut11 (opt5)
aggagagucccgcagucggcguccagcggcucugcuuguucgugugugugucguugcaggccuuauucaagcuuaccaugggccagaucauuaccuucuuucaagaggugccccacgucaucgaagagguuaugaacauugugcugaucgcccucagccugcuugcuauucugaaggggaucuacaauguggccacaugcggacuccugggccuugucuccuuccugcuccugugugggagaucuugcagcacgaccuauaaaggaguguacgaacugcagacacucgagcuggacauggcgucccuuaacaugaccaugccucugucuuguacaaagaauaacagccaucacuauaucaugguuggcaaugaaaccgggcucgagcugacacuuaccaacacguccauuaucaaucauaaauuuugcaaccugucugaugcucacaagaaaaaucucuacgaccaugcccugaugagcauuaucuccaccuuccaccugagcauuccgaacuuuaaucaguaugaggccaugucuugugauuucaacggaggccggaucuccgugcaguacaaucucagccacucuuaugcugucgacgccgcuaaccauugcggcacaauugccaauggggugcugcaaaccuuuaugcgcauggcguggggaggcuccuacaucgcccuugauagcgggaagggaucuugggacuguaucaugacauccuaccaguaucugauuauccagaacaccacgugggaagaucacugccaguucagcagacccuccccuauuggcuaccucgggcugcuuucucaacggacacgcgacaucuauauuagcagacggcugcucggaaccuuuacauggacccuguccgauagcgagggcaacgaaacccccggcggguacugucugacacgcuggaugcucaucgaggcugagcugaagugcuucggaaauacggccguugcuaaauguaacgaaaagcaugacgaggaauuuugcgauaugcuuagacuguucgacuuuaauaaacaggccauccggcgccucaagaccgaggcgcagaugucuauucagcugaucaacaaagccgugaaugcucuuauuaacgaucaacugaucaugaagaaucaccucagagacauuaugggcaucccuuauugcaacuacuccaaguauuguuaccugaaucacacagucaccgggaaaacaagccugccccggugcugucucgugucuaacggaagcuaccugaaugaaacccauuucuccgacgauaucgagcagcaggccgacaacaugauuacggagcuucugcaaaaggaauauaucgaucgccagggcaaaacaccucucgggcugguggaccuguucgucuuuucuaccagcuucuaccuuauuuccaucuuucuccaccugguuaagauuccgacccauagacacaucacaggaaaacccugcccuaagccccaucggcugaaucacaugggcauuuguagcugcggccucuauaaccacccuggggugcccgugaaauggaagcgcugaggacuagucccuguucccagagcccacuuuuuuuucuuuuuuugaaauaaaauagccugucuuucagaucucaaaggcucuuuucagagccaccaaaaaaaaaaaaaaaaaaaaaaaaaaaaaaaaaaaaaaaaaaaaaaaaaaaaaaaaaaaaaaaaaaaaaaaaaaaaaaaaaaaaaaaaaaaaaaaaaaaaa

SEQ ID NO: 38609 - RNA, 1745 nt, Artificial Sequence
  mRNA product Design a-1 (hSL-A100) comprising derived and/or modified sequence from LASV(Lassa virus/H.sapiens-wt/NGA/2016/ISTH_0017;Clade II)__AVO03567__GPCmut11 (opt5)
aggagagucccgcagucggcguccagcggcucugcuuguucgugugugugucguugcaggccuuauucaagcuuaccaugggccagaucauuaccuucuuucaagaggugccccacgucaucgaagagguuaugaacauugugcugaucgcccucagccugcuugcuauucugaaggggaucuacaauguggccacaugcggacucuucggccuggucuccuuucuucugcucugugggagaucuugcagcacgaccuauaaaggaguguacgaacugcagacacuggagcucgacauggcgucccugaacaugaccaugccucuuucuuguacaaagaauaacagccaucacuauaucaugguuggcaaugaaaccgggcuggagcucacacugaccaacacguccauuaucaaucauaaauucugcaaccuuucugaugcucacaagaaaaaucuguacgaccaugcccucaugagcauuaucuccaccuuucaccugagcauuccgaacuucaaucaguaugaggccaugucuugugauuuuaacggaggcaagaucuccgugcaguacaaucugagccacacauaugcuauugacgccgcuaaccauugcggcaccaucgccaaugggguccuccaaacauucaugcggauggcguggggaggcucuuacaucgcccuggauuccgggaagggaagcugggacuguauuaugaccucuuaccaguaucuuaucauucagaacacgacaugggaagaucacugccaguuuucccgccccagcccuaucggcuaccuggggcuccugucccaaagaacccgggacauuuauaucucucgcagacuucugggaacauucaccuggacccucagcgauuccgagggcaacgaaacacccggcggguacugucugacgcgguggaugcugaucgaggcugagcucaaaugcuuuggaaauaccgccguggcuaaguguaacgaaaaacaugacgaggaguucugcgauaugcugcgccuuuuugacuucaauaagcaggccauuagacggcugaaaacagaagcgcagaugagcauccagcucauuaacaaggccguuaaugcucugaucaacgaucaacuuauuaugaagaaucaucugcgcgacaucaugggcaucccuuauugcaacuacucuaaauauuguuaccucaaucacaccgugacagggaagaccucccugcccagaugcugucuggucagcaacggaucuuaccucaaugaaacgcacuucagcgacgauauugagcagcaggccgacaacaugaucacagagcugcuucaaaaagaauauauggaucggcagggcaagaccccucuggggcucguggaccuguuuguguucuccaccucuuuuuaccugauuagcaucuuccuucaccucguccgcauuccgacacauagacacguuaucggaaaacccugcccuaagccccaucggcugaaucacaugggcauuuguuccugcggccuguauaaacacccuggggugcccgugaaguggaagcgcugaggacuagucccuguucccagagcccacuuuuuuuucuuuuuuugaaauaaaauagccugucuuucagaucucaaaggcucuuuucagagccaccaaaaaaaaaaaaaaaaaaaaaaaaaaaaaaaaaaaaaaaaaaaaaaaaaaaaaaaaaaaaaaaaaaaaaaaaaaaaaaaaaaaaaaaaaaaaaaaaaaaaa

SEQ ID NO: 38610 - RNA, 1745 nt, Artificial Sequence
  mRNA product Design a-1 (hSL-A100) comprising derived and/or modified sequence from LASV(Lassa virus/H.sapiens-wt/NGA/2018/ISTH_0959;Clade II)__AVV65099__GPCmut11 (opt5)
aggagagucccgcagucggcguccagcggcucugcuuguucgugugugugucguugcaggccuuauucaagcuuaccaugggccagaucauuaccuucuuucaagaggugccccacgucaucgaagagguuaugaacauugugcugaucgcccucagccugcuugcuauucugaaggggaucuacaauguggucacaugcggacucuucggccugguguccuuucuucugcucugugggagaucuugcagcacgaccuauaaaggaguuuacgaacugcagacacuggagcucgacauggccucccugaacaugaccaugccucuuucuuguacaaagaauaacagccaucacuauaucauggugggcaaugaaaccgggcuggagcucacacugaccaacacguccauuaucaaucauaaauucugcaaccuuucugaugcgcacaagaaaaaucuguacgaccaugcucucaugagcauuaucuccaccuuucaccugagcauuccgaacuucaaucaguaugaggccaugucuugugauuuuaacggaggcaagaucuccguccaguacaaucugagccacgccuaugcuauugacgccgcuaaccauugcggcacaaucgccaauggggugcuccaaaccuucaugcggauggcguggggaggcucuuacaucgcccuggauuccgggaagggaagcugggacuguauuaugacaucuuaccaguaucuuaucauucagaacaccacgugggaagaucacugccaguuuucccgccccagcccuaucggcuaccuggggcuccugucccaaagaacacgggacauuuauaucucucgcagacuucugggaaccuucacauggacccucagcgauuccgagggcaacgaaacccccggcggguacugucugacacgguggaugcugaucgaggcugagcucaaaugcuuuggaaauacggccguugcuaaguguaacgaaaaacaugacgaggaguucugcgauaugcugcgccuuuuugacuucaauaagcaggccauuagacggcugaaaaccgaagcgcagaugagcauccagcucauuaacaaggccgugaaugcucugaucaacgaucaacuuauuaugaagaaucaucugcgcgacaucaugggcaucccuuauugcaacuacucuaaauauuguuaccucaaucacacagucaccgggaagacaucccugcccagaugcugucuggugagcaacggaucuuaccucaaugaaacccacuucagcgacgauauugagcagcaggccgacaacaugaucacggagcugcuucaaaaagaauauauugaucggcagggcaagacaccucuggggcucguggaccuguuugucuucuccaccucuuuuuaccugaucagcauuuuccuucaccucguuaaaaucccgacccaucgccacgugauuggaaagcccugcccuaaaccccauagacugaaucacaugggcaucuguuccugcggccuguauaagcacccuggggugcccgucaaguggaaacggugaggacuagucccuguucccagagcccacuuuuuuuucuuuuuuugaaauaaaauagccugucuuucagaucucaaaggcucuuuucagagccaccaaaaaaaaaaaaaaaaaaaaaaaaaaaaaaaaaaaaaaaaaaaaaaaaaaaaaaaaaaaaaaaaaaaaaaaaaaaaaaaaaaaaaaaaaaaaaaaaaaaaa

SEQ ID NO: 38611 - RNA, 1745 nt, Artificial Sequence
  mRNA product Design a-1 (hSL-A100) comprising derived and/or modified sequence from LASV(LASV003-NIG-2008;Clade II)__AIT17580__GPCmut11 (opt5)
aggagagucccgcagucggcguccagcggcucugcuuguucgugugugugucguugcaggccuuauucaagcuuaccaugggccagaucauuaccuucuuucaagaggugccccacgucaucgaagagguuaugaacauugugcugaucgcccucagccugcuugcuauucugaaggggaucuacaauguggccacaugcggacucuucggccuggucuccuuucuucugcucugugggagaucuugcagcacgaccuauaaaggaguguacgaacugcagacacuggagcucgacauggcgucccugaacaugaccaugccucuuucuuguacaaagaauaacagccaucacuauaucaugguuggcaaugaaaccgggcuggagcucacacugaccaacacguccauuaucaaucauaaauucugcaaccuuucugaugcucacaagaaaaaucuguacgaccaugcccucaugagcauuaucuccaccuuucaccugagcauuccgaacuucaaucaguaugaggccaugucuugugauuuuaacggaggcaagaucuccgugcaguacaaucugagccacacauaugcugucgacgccgcuaaccauugcggcaccauugccaauggggugcuccaaacauucaugcggauggcguggggaggcucuuacaucgcccuggauuccgggaagggaagcugggacuguaucaugaccucuuaccaguaucuuauuauccagaacacgacaugggaagaucacugccaguuuucccgccccagcccuauuggcuaccuggggcuccugucccaaagaacccgggacaucuauauuucucgcagacuucugggaacauucaccuggacccucagcgauuccgagagcaacgaaacacccggcggcuacugucugacgcgguggaugcugaucgaggcugagcucaaaugcuuugggaauaccgccguugcuaaguguaacgaaaaacaugacgaggaguucugcgauaugcugcgccuuuuugacuucaauaagcaggccaucagacggcugaaagcggaagcccagaugucuauucagcucaucaacaaggcugugaaugcccugauuaacgaucaacuuaucaugaagaaucaucugcgcgacauuaugggaaucccuuauugcaacuacuccaaauauuguuaccucaaucacacagucaccggcagaacaagccugccccggugcugucuggugucuaacgggagcuaccucaaugaaacccacuucuccgacgauaucgagcagcaggcugacaacaugauuacggagcugcuucaaaaggaauauauggaucgccagggaaaaacaccucugggccucguggaccuguuugucuucucuaccagcuuuuaccugaucuccauuuuccuucaccucguuaagaucccgacccauagacacgugauugggaaacccugcccuaagccccaucggcugaaucacaugggaaucuguagcugcggccuguauaaacacccuggcgugcccgucaaguggaagcgcugaggacuagucccuguucccagagcccacuuuuuuuucuuuuuuugaaauaaaauagccugucuuucagaucucaaaggcucuuuucagagccaccaaaaaaaaaaaaaaaaaaaaaaaaaaaaaaaaaaaaaaaaaaaaaaaaaaaaaaaaaaaaaaaaaaaaaaaaaaaaaaaaaaaaaaaaaaaaaaaaaaaaa

SEQ ID NO: 38612 - RNA, 1745 nt, Artificial Sequence
  mRNA product Design a-1 (hSL-A100) comprising derived and/or modified sequence from LASV(LASV035-NIG-2009;Clade II)__AIT17588__GPCmut11 (opt5)
aggagagucccgcagucggcguccagcggcucugcuuguucgugugugugucguugcaggccuuauucaagcuuaccaugggccagaucauuaccuucuuucaagaggugccccacgucaucgaagagguuaugaacauugugcugaucgcccucagccugcuugcuauucugaaggggaucuacaauguggccacaugcggacucuucggccuggucuccuuucuucugcucugugggagaucuugcagcacgaccuauaaaggaguguacgaacugcagacacuggagcucgacauggcgucccugaacaugaccaugccucuuucuuguacaaagaauaacagccaucacuauaucaugguuggcaaugaaaccgggcuggagcucacacugaccaacacguccauuaucaaucauaaauucugcaaccuuucugaugcucacaagaaaaaucuguacgaccaugcccucaugagcauuaucuccaccuuucaccugagcauuccgaacuucaaucaguaugaggccaugucuugugauuuuaacggaggcaagaucuccgugcaguacaaucugagccacgcuuaugccgucgacgcugccaaccauugcggcacaauugcgaauggggugcuccaaaccuucaugcggauggccuggggaggcucuuacaucgcucuggauuccgggaagggaagcugggacuguaucaugacaucuuaccaguaucuuauuauccagaacaccacgugggaagaucacugccaguuuucccgccccagcccuauuggcuaccuggggcuccugucccaaagaacacgggacaucuauauuucucgcagacuucugggaaccuucacauggacccucagcgauuccgagggcaacgaaacccccggcggguacugucugacacgguggaugcugaucgaggccgagcucaaaugcuuuggaaauacggcuguugccaaguguaacgaaaaacaugacgaggaguucugcgauaugcugcgccuuuuugacuucaauaagcaggcgaucagacggcugaaagccgaagcucagaugagcauucagcucaucaacaaggccgugaaugcucugauuaacgaucaacuuaucaugaagaaucaucugcgcgacauuaugggcaucccuuauugcaacuacucuaaauauuguuaccucaaucacaccgucacagggaagaccucccugcccagaugcugucuggugagcaacggaucuuaccucaaugaaacacacuucagcgacgauaucgagcagcaggccgacaacaugauuaccgagcugcuucaaaaagaauauaucgaucggcagggcaagacgccucuggggcucguggaccuguuugucuucuccacaucuuuuuaccugauuagcaucuuccuucaccucguuaaaauuccgacccaucgccacgugaucggaaagcccugcccuaaaccccauagacugaaucacaugggcauuuguuccugcggccuguauaagcacccuggggugcccgucaaguggaaacggugaggacuagucccuguucccagagcccacuuuuuuuucuuuuuuugaaauaaaauagccugucuuucagaucucaaaggcucuuuucagagccaccaaaaaaaaaaaaaaaaaaaaaaaaaaaaaaaaaaaaaaaaaaaaaaaaaaaaaaaaaaaaaaaaaaaaaaaaaaaaaaaaaaaaaaaaaaaaaaaaaaaaa

SEQ ID NO: 38613 - RNA, 1745 nt, Artificial Sequence
  mRNA product Design a-1 (hSL-A100) comprising derived and/or modified sequence from LASV(LASV1000-NIG-2009;Clade II)__AIT17782__GPCmut11 (opt5)
aggagagucccgcagucggcguccagcggcucugcuuguucgugugugugucguugcaggccuuauucaagcuuaccaugggccagaucauuaccuucuuucaagaggugccccacgucaucgaagagguuaugaacauugugcugaucgcccucagccugcuugcuauucugaaggggaucuacaauguggccacaugcggacucuucggccuggucuccuuucuucugcucugugggagaucuugcagcacgaccuauaaaggaguguacgaacugcagacacuggagcucgacauggcgucccugaacaugaccaugccucuuucuuguacaaagaauaacagccaucacuauaucaugguuggcaaugaaaccgggcuggagcucacacugaccaacacguccauuaucaaucauaaauucugcaaccuuucugaugcucacaagaaaaaucuguacgaccaugcccucaugagcauuaucuccaccuuucaccugagcauuccgaacuucaaucaguaugaggccaugucuugugauuuuaacggaggcaagaucuccgugcaguacaaucugagccacacauaugcugucgacgccgcuaaccauugcggcaccauugccaauggggugcuccaaacauucaugcggauggcguggggaggcucuuacaucgcccuggauuccgggaagggaagcugggacuguaucaugaccucuuaccaguaucuuauuauccagaacacgacaugggaagaucacugccaguuuucccgccccagcccuauuggcuaccuggggcuccugucccaaagaacccgggacaucuauauuucucgcagacuucugggaacauucaccuggacccucagcgauuccgagggcaacgaaacacccggcggguacugucugacgcgguggaugcugaucgaggcugagcucaaaugcuuuggaaauaccgccguugcuaaguguaacgaaaaacaugacgaggaguucugcgauaugcugcgccuuuuugacuucaauaagcaggccaucaaaagacugaagacagaagcgcagaugagcauucagcucaucaacaaggccgugaaugcucugauuaacgaucaacuuaucaugaaaaaucaucugcgggacauuaugggcaucccuuauugcaacuacucuaaguauuguuaccucaaucacaccgucacagggaaaaccucccugccccgcugcugucuggugagcaacggaucuuaccucaaugaaacgcacuucagcgacgauaucgagcagcaggccgacaacaugauuacagagcugcuucaaaaggaauauaucgauagacagggcaaaaccccucuggggcucguggaccuguuugucuucuccaccucuuuuuaccugauuagcaucuuccuucaccucguuaagauuccgacacaucggcacguggugggaaaacccugcccuaagccccaucgccugaaucacaugggcaucuguuccugcggccuguauaagcacccugggguccccgugaaauggaagagaugaggacuagucccuguucccagagcccacuuuuuuuucuuuuuuugaaauaaaauagccugucuuucagaucucaaaggcucuuuucagagccaccaaaaaaaaaaaaaaaaaaaaaaaaaaaaaaaaaaaaaaaaaaaaaaaaaaaaaaaaaaaaaaaaaaaaaaaaaaaaaaaaaaaaaaaaaaaaaaaaaaaaa

SEQ ID NO: 38614 - RNA, 1745 nt, Artificial Sequence
  mRNA product Design a-1 (hSL-A100) comprising derived and/or modified sequence from LASV(LASV221-NIG-2010;Clade II)__AIT17624__GPCmut11 (opt5)
aggagagucccgcagucggcguccagcggcucugcuuguucgugugugugucguugcaggccuuauucaagcuuaccaugggccagaucauuaccuucuuucaagaggugccccacgucaucgaagagguuaugaacauugugcugaucgcccucagccugcuugcuauucugaaggggaucuacaauguggccacaugcggacucuucggccuggucuccuuucuucugcucugugggagaucuugcagcacgaccuauaaaggaguguacgaacugcagacacuggagcucgacauggcgucccugaacaugaccaugccucuuucuuguacaaagaauaacagccaucacuauaucaugguuggcaaugaaaccgggcuggagcucacacugaccaacacguccauuaucaaucauaaauucugcaaccuuucugaugcucacaagaaaaaucuguacgaccaugcccucaugagcauuaucuccaccuuucaccugagcauuccgaacuucaaucaguaugaggccaugucuugugauuuuaacggaggcaagaucuccgugcaguacaaucugagccacacauaugcuauugacgccgcuaaccauugcggcaccaucgccaaugggguccuccaaacauucaugcggauggcguggggaggcucuuacaucgcccuggauuccgggaagggaagcugggacuguauuaugaccucuuaccaguaucuuaucauucagaacacgacaugggaagaucacugccaguuuucccgccccagcccuaucggcuaccuggggcuccugucccaaagaacccgggacauuuauaucucucgcagacuucugggaacauucaccuggacccucagcgauuccgagggcaacgaaacacccggcggguacugucugacgcgguggaugcugaucgaggcugagcucaaaugcuuuggaaauaccgccguggcuaaguguaacgaaaaacaugacgaggaguucugcgauaugcugcgccuuuuugacuucaauaagcaggccauuagacggcugaaaacagaagcgcagaugagcauccagcucauuaacaaggccguuaaugcucugaucaacgaucaacuuauuaugaagaaucaucugcgcgacaucaugggcaucccuuauugcaacuacucuaaauauuguuaccucaaucacaccgugacagggaagaccucccugcccagaugcugucuggucagcaacggaucuuaccucaaugaaacgcacuucagcgacgauauugagcagcaggccgacaacaugaucacagagaugcugcaaaaagaauauauggaucggcagggcaagaccccucuugggcugguggaccucuuuguguucuccaccucuuuuuaccugauuagcaucuuccugcaccuugucaaaauuccgacacaucgccacguuaucggaaagcccugcccuaaaccccauagacucaaucacaugggcauuuguuccugcggccuguauaagcacccuggggugcccgugaaguggaaacggugaggacuagucccuguucccagagcccacuuuuuuuucuuuuuuugaaauaaaauagccugucuuucagaucucaaaggcucuuuucagagccaccaaaaaaaaaaaaaaaaaaaaaaaaaaaaaaaaaaaaaaaaaaaaaaaaaaaaaaaaaaaaaaaaaaaaaaaaaaaaaaaaaaaaaaaaaaaaaaaaaaaaa

SEQ ID NO: 38615 - RNA, 1745 nt, Artificial Sequence
  mRNA product Design a-1 (hSL-A100) comprising derived and/or modified sequence from LASV(LASV237-NIG-2010;Clade II)__AIT17638__GPCmut11 (opt5)
aggagagucccgcagucggcguccagcggcucugcuuguucgugugugugucguugcaggccuuauucaagcuuaccaugggccagaucauuaccuucuuucaagaggugccccacgucaucgaagagguuaugaacauugugcugaucgcccucagccugcuugcuauucugaaggggaucuacaauguggccacaugcggacucuucggccuggucuccuuucuucugcucugugggagaucuugcagcacgaccuauaaaggaguguacgaacugcagacacuggagcucgacauggcgucccugaacaugaccaugccucuuucuuguacaaagaauaacagccaucacuauaucaugguuggcaaugaaaccgggcuggagcucacacugaccaacacguccauuaucaaucauaaauucugcaaccuuucugaugcucacaagaaagaccuguacgaucaugcccucaugagcauuaucuccaccuuucaccugagcauuccgaauuucaaccaguaugaggccaugucuugugacuuuaauggaggcaagaucuccgugcaguacaaccugagccacacauaugcugucgaugccgcuaaucauugcggcaccauugccaacggggugcuccaaacauucaugcggauggcguggggaggcucuuacaucgcccuggacuccgggaagggaagcugggauuguaucaugaccucuuaccaguaucuuauuauccagaauacgacaugggaagaccacugccaguuuucccgccccagcccuauuggcuaccuggggcuccugucccaaagaacccgggauaucuauauuucucgcagacuucugggaacauucaccuggacccucagcgacuccgagggcaacgaaacacccggcggguacugucugacgcgguggaugcugaucgaggcugagcucaaaugcuuuggaaacaccgccguugcuaaguguaaugaaaaacaugaugaggaguucugcgacaugcugcgccuuuuugauuucaacaagcaggccaucagacggcugaaaacagaagcgcagaugagcauucagcucaucaauaaggccgugaacgcucugauuaaugaccaacuuaucaugaagaaccaucugcgcgacauuaugggcaucccuuauugcaauuacucuaaauauuguuaccucaaccacaccgucacagggaagaccucccugcccagaugcugucuggugagcaauggaucuuaccucaacgaaacgcacuucagcgaugacaucgagcagcaggccgauaauaugauuacagagcugcuucaaaaagaauauauggaccggcagggcaagaccccucuggggcucguggaucuguuugucuucuccaccucuuuuuaccugaucagcauuuuccuucaccucaucaaaauuccgacacaucgccacaucaccggaaagcccugcccuaaaccccauagacugaaccacaugggcauuuguuccugcggccuguauaagcacccugggguucccgugaaguggaaacggugaggacuagucccuguucccagagcccacuuuuuuuucuuuuuuugaaauaaaauagccugucuuucagaucucaaaggcucuuuucagagccaccaaaaaaaaaaaaaaaaaaaaaaaaaaaaaaaaaaaaaaaaaaaaaaaaaaaaaaaaaaaaaaaaaaaaaaaaaaaaaaaaaaaaaaaaaaaaaaaaaaaaa

SEQ ID NO: 38616 - RNA, 1745 nt, Artificial Sequence
  mRNA product Design a-1 (hSL-A100) comprising derived and/or modified sequence from LASV(LASV253-NIG-2011;Clade II)__AIT17670__GPCmut11 (opt5)
aggagagucccgcagucggcguccagcggcucugcuuguucgugugugugucguugcaggccuuauucaagcuuaccaugggccagaucauuaccuucuuucaagaggugccccacgucaucgaagagguuaugaacauugugcugaucgcccucagccugcuugcuauucugaaggggaucuacaauguggccacaugcggacucuucggccuggucuccuuucuucugcucugugggagaucuugcagcacgaccuauaaaggaguguacgaacugcagacacuggagcucgacauggcgucccugaacaugaccaugccucuuucuuguacaaagaauaacagccaucacuauaucaugguuggcaaugaaaccgggcuggagcucacacugaccaacacguccauuaucaaucauaaauucugcaaccuuucugaugcucacaagaaaaaucuguacgaccaugcccucaugagcauuaucuccaccuuucaccugagcauuccgaacuucaaucaguaugaggccaugucuugugauuuuaacggaggcaagaucuccgugcaguacaaucugagccacacauaugcugucgacgccgcuaaccauugcggcaccauugccaauggggugcuccaaacauucaugcggauggcguggggaggcucuuacaucgcccuggauuccgggaagggaagcugggacuguaucaugaccucuuaccaguaucuuauuauccagaacacgacaugggaagaucacugccaguuuucccgccccagcccuauuggcuaccuggggcuccugucccaaagaacccgggacaucuauauuucucgcagacuucugggaacauucaccuggacccucagcgauuccgagggcaacgaaacacccggcggguacugucugacgcgguggaugcugaucgaggcugagcucaaaugcuuuggaaauaccgccguugcuaaguguaacgaaaaacaugacgaggaguucugcgauaugcugcgccuuuuugacuucaauaagcaggccaucagacggcugaaagcggaagcccagaugagcauucagcucaucaacaaggcugugaaugcccugauuaacgaucaacuuaucaugaagaaucaucugcgcgacauuaugggcaucccuuauugcaacuacucuaaauauuguuaccucaaucacacagucaccgggagaacaucccugccccggugcugucuggugagcaacggaucuuaccucaaugaaacccacuucagcgacgauaucgagcagcaggcugacaacaugauuacggagcugcuucaaaaggaauauaucgaucgccagggcaaaacaccucuggggcucguggaccuguuugucuucuccaccucuuuuuaccugauuagcaucuuccuucaccucguuaagauuccgacccauagacacaucauuggaaaacccugcccuaagccccaucggcugaaucacaugggcaucuguuccugcggccuguauaaacacccuggggugcccgugaaguggaagcgcugaggacuagucccuguucccagagcccacuuuuuuuucuuuuuuugaaauaaaauagccugucuuucagaucucaaaggcucuuuucagagccaccaaaaaaaaaaaaaaaaaaaaaaaaaaaaaaaaaaaaaaaaaaaaaaaaaaaaaaaaaaaaaaaaaaaaaaaaaaaaaaaaaaaaaaaaaaaaaaaaaaaaa

SEQ ID NO: 38617 - RNA, 1745 nt, Artificial Sequence
  mRNA product Design a-1 (hSL-A100) comprising derived and/or modified sequence from LASV(LASV254-NIG-2011;Clade II)__AIT17674__GPCmut11 (opt5)
aggagagucccgcagucggcguccagcggcucugcuuguucgugugugugucguugcaggccuuauucaagcuuaccaugggccagaucauuaccuucuuucaagaggugccccacgucaucgaagagguuaugaacauugugcugaucgcccucagccugcuugcuauucugaaggggaucuacaauguggccacaugcggacucuucggccuggucuccuuucuucugcucugugggagaucuugcagcacgaccuauaaaggaguguacgaacugcagacacuggagcucgacaugaccaaccugaauaugacaaugccucuuuccuguaccaagaacaauucucaucacuauaucaugguuggcaacgaaacagggcuggagcucacccugacgaauaccagcauuaucaaccauaaauucugcaaucuuuccgaugcgcacaagaaaaaccuguacaaucaugcucucaugucuauuaucagcacauuucaccuguccauuccgaacuucaaucaguaugaggccaugagcugugacuuuaacggaggcaagaucucugugcaguacaaucugucccacagcuaugccgucgaugcugccaaccauugcggcaccauugcuaacggggugcuccaaacauucaugcggauggccuggggaggcucuuacaucgcgcuggacuccgggaagggaaauugggauuguaucaugaccagcuaccaguaucuuauuauccagaacacgacaugggaagaccacugccaguuuucucgccccuccccuauuggcuaccuggggcuccugagccaaagaacccgggauaucuauauuucccgcagacuucugggaacauucaccuggacccucucugacagcgagggcaaugaaacacccggcggguacugucugacgcgguggaugcugaucgaggccgagcucaaaugcuuuggaaacaccgcuguugccaaguguaaugaaaaacaugaugaggaguucugcgacaugcugcgccuuuuugauuucaacaagcaggcuaucagacggcugaaaacagaagcccaggcgaauauucagcucaucaacaaggccgugaaugcucugauuaacgaccaacuuaucaugaagaaucaucugcgcgauauuaugggcaucccuuauugcaacuacuccaaauauuguuaccucaaucacaccgucacagggaagaccagccugcccagaugcugucuggugucuaacggauccuaccucaaugaaacgcacuucagcgacgacaucgagcagcaggccgauaacaugauuacagagcugcuucaaaaagaauauauggaccggcagggcaagaccccucuggggcucguggaucuguuugucuucucuaccagcuuuuaccugaucuccauuuuccuucaccucguuaaaaucccgacacaucgccacgugauuggaaagcccugcccuaaaccccauagacugaaccacaugggcaucuguucuugcggccuguauaagcacccuggggugcccgucaaguggaaacggugaggacuagucccuguucccagagcccacuuuuuuuucuuuuuuugaaauaaaauagccugucuuucagaucucaaaggcucuuuucagagccaccaaaaaaaaaaaaaaaaaaaaaaaaaaaaaaaaaaaaaaaaaaaaaaaaaaaaaaaaaaaaaaaaaaaaaaaaaaaaaaaaaaaaaaaaaaaaaaaaaaaaa

SEQ ID NO: 38618 - RNA, 1745 nt, Artificial Sequence
  mRNA product Design a-1 (hSL-A100) comprising derived and/or modified sequence from LASV(Nig08-A19;Clade III)__ADU56618__GPCmut11 (opt5)
aggagagucccgcagucggcguccagcggcucugcuuguucgugugugugucguugcaggccuuauucaagcuuaccaugggccagaucgugaccuucuuucaagaggucccccacguuauugaagaggugaugaacaucgugcugauugcccucagcauccuggcuauucuuaaggggcuguacaauaucgccacaugcggacucaucggccuggucacguuccuucugcucuccgggagaucuuguagcaugaccuauaaaggaguguacgaacugcagacacuggagcucaacaugaauacccugaacaugacaaugccucuuuccugcaccaagaauaacucucaucacuauauuaugguuggcaaugaaacagggcuggagcucacccugacgaacaccagccuucugcaucacaaauuuuguaaucucuccgacgcgcauaagaaaaaccuguacgaucacacacugaugucuaucauuagcaccuuccaccucuccaucccgaauuuuaaccaguaugaggcuaugagcugcgacuucaauggaggcaagauuacagugcaguacaaccugucucauuccuaugccaucgaugccgcuaaucacuguggcaccgucgccaacggggugcuucaaacguuuaugcggauggcuuggggaggcagcuacauugcccuggacucugggcgcggaaagugggauugcaucaugacauccuaccaguaucucaucauucagaacaccacaugggaagaccauugucaguucagcagacccucuccuaucggcuaccuggggcuucugucccaacggacccgcgauauuuauaucagcagacggcuccugggaaccuuuacauggacgcuguccgacucugagggcaaugaaacccccggcggguacugccucacacgcuggaugcugauugaggcggagcuuaaauguuucggaaacaccgccguugcuaagugcaaugaaaaacacgaugaggaauuuugugacaugcugagacucuucgauuuuaacaagcaggccauccggcgccugaaagcugaggcccagaugagcauccagcuuauuaauaaggcggugaacgcccugaucaaugaccaacucauuaugaagaaccaccugagagauaucaugggcauuccuuauugcaauuacuccaaauauugcuaccugaaccauacaagcaccgggcggacgucucucccccgcuguugccuggucuccaauggaagcuaccuuaacgaaacacacuucucugacgacaucgagcagcaggcugauaauaugaucaccgagaugcugcaaaaggaauaucucgacagacagggcaaaaccccucuggggcugguggaucuuuucguguuuagcacauccuucuaccucauuucuaucuuucugcaucuggucaagauuccgacccaccggcauaucguuggaaaacccuguccuaagccccaccgccucaaccacaugggcauuugcagcuguggccuguauaaacagccuggggugcccgugagauggaagcggugaggacuagucccuguucccagagcccacuuuuuuuucuuuuuuugaaauaaaauagccugucuuucagaucucaaaggcucuuuucagagccaccaaaaaaaaaaaaaaaaaaaaaaaaaaaaaaaaaaaaaaaaaaaaaaaaaaaaaaaaaaaaaaaaaaaaaaaaaaaaaaaaaaaaaaaaaaaaaaaaaaaaa

SEQ ID NO: 38619 - RNA, 1748 nt, Artificial Sequence
  mRNA product Design a-1 (hSL-A100) comprising derived and/or modified sequence from LASV(G1180-SLE-2010;Clade IV)__AIT17168__GPCmut11 (opt5)
aggagagucccgcagucggcguccagcggcucugcuuguucgugugugugucguugcaggccuuauucaagcuuaccaugggccagaucgugaccuucuuucaagaggucccccacguuauugaagaggugaugaacaucgugcugauugcccucagcauccuggcuguccuuaaggggcuguacaauuucgccacaugcggacucgugggccugcuuacguuucugcuccugugugggagauccugcaccgcgucucgguauaaaggaguuuacgaacugcagacacucgagcugaacauggaaacccuuaauaugacaaugccucugagcuguaccaagaacaauucccaucacuauauuauggugggcaacgagacagggcucgagcugacccuuacgaauaccucuaucaucaaccauaaauucugcaaucugagcgacgcucacaagaaaaaccucuacgaucaugcccugauguccauuaucucuacauuucaccugagcauuccgaauuucaaccaguaugaagccauguccugugacuuuaauggaggcaagaucagcguccaguacaaccucucucacuccuaugcuggcgaugccgcuaaucauugcgggaccguggccaacggaguucugcaaacauucaugcgcauggcguggggcgggagcuacauugcccuugacucuggacacggcuccugggauuguaucaugaccagcuaccaguaucugauuauccagaacacgacaugggaggaccauugccaguuuucuagacccuccccuaucggguaccucggacugcuuagccaacggacccgcgauauuuauaucuccagacggcugcucggcacauucaccuggacccugucugacagcgaaggcaaggauacacccgggggauacugucugacgcgcuggaugcucauugaggcugagcugaaaugcuuuggcaauaccgccguggcuaaguguaacgaaaaacacgacgaggaguucugcgauaugcuuagacuguuugacuucaauaagcaggccauccagcggcucaaagcggaagcccagauguccauucaacugaucaacaaggcugucaaugcccuuaucaacgaucagcugauuaugaagaaucaccuccgcgacaucauggggauuccuuauugcaacuacagcaaauauuguuaccugaaucauacaaccacaggaaagaccucucugcccaaaugcugucucguguccaacggcagcuaccugaaugaaacgcacuucucugacgauaucgagcagcaagcugacaacaugauuacagagaugcuucagaaggaauauauggagagacaggggaaaaccccucugggacucguggaucuguuugucuucagcaccuccuuuuaccugaucucuaucuuccuucaucucguuaagauuccgacacaccggcauaucgugggcaaaagcugccccaagccucaccgccugaaucacaugggcauuuguuccugcgggcuguauaagcagcccggagugccugucaaauggaagagaugaggacuagucccuguucccagagcccacuuuuuuuucuuuuuuugaaauaaaauagccugucuuucagaucucaaaggcucuuuucagagccaccaaaaaaaaaaaaaaaaaaaaaaaaaaaaaaaaaaaaaaaaaaaaaaaaaaaaaaaaaaaaaaaaaaaaaaaaaaaaaaaaaaaaaaaaaaaaaaaaaaaaa

SEQ ID NO: 38620 - RNA, 1748 nt, Artificial Sequence
  mRNA product Design a-1 (hSL-A100) comprising derived and/or modified sequence from LASV(G1442-SLE-2011;Clade IV)__AIT17180__GPCmut11 (opt5)
aggagagucccgcagucggcguccagcggcucugcuuguucgugugugugucguugcaggccuuauucaagcuuaccaugggccagaucgugaccuucuuucaagaggucccccacguuauugaagaggugaugaacaucgugcugauugcccucagcauccuggcuguccuuaaggggcuguacaauguggccacaugcggacucauuggccugguuacguuccuucugcucugugggagauccugcaccacaacccuguauaaaggaguguacgaacugcagacacucgagcugaacauggaaacccuuaauaugacaaugccucugucuuguaccaagaacaauagccaucacuauauccgggucggcaacgagacggggcucgagcugacccuuacaaauaccuccaucauuaaccauaaauuuugcaaucugucugacgcgcacaagaaaaaccucuacgaucaugcucugaugagcaucauuuccacauuccaccugucuaucccgaauuuuaaccaguaugaagccaugagcugugacuucaauggaggcaagauuuccgugcaguacaaccucagccacucuuaugccggcgaugcugccaaucauugcgggaccguugcuaacggagugcugcaaacguuuaugcgcauggccuggggcggguccuacaucgcgcuugacagcggaagaggcaacugggauuguauuaugacaucuuaccaguaucugaucauccagaauaccacaugggacgaucacugccaguucucccggcccagcccuauuggguaccucggacugcuuucucaacgcaccagagacgucuauaucucccggcgccugcucggcaccuuuacauggacgcugagcgauuccgagggcaaggacacccccgggggauacugucugacaagauggaugcucauugaagccgagcugaaaugcuucggcaacaccgcuguggccaaguguaaugagaaacaugaugaagaguuuugcgacaugcuucggcuguucgauuuuaacaagcaggcuauccagcgccucaaagccgaagcgcagaugucuauucaacugaucaauaaggccgugaacgcucuuaucaaugaccagcugauuaugaagaaccaccucagagacaucauggggauuccuuauugcaauuacagcaaauauuguuaccugaacaauacagccaccggaaagacgucccugcccaaaugcugucucaucagcaacggcucuuaccugaaugagacacacuucuccgaugacauugaacaggaggcugauaacaugaucaccgagaugcuucaaaaggaauauauggagcggcaggggaaaaccccucugggacucgucgaccuguucguuuuuagcacaucuuucuaccugaucagcauuuuucuucaucucgugaagaucccgacccaccgccauauugugggcaaauccugccccaagccucacagacugaaucauaugggcaucuguucuugcgggcuguauaagcagcccggagucccugugcgguggaaacgcugaggacuagucccuguucccagagcccacuuuuuuuucuuuuuuugaaauaaaauagccugucuuucagaucucaaaggcucuuuucagagccaccaaaaaaaaaaaaaaaaaaaaaaaaaaaaaaaaaaaaaaaaaaaaaaaaaaaaaaaaaaaaaaaaaaaaaaaaaaaaaaaaaaaaaaaaaaaaaaaaaaaaa

SEQ ID NO: 38621 - RNA, 1748 nt, Artificial Sequence
  mRNA product Design a-1 (hSL-A100) comprising derived and/or modified sequence from LASV(G3010-SLE-2013;Clade IV)__AIT17344__GPCmut11 (opt5)
aggagagucccgcagucggcguccagcggcucugcuuguucgugugugugucguugcaggccuuauucaagcuuaccaugggccagaucgugaccuucuuucaagaggucccccacguuauugaagaggugaugaacaucgugcugauugcccucagcauccuggcuguccuuaaggggcuguacaauuucgccacaugcggacucgugggccugguuacguuucuucugcucugugggagauccugcaccacaucucuguauaaaggaguguacgaacugcagacccucgagcugaacauggaaacacuuaauaugaccaugccucugagcuguacaaagaacaauucccaucacuauauuauggucggcaacgagaccgggcucgagcugacgcuuaccaauacaucuaucaucaaccauaaauucugcaaucugagcgacgcgcacaagaaaaaccucuacaaucaugcucugauguccauuaucucuaccuuucaccugagcauuccgaacuucaaucaguaugaagccauguccugugauuuuaacggaggcaagaucagcgugcaguacaaucucucucacuccuaugccggcgacgcugccagccauugcgggacaguugcuaacggagugcugcaaaccuucaugcggauggccuggggcgggucuuacauugcgcuugauuccggauacggcaagugggacuguaucaugacgagcuaucaguaccugauuauccagaacacaaccugggaggaucacugccaguuuucucgccccuccccuaucggguaucucggacugcuuagccaaagaacacgggacauuuacaucucccgcagacugcucggcaccuucaccuggacacugucugauagcgaaggcaaagacacgcccgggggauauugucugacccgguggaugcucauugaggccgagcugaagugcuuuggcaauacagcugucgccaaauguaacgaaaagcaugaugaggaguucugcgacaugcuucgccuguuugauuucaauaaacaggcuauccagagacucaagaccgaagcccagauguccauucaacugaucaacaaggcggugaaugcccuuaucaacgaccagcugauuaugaaaaaucaccuccgggauaucauggggauuccuuacugcaacuauagcaaguacuguuaccugaaucacacaaccacgggaaaaacaucucugcccaagugcugucucguguccaacggcagcuaucugaaugaaacccauuucucugacgacaucgagcagcaagcugauaacaugauuaccgagaugcuucagaaagaauacauggagcgccaggggaagacaccucugggacucgucgaccuguuuguuuucagcaccuccuuuuaucugaucucuaucuuccuucaccucgugaaaauuccgacacauagacacaucgugggcaagagcugccccaagccucaucggcugaaucacaugggcauuuguuccugcgggcuguacaaacagcccggagucccugugcgcuggaagagaugaggacuagucccuguucccagagcccacuuuuuuuucuuuuuuugaaauaaaauagccugucuuucagaucucaaaggcucuuuucagagccaccaaaaaaaaaaaaaaaaaaaaaaaaaaaaaaaaaaaaaaaaaaaaaaaaaaaaaaaaaaaaaaaaaaaaaaaaaaaaaaaaaaaaaaaaaaaaaaaaaaaaa

SEQ ID NO: 38622 - RNA, 1748 nt, Artificial Sequence
  mRNA product Design a-1 (hSL-A100) comprising derived and/or modified sequence from LASV(G502-SLE-2009;Clade IV)__AIT17126__GPCmut11 (opt5)
aggagagucccgcagucggcguccagcggcucugcuuguucgugugugugucguugcaggccuuauucaagcuuaccaugggccagaucgugaccuucuuucaagaggucccccacguuauugaagaggugaugaacaucgugcugauugcccucagcauccuggcuguccuuaaggggcuguacaauuucgccacaugcggacucgugggccugcuuacguuucugcuccugugugggagauccugcaccacaggacuguauaaaggcguuuacgaacuccagacccuggagcuuaacauggaaacacugaauaugaccaugccucucucuuguacaaagaacaauagccaucacuauauuaugguggggaacgagaccggacuggagcuuacgcugaccaauacauccaucaucaaccauaaauucugcaaucucucugacgcgcacaagaaaaaccuguacgaucaugcucugaugagcauuaucuccaccuuucaccucucuauuccgaauuucaaccaguaugaagccaugagcugugacuuuaauggcggcaagaucuccguccaguacaaccugagccacucuuaugccggggaugcugccgaccauugcggaacaguggcuaauggcguucuucaaaccuucaugcggauggccuggggaggguccuacauugcgcuggauagcggccgcgggagaugggacuguaucaugacgucuuaccaguaucucauuauccagaacacaaccugggaggaucacugccaguuuucccggcccagcccuaucggauaccugggccuucugucucaacgcacaagagacauuuauaucucccggcgccuccugggcaccuucaccuggacacugagcgauuccgaagggaaggacacgcccggaggcuacugucucaccagauggaugcugauugaggccgagcuuaaaugcuuugggaacacagcuguggccaaguguaaugaaaaacaugaugaggaguucugcgacaugcugcggcucuuugauuucaacaagcaggcuauccagcgccugaaagccgaagcgcagaugucuauucaacuuaucaauaaggccgucaacgcucugaucaaugaccagcucgugaugaagaaccaccugagagacauuaugggaaucccuuauugcaauuacagccgguauuguuaccugaaccacaccacaaccggccgcacgucccuccccaaaugcugucuggugagcaaugggucuuaccuuaacgaaacacauuucuccgaugacauugagcagcaagccgauaauaugaucaccgagaugcugcagaaggaauauauggagagacagggaaaaaccccucucggccuggucgaccuguuuguuuucagcacaucuuuuuaccuuauuagcaucuuccuccaccuggugaagaucccgacccaucggcacauugugggcaaauccugccccaagccucaucgccugaaccacauggggaucuguucuugcggacucuauaaacagcccggcgucccugugaaguggaagagaugaggacuagucccuguucccagagcccacuuuuuuuucuuuuuuugaaauaaaauagccugucuuucagaucucaaaggcucuuuucagagccaccaaaaaaaaaaaaaaaaaaaaaaaaaaaaaaaaaaaaaaaaaaaaaaaaaaaaaaaaaaaaaaaaaaaaaaaaaaaaaaaaaaaaaaaaaaaaaaaaaaaaa

SEQ ID NO: 38623 - RNA, 1748 nt, Artificial Sequence
  mRNA product Design a-1 (hSL-A100) comprising derived and/or modified sequence from LASV(G733-SLE-2010;Clade IV)__AIT17154__GPCmut11 (opt5)
aggagagucccgcagucggcguccagcggcucugcuuguucgugugugugucguugcaggccuuauucaagcuuaccaugggccagaucgugaccuucuuucaagaggucccccacguuauugaagaggugaugaacaucgugcugauugcccucagcauccuggcuguccuuaaggggcuguacaauuucgccacaugcggaauugugggccucguuuccuuucugcuucugugugggagaucuugcacgaccagccucuauaaaggaguguacgaacugcagacacuggagcucaacauggaaacccugaauaugacaaugccucuuuccuguaccaagaacaauucucaucacuauaucauggucggcaacgagacagggcuggagcucacccugacgaauaccagcaucauuaaccauaaauucugcaaucuuuccgacgcgcacaagaaaaaccuguacgaucaugcucucaugucuaucauuagcacauuucaccuguccaucccgaauuucaaccaguaugaagccaugagcugugacuuuaauggaggcaagauuucugugcaguacaaccugucccacagcuaugccggcgaugcugccaaucauugcgggaccaucgcuaacggaguucuccaaacauucaugcggauggccuggggcgggucuuacauugcgcuggacuccggacgcgauagaugggacuguaucaugaccagcuaccaguaucuuaucauucagaacacgacaugggaggaucacugccaguuuucucggcccuccccuaucggcuaccuggggcuccugagccaacgcaccagagacauuuauaucucccggcgccuucugggaacauucaccuggacccucucugauagcgaaggcaaggacacacccggcggguacugucugacgagauggaugcugauugaggccgagcucaaaugcuuuggaaauaccgcuguggccaaguguaacgaaaaacaugaugaggaguucugcgacaugcugcggcuuuuugauuucaauaagcaggcuauccagcgccugaaagccgaagcgcagauguccauccaacucauuaacaaggccgucaaugcucugaucaacgaccagcuuauuaugaagaaucaccugagagacaucaugggcauuccuuauugcaacuacagcaaauauuguuaccucaaucacacaaccacagggaagaccucucugcccaaaugcugucugguguccaacggaagcuaccucaaugaaacgcauuucucugaugacaucgagcagcaagccgauaacaugaucacagagaugcugcagaaggaauauauggagcggcagggcaaaaccccucuugggcugguggaccucuuugucuucagcaccuccuuuuaccugauuucuaucuuccugcaccuuguuaagauuccgacacaucgccacguggugggaaaaagcugccccaagccucauagacucaaucacaugggcaucuguuccugcggccuguaugggcagcccggagucccugugaaguggaaacggugaggacuagucccuguucccagagcccacuuuuuuuucuuuuuuugaaauaaaauagccugucuuucagaucucaaaggcucuuuucagagccaccaaaaaaaaaaaaaaaaaaaaaaaaaaaaaaaaaaaaaaaaaaaaaaaaaaaaaaaaaaaaaaaaaaaaaaaaaaaaaaaaaaaaaaaaaaaaaaaaaaaaa

SEQ ID NO: 38624 - RNA, 1748 nt, Artificial Sequence
  mRNA product Design a-1 (hSL-A100) comprising derived and/or modified sequence from MOPV/LASV reassortant(IGS-1;Clade IV)__AFY05576__GPCmut11 (opt5)
aggagagucccgcagucggcguccagcggcucugcuuguucgugugugugucguugcaggccuuauucaagcuuaccaugggccagaucgugaccuucuuucaagaggucccccacguuauugaagaggugaugaacaucgugcugauugcccucagcguccuggcugugcuuaaggggcuguacaauuucgccacaugcggacucguuggccuggugacguuucuucugcucugugggagauccugcaccacaucucuguauaaaggagucuacgaacugcagacccucgagcugaacauggaaacacuuaauaugaccaugccucugagcuguacaaagaacaauucccaucacuauaucauggugggcaacgagaccgggcucgagcugacgcuuaccaauacaucuauuaucaaccauaaauucugcaaucugagcgacgcgcacaagaaaaaccucuacgaucaugcucugauguccaucauuucuaccuuucaccugagcaucccgaauuucaaccaguaugaagccauguccugugacuuuaauggaggcaagauuagcguucaguacaaccucucucacuccuaugccggcgaugcugccaaucauugcgggacaguggcuaacggaguccugcaaaccuucaugcggauggccuggggcgggagcuacaucgcgcuugacucuggacgcggcaacugggauuguauuaugacguccuaccaguaucugaucauucagaauacaaccugggaggaccacugccaguuuagcagacccucuccuaucggguaccucggacugcuuucccaacggacacgcgauaucuauauuagcagacggcugcucggcaccuucaccuggacacuguccgacucugaaggcgaggauacgcccgggggauacugucugacccgcuggaugcucaucgaggccgaacugaagugcuuuggcaacacagcuguggccaaauguaaugagaagcaugacgaagaguucugcgauaugcuuagacuguuugacuucaacaaacaggcuauucagcggcucaaggccgaagcgcagaugagcauccaacugauuaauaaagccgugaacgcucuuaucaaugaucagcugaucaugaagaaccaccuccgcgacauuauggggaucccuuauugcaauuacuccaaguauuguuaccugaaccacaccacaaccggaagaacgagccugcccaaaugcugucucgucucuaauggcuccuaccugaacgagacacauuucagcgacgauauugagcagcaagccgacaauaugaucaccgaaaugcuucagaaggaguauauggaacggcaggggaaaaccccucugggacucguugaucuguuuguguucucuaccagcuuuuaccugauuuccaucuuccuucaccucgugaagaucccgacacaucgccacauugucggcaaaucuugccccaagccucauagacugaaccacaugggcaucuguagcugcgggcuguauaaacagcccggagugccuguuaaguggaagcggugaggacuagucccuguucccagagcccacuuuuuuuucuuuuuuugaaauaaaauagccugucuuucagaucucaaaggcucuuuucagagccaccaaaaaaaaaaaaaaaaaaaaaaaaaaaaaaaaaaaaaaaaaaaaaaaaaaaaaaaaaaaaaaaaaaaaaaaaaaaaaaaaaaaaaaaaaaaaaaaaaaaaa

SEQ ID NO: 38625 - RNA, 1748 nt, Artificial Sequence
  mRNA product Design a-1 (hSL-A100) comprising derived and/or modified sequence from LASV(LM765-SLE-2012;Clade IV)__AIT17814__GPCmut11 (opt5)
aggagagucccgcagucggcguccagcggcucugcuuguucgugugugugucguugcaggccuuauucaagcuuaccaugggccagaucgugaccuucuuucaagaggucccccacguuauugaagaggugaugaacaucgugcugauugcccucagcauccuggcuguccuuaaggggcuguacaauuucgccacaugcggacucgugggccugguuacguuucuucugcucugugggagauccugcaccacaucucuguauaaaggaguguacgaacugcagacccucgagcugaacauggaaacacuuaauaugaccaugccucugagcuguacaaagaacaauucccaucacuauauuauggucggcaacgagaccgggcucgagcugacgcuuaccaauacaucuaucaucgaccauaaauucugcaaccugagcgaugcgcaccggaagaaucucuacgaccaugcucugauguccauuaucucuaccuuucaccugagcauuccgaacuucaaucaguaugaagccauguccugugauuuuaacggaggcaaaaucagcgugcaguacaaucucucucacuccuaugccaaggacgcugccgaucauugcggcacaguugcuaacggggugcugcaaaccuucaugcgcauggccuggggaggcagcuacauugcgcuugacucugggagaggacggugggauuguaucaugacguccuaccaguaucugauuauccagaauacaaccugggaggaccacugccaguuuagccgccccucuccuaucggcuaccucgggcugcuuucccaaagaacacgggauauuuauaucagccgcagacugcucggaaccuucaccuggacacuguccgacucugaaggcaaggauacgcccggcggguacugucugacccgguggaugcucauugaggccgagcugaaaugcuuuggaaacacagcugucgccaaguguaacgaaaaacaugacgaggaguucugcgauaugcuucgccuguuugacuucaauaagcaggcuauccagagacucaaagccgaagcgcagaugagcauucaacugaucaacaaggccgugaaugcucuuaucaacgaccagcugauuaugaagaaucaccuccgggauaucaugggcauuccuuauugcaacuacuccaaauauuguuaccugaaucacaccacaaccgggaagacgagccugcccaaaugcugucucgugucuaacggauccuaccugaaugaaacacauuucagcgacgauaucgagcagcaagccgacaacaugauuaccgagaugcuucagaaggaauauauggagcgccagggcaaaaccccucuggggcucgucgaucuguuuguuuucucuaccagcuuuuaccugaucuccaucuuccuucaccucgugaagauuccgacacauagacacaucgugggaaaacccugcccuaagccccaucggcugaaucacaugggcauuuguucuugcggccuguauaagcagccugggguccccgugaaauggaagcgcugaggacuagucccuguucccagagcccacuuuuuuuucuuuuuuugaaauaaaauagccugucuuucagaucucaaaggcucuuuucagagccaccaaaaaaaaaaaaaaaaaaaaaaaaaaaaaaaaaaaaaaaaaaaaaaaaaaaaaaaaaaaaaaaaaaaaaaaaaaaaaaaaaaaaaaaaaaaaaaaaaaaaa

SEQ ID NO: 38626 - RNA, 1748 nt, Artificial Sequence
  mRNA product Design a-1 (hSL-A100) comprising derived and/or modified sequence from LASV(LM776-SLE-2012;Clade IV)__AIT17824__GPCmut11 (opt5)
aggagagucccgcagucggcguccagcggcucugcuuguucgugugugugucguugcaggccuuauucaagcuuaccaugggccagaucgugaccuucuuucaagaggucccccacguuauugaagaggugaugaacaucgugcugauugcccucagcauccuggcuguccuuaaggggcuguacaauuucgccacaugcggacucgugggccugguuacguuucuucugcucugugggagauccugcaccacaucuguguauaaaggagucuacgaacugcagacccuggagcucaacauggaaacacugaauaugaccaugccucuuagcuguacaaagaacaauucccaucacuauauuauggugggcaacgagaccgggcuggagcucacgcugaccaauacaucuaucaucaaccauaaauucugcaaucuuagcgacgcgcacaagaaaaaccuguacgaucaugcucucauguccauuaucucuaccuuucaccugagcauuccgaauuucaaccaguaugaagccauguccugugacuuuaauggaggcaagaucagcguucaguacaaccugucucacuccuaugccggcgaugcugccaaucauugcgggacaguggcuaacggaguccuccaaaccuucaugcggauggccuggggcgggagcuacauugcgcuggacucuggacacggcaagugggauuguaucaugacguccuaccaguaucuuauuauccagaacacaaccugggaggaccauugccaguuuagccgccccucuccuaucggguaccugggacuccugucccaaagaacacgggauauuuauaucagccgcagacuucugggcaccuucaccuggacacucuccgacucugaaggcaaagauacgcccgggggauacugucugacccgguggaugcugauugaggccgagcucaagugcuuuggcaauacagcuguggccaaauguaacgaaaagcacgacgaggaguucugcgauaugcugcgccuuuuugacuucaauaaacaggcuauccagagacugaaggccgaagcgcagaugagcauucaacucaucaacaaggccgugaaugcucugaucaacgaucagcuuauuaugaaaaaucaucugcgggacaucauggggauuccuuauugcaacuacuccaaguauuguuaccucaaucacaccacaaccggaaaaacgagccugcccaagugcugucuggucucuaacggcuccuaccucaaugaaacacacuucagcgacgauaucgagcagcaagccgacaacaugauuaccgagaugcugcagaaagaauauauggagcgccaggggaagaccccucuuggacugguugaucucuuuguguucucuaccagcuuuuaccugaucuccaucuuccugcaucuugugaaaauuccgacacacagacauaucgucggcaagucuugccccaagccucaccggcucaaucacaugggcauuuguagcugcgggcuguauaaacagcccggagugccuguucgcuggaagagaugaggacuagucccuguucccagagcccacuuuuuuuucuuuuuuugaaauaaaauagccugucuuucagaucucaaaggcucuuuucagagccaccaaaaaaaaaaaaaaaaaaaaaaaaaaaaaaaaaaaaaaaaaaaaaaaaaaaaaaaaaaaaaaaaaaaaaaaaaaaaaaaaaaaaaaaaaaaaaaaaaaaaa

SEQ ID NO: 38627 - RNA, 1748 nt, Artificial Sequence
  mRNA product Design a-1 (hSL-A100) comprising derived and/or modified sequence from LASV(Mad39;Clade IV)__ANH09722__GPCmut11 (opt5)
aggagagucccgcagucggcguccagcggcucugcuuguucgugugugugucguugcaggccuuauucaagcuuaccaugggccagaucgugaccuucuuucaagaggucccccacguuauugaagaggugaugaacaucgugcugauugcccucagcauccuggcuguccuuaaggggcuguacaauguggccacaugcggacucauuggccugguuacguuccuucugcucugugggagauccugcaccacaacccuguauaaaggaguguacgaacugcaggcgcucgagcugaacauggaaacacuuaauaugaccaugccucugucuuguacaaagaacaauagccaucacuauauccgggucggcaacgagaccgggcucgagcugacgcuuaccaauacaucccugaucaaccauaaauuuugcaaucucucugacgcucacaagaaaaaccuguacgaucaugcccugaugagcauuaucuccaccuuccaccucucuauuccgaauuuuaaccaguaugaagccaugagcugugacuucaaugauggaaagaucuccgugcaguacaaccugagccacacauaugcuggcgacaccgccaaucauugcggcacgguugcuaacggggugcuucaaacauuuaugcgcauggccuggggaggcucuuacauugcgcuggauuccgggagaggaggcugggacuguaucaugaccagcuaccaguaucucauuauccagaacacaaccugggaggaucacugccaguucucucggcccuccccuaucggguaccugggacuucugagccaacgcaccagagacauuuauaucucucggcgccuccugggcacauuuacguggacccuguccgauagcgaaggcaaggacacacccgggggauacugucucaccagauggaugcugauugaggccgagcuuaaaugcuucggcaauacagcugucgccaaguguaacgaaaaacaugaugaggaauuuugcgacaugcugcgccucuucgauuuuaauaagcaggcuauccagcggcugaaagccgaggcgcagauguccauucaacuuaucaacaaggccgugaaugcucugaucaacgaccagcucauuaugaagaaucaccugagagacaucauggggauuccuuauugcaacuacucuaaauauuguuaccugaaucacaccgugacgggaaagacaagccuccccaaaugcugucuggucuccaacggcagcuaccuuaaugaaacccauuucucugaugacaucgagcagcaagccgauaacaugauuaccgagaugcugcagaaggaauauauggagcggcaggggaaaacaccucucggacugguugaccuguucguguuuuccaccagcuucuaccuuaucucuaucuuucuccaccuggugaagauuccgacacaucgccacgucgugggcaaacccugcccuaagccccauagacugaaucacaugggcaucuguagcugcggguucuauaagcagccuggaguucccgugcgguggaaacgcugaggacuagucccuguucccagagcccacuuuuuuuucuuuuuuugaaauaaaauagccugucuuucagaucucaaaggcucuuuucagagccaccaaaaaaaaaaaaaaaaaaaaaaaaaaaaaaaaaaaaaaaaaaaaaaaaaaaaaaaaaaaaaaaaaaaaaaaaaaaaaaaaaaaaaaaaaaaaaaaaaaaaa

SEQ ID NO: 38628 - RNA, 1748 nt, Artificial Sequence
  mRNA product Design a-1 (hSL-A100) comprising derived and/or modified sequence from LASV(Z0947-SLE-2011;Clade IV)__AIT17840__GPCmut11 (opt5)
aggagagucccgcagucggcguccagcggcucugcuuguucgugugugugucguugcaggccuuauucaagcuuaccaugggccagaucgugaccuucuuucaagaggucccccacguuauugaagaggugaugaacaucgugcugauugcccucagcauccuggcuguccuuaaggggcuguacaauuucgccacaugcggacucgugggccugguuacguuucuucugcucugugggagauccugcaccauuucucuguauaaaggaguguacgaacugcagacacucgagcugaacauggaaacccuuaauaugacaaugccucugagcuguaccaagaacaauucccaucacuauaucauggucggcaacgagacagggcucgagcugacccuuacgaauaccucuaucauuaaccauaaauucugcaaucugagcgacgcgcacaagaaaaaccucuacgaucaugcucugauguccaucauuucuacauuucaccugagcaucccgaauuucaaccaguaugaagccauguccugugacuuuaauggaggcaagauuagcgugcaguacaaccucucucacuccuaugccggcgaugcugccaaucauugcgggaccguugcuaacggagugcugcaaacauucaugcggauggccuggggcgggagcuacaucgcgcuugacucuggacgcgauagaugggacuguauuaugaccuccuaccaguaucugaucauccagaacacgacaugggaggaucacugccaguuuagccggcccucuccuauuggcuaccucgggcugcuuucccaacgcaccagagacaucuauauuagccggcgccugcucggaacauucaccuggacccuguccgauucugaaggcaaggacacacccggcggguacugucugacgagauggaugcucaucgaggccgagcugaaaugcuuuggaaauaccgcugucgccaaguguaacgaaaaacaugaugaggaguucugcgacaugcuucggcuguuugauuucaauaagcaggcuauucagcgccucaaagccgaagcgcagaugagcauccaacugaucaacaaggccgugaaugcucuuauuaacgaccagcugaucaugaagaaucaccucagagacauuaugggcaucccuuauugcaacuacuccaaauauuguuaccugaaucacacaaccacagggaagaccagccugcccaaaugcugucucgugucuaacggauccuaccugaaugaaacgcauuucagcgaugacauugagcagcaagccgauaacaugaucacagagaugcuucagaaggaauauauggagcggcagggcaaaaccccucuggggcucgucgaccuguuuguuuucucuaccagcuuuuaccugaucuccauuuuccuucaccucgugaagaucccgacacaucgccacauugugggaaaacccugcccuaagccccauagacugaaucacaugggcaucuguucuugcggccuguauaagcagccugggguccccgugaaauggaagcggugaggacuagucccuguucccagagcccacuuuuuuuucuuuuuuugaaauaaaauagccugucuuucagaucucaaaggcucuuuucagagccaccaaaaaaaaaaaaaaaaaaaaaaaaaaaaaaaaaaaaaaaaaaaaaaaaaaaaaaaaaaaaaaaaaaaaaaaaaaaaaaaaaaaaaaaaaaaaaaaaaaaaa

SEQ ID NO: 38629 - RNA, 1724 nt, Artificial Sequence
  mRNA product Design a-1 (A100) comprising derived and/or modified sequence from LASV(Josiah;Clade IV)__NP_694870__GPCmut11 (opt1)
aggagagucccgcagucggcguccagcggcucugcuuguucgugugugugucguugcaggccuuauucaagcuuaccaugggccagaucgugaccuucuuccaggaggucccccacgugaucgaggaggugaugaacaucguccugaucgcccucagcgugcuggccgugcugaaggggcucuacaacuucgcgaccugcggccuggucgggcuggugacguuccuccugcugugcggccgcuccugcaccaccagccucuacaaggggguguacgagcugcagacccuggagcucaacauggagacgcugaacaugaccaugccgcuguccugcaccaagaacaacagccaccacuacaucauggucggcaacgagaccggccucgagcugacgcugaccaacaccuccaucaucaaccacaaguucugcaaccucagcgacgcccacaagaagaaccuguacgaccacgcccugauguccaucaucagcaccuuccaccucuccauccccaacuucaaccaguacgaggccaugagcugcgacuucaacgggggcaagaucuccgugcaguacaaccugagccacuccuacgccggggacgcggccaaccacugcggcacgguggccaacgggguccugcagaccuucaugcggauggccuggggcggcagcuacaucgcgcucgacuccgggcgcggcaacugggacugcaucaugaccagcuaccaguaccugaucauccagaacaccacgugggaggaccacugccaguucucccggcccagccccaucggguaccugggccuccugucccagcgcacccgggacaucuacaucagccgccggcugcucggcaccuucaccuggacgcugagcgacuccgaggggaaggacaccccgggcggguacugccugacccgcuggaugcucaucgaggccgagcugaagugcuucggcaacaccgccguggccaagugcaacgagaagcacgacgaggaguucugcgacaugcugcggcuguucgacuucaacaagcaggccauccagcgccugaaggcggaggcccagaugagcauccagcugaucaacaaggccgugaacgcccucaucaacgaccagcugaucaugaagaaccaccuccgggacaucauggggauccccuacugcaacuacuccaaguacugcuaccucaaccacacgaccaccggccgcaccagccugcccaagugcugccuggucuccaacggcagcuaccucaacgagacgcacuucuccgacgacaucgagcagcaggccgacaacaugaucaccgagaugcugcagaaggaguacauggagcggcaggggaagacgccccugggccucguggaccuguucguguucagcaccuccuucuaccugaucagcaucuuccugcaccucgucaagaucccgacccaccgccacaucguggggaaguccugccccaagccccaccggcugaaccacaugggcaucugcagcugcgggcuguacaagcagcccggcgugccggucaaguggaagcgcugaggacuagucccuguucccagagcccacuuuuuuuucuuuuuuugaaauaaaauagccugucuuucagaucuaaaaaaaaaaaaaaaaaaaaaaaaaaaaaaaaaaaaaaaaaaaaaaaaaaaaaaaaaaaaaaaaaaaaaaaaaaaaaaaaaaaaaaaaaaaaaaaaaaaa

SEQ ID NO: 38630 - RNA, 1721 nt, Artificial Sequence
  mRNA product Design a-1 (A100) comprising derived and/or modified sequence from LASV(LP;Clade I)__AAF86701__GPCmut11 (opt1)
aggagagucccgcagucggcguccagcggcucugcuuguucgugugugugucguugcaggccuuauucaagcuuaccaugggccagaucaucaccuucuuccaggaggugccccacgucaucgaggaggugaugaacaucgugcugaucgcccucagccugcuggccauccucaaggggcuguacaacaucgcgaccugcggcaucaucgggcuggucgccuuccucuuccugugcggcaaguccugcagccugacgcucaagggcggguacgagcugcagacccuggagcucaacauggagacccugaacaugaccaugccgcuguccugcacgaagaacagcucccaccacuacauccgcgugggcaacgagaccgggcucgagcugacccugaccaacacgagcaucaucaaccacaaguucugcaaccucuccgacgcccacaagaagaaccuguacgaccacgcccugaugagcaucaucuccaccuuccaccucagcauccccaacuucaaccaguacgaggccauguccugcgacuucaacggcgggaagaucagcgugcaguacaaccugucccacagcuacgcgggcgacgccgccgagcacugcgggaccgucgccaacggcgugcugcagaccuucaugcggauggcguggggcgggcgcuacaucgcccucgacuccggcaaggggaacugggacugcaucaugacgagcuaccaguaccugaucauccagaacaccaccugggaggaccacugccaguucucccggcccagccccaucggcuaccugggccuccugucccagcgcacccgggacaucuacaucagccgccggcugcucgggacguucaccuggacccugagcgacuccgagggcaacgagacccccgggggcuacugccugacgcgcuggaugcucaucgaggccgagcugaagugcuucgggaacaccgccguggccaagugcaacgagaagcacgacgaggaguucugcgacaugcugcggcuguucgacuucaacaagcaggcgauccgccggcugaaggccgaggcccagaugagcauccagcugaucaacaaggccgucaacgcccucaucaacgaccagcugaucaugaagaaccaccuccgcgacaucaugggcauccccuacugcaacuacuccaaguacugcuaccucaaccacaccagcuccggccggaccagccugcccaagugcugccugaucuccaacgggagcuaccucaacgagacgcaguucuccgacgacaucgagcagcaggcggacaacaugaucaccgagaugcugcagaaggaguacaucgagcgccagggcaagaccccgcuggggcucguggacaucuucaucuucagcaccuccuucuaccugaucagcaucuuccugcaccugaucaagaucccgacgcaccggcacaucgugggcaagcccugccccaagccccaccgccucaaccacaugggggucugcuccugcggccuguacaagcacccgggcgugcccaccaaguggaagcggugaggacuagucccuguucccagagcccacuuuuuuuucuuuuuuugaaauaaaauagccugucuuucagaucuaaaaaaaaaaaaaaaaaaaaaaaaaaaaaaaaaaaaaaaaaaaaaaaaaaaaaaaaaaaaaaaaaaaaaaaaaaaaaaaaaaaaaaaaaaaaaaaaaaaa

SEQ ID NO: 38631 - RNA, 1721 nt, Artificial Sequence
  mRNA product Design a-1 (A100) comprising derived and/or modified sequence from LASV(803213;Clade II)__AAF86703__GPCmut11 (opt1)
aggagagucccgcagucggcguccagcggcucugcuuguucgugugugugucguugcaggccuuauucaagcuuaccaugggccagaucaucaccuucuuccaggaggugccccacgucaucgaggaggugaugaacaucgugcugaucgcccucagccugcuggccauccucaaggggaucuacaacgucgcgaccugcggccuguucgggcugaucuccuuccuccugcugugcggccgcagcugcuccgugacguacaaggggguguacgagcuccagacccuggagcugaacauggccaaccucaacaugaccaugccgcugagcugcaccaagaacaacucccaccacuacaucauggucggcaacgagacgggccuggagcucacccugaccaacaccagcaucaucaaccacaaguucugcaaccuguccgacgcccacaagaagaaccucuacgaccacgcccugaugagcaucaucuccacguuccaccugagcauccccaacuucaaccaguacgaggccauguccugcgacuucaacgggggcaagaucagcgugcaguacaaccucucccacagcuucgcgguggacgccgccaaccacugcgggaccaucgccaacggcguccugcagaccuucaugcggauggcguggggcggguccuacaucgcccuggacagcggcaaggggaacugggacugcaucaugaccuccuaccaguaccucaucauccagaacacgaccugggaggaccacugccaguucagccgccccucccccaucggcuaccuggggcugcucagccagcggacccgcgacaucuacaucagccggcgccugcugggcaccuucacguggacccucuccgacagcgagggcaacgaggcccccgggggcuacugccugacccgguggaugcugaucgaggccgagcucaagugcuucgggaacaccgccguggcgaagugcaacgagaagcacgacgaggaguucugcgacaugcugcgccuguucgacuucaacaagcaggccaucaagcggcucaagacggaggcccagauguccauccagcugaucaacaaggccgugaacgcccugaucaacgaccagcucaucaugaagaaccaccuccgcgacaucaugggcauccccuacugcaacuacagccgguacugcuaccugaaccacaccgucaccgggaagaccucccugccccgcugcugccuggugagcaacggcuccuaccugaacgagacgcacuucagcgacgacaucgagcagcaggcggacaacaugaucaccgagaugcuccagaaggaguacauggaccggcagggcaagaccccgcuggggcugguggaccucuucgucuucuccaccagcuucuaccugaucuccaucuuccugcaccuggugaagaucccgacgcaccgccacaucgugggcaagcccugccccaagccccaccggcucaaccacauggggaucugcagcugcggccuguacaagcacccggggguccccgugaaguggaagcgcugaggacuagucccuguucccagagcccacuuuuuuuucuuuuuuugaaauaaaauagccugucuuucagaucuaaaaaaaaaaaaaaaaaaaaaaaaaaaaaaaaaaaaaaaaaaaaaaaaaaaaaaaaaaaaaaaaaaaaaaaaaaaaaaaaaaaaaaaaaaaaaaaaaaaa

SEQ ID NO: 38632 - RNA, 1721 nt, Artificial Sequence
  mRNA product Design a-1 (A100) comprising derived and/or modified sequence from LASV(GA391;Clade III)__CAA36645__GPCmut11 (opt1)
aggagagucccgcagucggcguccagcggcucugcuuguucgugugugugucguugcaggccuuauucaagcuuaccaugggccagaucgugaccuucuuccaggaggucccccacgugaucgaggaggugaugaacaucguccugaucgcccucagcauccuggccauccugaaggggcucuacaacguggcgaccugcggccugaucgggcuggugacguuccuccugcuguccggccgcagcugcucccucaucuacaaggggaccuacgagcugcagacccuggagcucaacauggagacccugaacaugacgaugccgcugagcugcaccaagaacaacucccaccacuacauccgggucggcaacgagaccggccucgagcugacccugacgaacaccagcauccucaaccacaaguucugcaaccuguccgacgcccacaagcgcaaccuguacgaccacagccucauguccaucaucagcaccuuccaccuguccauccccaacuucaaccaguacgaggccaugagcugcgacuucaacgggggcaagaucaccgugcaguacaaccugucccacagcuucgccguggacgccgcggggcacugcggcacgcucgccaacgggguccugcagaccuucaugcggauggccuggggcggcuccuacaucgcccuggacagcgggcgcggcaacugggacugcaucaugaccuccuaccaguaccucaucauccagaacaccacgugggacgaccacugccaguucagccggcccucccccaucggguaccugggccugcucagccagcgcacccgggacaucuacaucagccgccggcugcugggcaccuucaccuggacgcucuccgacagcgaggggaacgagaccccgggcggguacugccugacccgcuggaugcugaucgaggcggagcucaagugcuucggcaacaccgccguggccaagugcaacgagaagcacgacgaggaguucugcgacaugcugcggcuguucgacuucaacaagcaggccauccgccggcucaagacggaggcccagauguccauccagcugaucaacaaggcggugaacgcccugaucaacgaccagcucaucaugaagaaccaccuccgcgacaucauggggauccccuacugcaacuacagccgguacugcuaccugaaccacaccuccaccggcaagaccagccugccccgcugcugccugaucuccaacggcagcuaccugaacgagacgaaguucuccgacgacaucgagcagcaggccgacaacaugaucaccgagaugcuccagaaggaguacaucgaccggcaggggaagacgccccugggccuggucgaccuguucguguucagcaccuccuucuaccucaucagcaucuuccugcaccuggugaagaucccgacccaccgccacaucgucgggaagcccugccccaagccccaccggcucaaccacaugggcaucugcuccugcgggcuguacaagcagccgggcgugcccgugcgcuggaagcggugaggacuagucccuguucccagagcccacuuuuuuuucuuuuuuugaaauaaaauagccugucuuucagaucuaaaaaaaaaaaaaaaaaaaaaaaaaaaaaaaaaaaaaaaaaaaaaaaaaaaaaaaaaaaaaaaaaaaaaaaaaaaaaaaaaaaaaaaaaaaaaaaaaaaa

SEQ ID NO: 38633 - RNA, 1724 nt, Artificial Sequence
  mRNA product Design a-1 (A100) comprising derived and/or modified sequence from LASV(AV;Clade V)__CCA30314__GPCmut11 (opt1)
aggagagucccgcagucggcguccagcggcucugcuuguucgugugugugucguugcaggccuuauucaagcuuaccaugggccagaucgugaccuucuuccaggaggucccccacgugaucgaggaggugaugaacaucguccugaucgcccucagcauccuggccgugcugaaggggcucuacaacaucgcgaccugcggccugaucgggcugaucacguuccuccugcugugcggccgcuccugcagcuccaaccucuacaaggggguguacgagcugcagagccuggaccucaacauggagacccugaacaugaccaugccgcuguccugcaccaagaacaacagccaccacuacauccgggucggcaacgacacgggccucgagcugacccugaccaacaccuccauccucaaccacaaguucugcaaccugagcgacgcccacaagaaggaccuguacgaccacgcccucauguccaucaucagcacguuccaccuguccauccccaacuucaaccaguacgaggccaugagcugcgacuucaacgggggcaagaucuccgugcaguacaaccugagccacuccuacgccaucgacgcggccaaccacugcgggaccguggccaacggcauccuccagaccuucaugcgcauggccuggggcgggagcuacaucgcgcuggacuccggccgggggaacugggacugcaucaugaccagcuaccaguaccugaucauccagaacacgaccugggagaaccacugccaguucucccgccccagccccaucggcuaccucgggcugcugagccagcggacccgcgacaucuacaucucccggcgccuccugggcaccuucacguggacccugagcgacuccgagggcaacgccacccccgggggcuacugccucacccgguggaugcugaucgaggccgagcugaagugcuucgggaacacggccgucgccaagugcaacgagaagcacgacgaggaguucugcgacaugcuccgccuguucgacuucaacaagcaggcgaucagccggcugaaguccgaggcccagaugagcauccagcucaucaacaaggccgugaacgcccugaucaacgaccagcugaucaugaagaaccaccuccgcgacaucaugggcauccccuacugcaacuacuccaaguacugcuaccugaaccacaccaucaccgggaagaccagccugcccaagugcugccucguguccaacggcagcuaccugaacgagacgcacuucuccgacgacaucgagcagcaggccgacaacaugaucaccgagaugcugcagaaggaguacauggagcggcagggcaagaccccgcucgggcuggucgaccuguucguguucagcaccuccuucuaccugaucagcaucuuccuccgccuggugaagaucccgacgcaccggcacaucgucggcaagcccugccccaagccccaccgccugaaccacauggggaucugcuccugcggccucuacaagcagccgggggugcccgugcgguggaagcgcugaggacuagucccuguucccagagcccacuuuuuuuucuuuuuuugaaauaaaauagccugucuuucagaucuaaaaaaaaaaaaaaaaaaaaaaaaaaaaaaaaaaaaaaaaaaaaaaaaaaaaaaaaaaaaaaaaaaaaaaaaaaaaaaaaaaaaaaaaaaaaaaaaaaaa

SEQ ID NO: 38634 - RNA, 1721 nt, Artificial Sequence
  mRNA product Design a-1 (A100) comprising derived and/or modified sequence from LASV(Togo/2016/7082;Clade VI)__AMR44577__GPCmut11 (opt1)
aggagagucccgcagucggcguccagcggcucugcuuguucgugugugugucguugcaggccuuauucaagcuuaccaugggccagaucaucaccuucuuccaggaggugccccacgucaucgaggaggugaugaacaucgugcugaucgcccucagccugcuggccauccucaagggggucuacaacguggcgaccugcggcaucaucgggcuggugacguuccuguuccucugcggccgcuccugcagccugaucuacaagggguccuacgagcugcagacccucgagcugaacauggagacccugaacaugaccaugccgcucagcugcacgaagaacuccagccaccacuacauccgggucggcaacgagaccggccuggagcugacccucaccaacacguccaucaucaaccacaaguucugcaaccugagcgacgcccacaagcgcaaccuguacgaccacgcccucauguccauccugagcaccuuccaccuguccauccccaacuucaaccaguacgaggccaugagcugcgacuucaacgggggcaagaucuccgugcaguacaaccucagccacgccuacgcgguggacgccgccgagcacugcgggaccgucgccaacggcgugcugcagaccuucaugcggauggcguggggcggguccuacaucgcccuggacagcggccgcgggaacugggacugcaucaugacguccuaccaguaccucaucauccagaacaccaccugggaggaccacugccaguucagccggcccucccccaucggcuaccuggggcugcucagccagcgcacccgggacaucuacaucagccgccggcugcugggcacguucaccuggacccucuccgacagcgagggcaacgagacccccgggggcuacugccugacgcgcuggaugcugaucgaggccgagcucaagugcuucgggaacaccgccguggccaagugcaacgagaagcacgacgaggaguucugcgacaugcugcggcuguucgacuucaacaagcaggcgauccagcgccucaaguccgaggcccagaugagcauccagcugaucaacaaggccgucaacgcccugaucaacgaccagcucaucaugaagaaccaccuccgggacaugaugggcauccccuacugcaacuacuccaaguacugcuaccugaaccacaccagcuccgggcgcaccagccugcccaagugcugccugguguccaacggcagcuaccugaacgagacgcacuucuccgacgacaucgagcagcaggccgacaacaugaucaccgagaugcuccagaaggaguacaucgaccggcagggcaagaccccgcuggggcugguggaccucuucgucuucagcaccuccuucuaccugaucagcaucuuccugcaccugaucaagaucccgacgcaccgccacaucgugggcaagcccugccccaagccccaccggcucaaccacauggggaucugcuccugcggccuguacaagcagccgggggugcccacccgcuggaagcggugaggacuagucccuguucccagagcccacuuuuuuuucuuuuuuugaaauaaaauagccugucuuucagaucuaaaaaaaaaaaaaaaaaaaaaaaaaaaaaaaaaaaaaaaaaaaaaaaaaaaaaaaaaaaaaaaaaaaaaaaaaaaaaaaaaaaaaaaaaaaaaaaaaaaa

SEQ ID NO: 38635 - RNA, 1721 nt, Artificial Sequence
  mRNA product Design a-1 (A100) comprising derived and/or modified sequence from LASV(KAK-428;Clade n.d. (VII))__ANH09740__GPCmut11 (opt1)
aggagagucccgcagucggcguccagcggcucugcuuguucgugugugugucguugcaggccuuauucaagcuuaccaugggccagaucgugaccuucuuccaggaggucccccacgugaucgaggaggugaugaacaucguccugaucgcccucagccugcuggccauccucaaggggcuguacaacuucgcgaccugcggcgugaucgggcugaucacguuccuccugcugugcggccgcuccugcagcgccaccuacaaggggcaguacgagcuccagacccuggagcugaacauggagucccucaacaugaccaugccgcugagcugcacgaagaacaacucccaccacuacauccgggccggcaacaacaccggccuggagcucacccugaccaacacgagcaucaucucccacaaguucugcaaccugagcgacgcccacaagaagaaccucuacgaccacacccugauguccaucaucaccaccuuccaccugagcauccccaacuucaaccaguacgaggccauguccugcgacuucaacgggggcaagaucagcauccaguacaaccucucccacagcuacgcgggggacgccgcccagcacugcggcacgguggccaacgggguccugcagaccuucaugcgcauggcguggggcggcuccuaccuggcccucgacagcgggcggcgcggcugggacugcaucaucuccagcuaccaguaccugaucauccagaacaccaccugggacgaccacugccaguucucccggcccagccccaucggguaccugggcuucgugagccagaagacgcgcgacaucuacaucucccggcgccuccugggcaccuucaccuggacccugagcgacuccgaggggcacgacaugccgggcggguacugccucacgcgguggaugcugaucgaggccgaccugaagugcuucggcaacaccgccguggccaagugcaacgagaagcacgacgaggaguucugcgacauguggcgccucuucgacuucaacaagcaggcgauccagcggcugaaggccgaggcccagaugaacauccagcugaucaacaaggccgucaacgcccucaucaacgaccagcugaugaugaagaaccaccuccgcgacaucauggggauccccuacugcaacuacagcaaguucugcuaccugaacaacaccaccacgggccggaccucccugccccgcugcugccugaucagcaacggcuccuaccucaacgagacccacuucagcgacgacaucgagcagcaggcggacaacaugaucaccgagaugcugcagaaggaguacauggaccggcaggggaagacgccccugggccucguggaccuguucguguucuccaccagcuucuaccugaucaccaucuuccuccaccuggucaagaucccgacccaccgccacaucguggggaagcccugccccaagccccaccggcugaaccacaugggcaucugcuccugcgggcuguacaagcagccgggcgugcccguccgcuggaagcggugaggacuagucccuguucccagagcccacuuuuuuuucuuuuuuugaaauaaaauagccugucuuucagaucuaaaaaaaaaaaaaaaaaaaaaaaaaaaaaaaaaaaaaaaaaaaaaaaaaaaaaaaaaaaaaaaaaaaaaaaaaaaaaaaaaaaaaaaaaaaaaaaaaaaa

SEQ ID NO: 38636 - RNA, 1721 nt, Artificial Sequence; identical to SEQ ID NO: 38630
  mRNA product Design a-1 (A100) comprising derived and/or modified sequence from LASV(Pinneo-NIG-1969;Clade I)__AIT17836__GPCmut11 (opt1)

SEQ ID NO: 38637 - RNA, 1721 nt, Artificial Sequence
  mRNA product Design a-1 (A100) comprising derived and/or modified sequence from LASV(ISTH0009-NIG-2011;Clade II)__AIT17404__GPCmut11 (opt1)
aggagagucccgcagucggcguccagcggcucugcuuguucgugugugugucguugcaggccuuauucaagcuuaccaugggccagaucaucaccuucuuccaggaggugccccacgucaucgaggaggugaugaacaucgugcugaucgcccucagccugcuggccauccucaaggggaucuacaacgucgcgaccugcggccuguucgggcugguguccuuccuccugcugugcggccgcagcugcuccacgaccuacaaggggguguacgagcuccagacccuggagcuggacauggccagccucaacaugaccaugccgcuguccugcacgaagaacaacagccaccacuacaucauggucggcaacgagaccggccuggagcucacccugaccaacacguccaucaucaaccacaaguucugcaaccugagcgacgcccacaagaagaaccucuacgaccacgcccugauguccaucaucagcaccuuccaccuguccauccccaacuucaaccaguacgaggccaugagcugcgacuucaacgggggcaagaucuccgugcaguacaaccucagccacgcguacgccguggacgccgccaaccacugcgggaccaucgcgaacggcguccugcagaccuucaugcggauggccuggggcggguccuacaucgcccuggacagcggcaagggguccugggacugcaucaugacgagcuaccaguaccucaucauccagaacaccaccugggaggaccacugccaguucucccgccccagccccaucggcuaccuggggcugcucagccagcggacccgcgacaucuacaucucccggcgccugcugggcacguucaccuggacccucagcgacuccgagggcaacgagacccccgggggcuacugccugacgcgguggaugcugaucgaggccgagcucaagugcuucgggaacaccgccguggcgaagugcaacgagaagcacgacgaggaguucugcgacaugcugcgccuguucgacuucaacaagcaggccauccggcgccucaagaccgaggcccagaugagcauccagcugaucaacaaggccgugaacgcccugaucaacgaccagcucaucaugaagaaccaccuccgggacaucaugggcaucccguacugcaacuacuccaaguacugcuaccugaaccacaccgucacggggaagaccagccugccccgcugcugccugguguccaacggcagcuaccugaacgagacccacuucuccgacgacaucgagcagcaggcggacaacaugaucaccgagcuccugcagaaggaguacauggaccggcagggcaagacgccccuggggcucguggaccuguucgucuucagcaccuccuucuaccugaucagcaucuuccugcaccucaucaagaucccgacccaccgccacaucaccggcaagcccugccccaagccccaccggcugaaccacauggggaucugcuccugcggccuguacaagcacccgggggugcccgugaaguggaagcgcugaggacuagucccuguucccagagcccacuuuuuuuucuuuuuuugaaauaaaauagccugucuuucagaucuaaaaaaaaaaaaaaaaaaaaaaaaaaaaaaaaaaaaaaaaaaaaaaaaaaaaaaaaaaaaaaaaaaaaaaaaaaaaaaaaaaaaaaaaaaaaaaaaaaaa

SEQ ID NO: 38638 - RNA, 1721 nt, Artificial Sequence
  mRNA product Design a-1 (A100) comprising derived and/or modified sequence from LASV(ISTH2010-NIG-2012;Clade II)__AIT17482__GPCmut11 (opt1)
aggagagucccgcagucggcguccagcggcucugcuuguucgugugugugucguugcaggccuuauucaagcuuaccaugggccagaucaucaccuucuuccaggaggugccccacgucaucgaggaggugaugaacaucgugcugaucgcccucagccugcuggccauccucaaggggaucuacaacgucgcgaccugcggccuguucgggcugguguccuuccuccugcugugcggccgcagcugcuccacgaccuacaaggggguguacgagcuccagacccuggagcuggacauggccagccucaacaugaccaugccgcuguccugcacgaagaacaacagccaccacuacaucauggucggcaacgagaccggccuggagcucacccugaccaacacguccaucaucaaccacaaguucugcaaccugagcgacgcccacaagaagaaccucuacgaccacgcccugauguccaucaucagcaccuuccaccuguccauccccaacuucaaccaguacgaggccaugagcugcgacuucaacgggggcaagaucuccgugcaguacaaccucagccacgcguacgccguggacgccgccaaccacugcgggaccaucgcgaacggcguccugcagaccuucaugcggauggccuggggcggguccuacaucgcccuggacagcggcaagggguccugggacugcaucaugacgagcuaccaguaccucaucauccagaacaucaccugggaggaccacugccaguucucccgccccagccccaucggcuaccuggggcugcucagccagcggacccgcgacaucuacaucucccggcgccugcugggcaccuucacguggacccucagcgacuccgagggcaacgagacccccgggggcuacugccugacccgguggaugcugaucgaggccgagcucaagugcuucgggaacacggccguggcgaagugcaacgagaagcacgacgaggaguucugcgacaugcugcgccuguucgacuucaacaagcaggccauccggcgccucaagaccgaggcccagaugagcauccagcugaucaacaaggccgugaacgcccugaucaacgaccagcucaucaugaagaaccaccuccgggacaucaugggcauccccuacugcaacuacuccaaguacugcuaccugaaccacaccgucaccgggaagacgagccugccccgcugcugccugguguccaacggcagcuaccugaacgagacccacuucuccgacgacaucgagcagcaggcggacaacaugaucaccgagcuccugcagaaggaguacaucgaccggcagggcaagaccccgcuggggcucguggaccuguucgucuucagcacguccuucuaccugaucagcaucuuccugcaccucgugaagaucccgacccaccgccacguggucggcaagcccugccccaagccccaccggcugaaccacauggggaucugcuccugcggccuguacaagcacccgggggugcccgugaaguggaagcgcugaggacuagucccuguucccagagcccacuuuuuuuucuuuuuuugaaauaaaauagccugucuuucagaucuaaaaaaaaaaaaaaaaaaaaaaaaaaaaaaaaaaaaaaaaaaaaaaaaaaaaaaaaaaaaaaaaaaaaaaaaaaaaaaaaaaaaaaaaaaaaaaaaaaaa

SEQ ID NO: 38639 - RNA, 1721 nt, Artificial Sequence
  mRNA product Design a-1 (A100) comprising derived and/or modified sequence from LASV(Lassa virus/H.sapiens-wt/NGA/2015/ISTH_0543;Clade II)__AVO03639__GPCmut11 (opt1)
aggagagucccgcagucggcguccagcggcucugcuuguucgugugugugucguugcaggccuuauucaagcuuaccaugggccagaucaucaccuucuuccaggaggugccccacgucaucgaggaggugaugaacaucgugcugaucgcccucagccugcuggccauccucaaggggaucuacaacgucgcgaccugcggccuguucgggcugguguccuuccuccugcugugcggccgcagcugcuccacgaccuacaaggggguguacgagcuccagacccuggagcuggacauggccaaccucaacaugaccaugccgcugagcugcacgaagaacaacucccaccacuacaucauggucggcaacgagaccggccuggagcucacccugaccaacacgagcaucaucaaccacaaguucugcaaccuguccgacgcccacaagaagaaccucuacgaccacgcccugaugagcaucaucuccaccuuccaccugagcauccccaacuucaaccaguacgaggccauguccugcgacuucaacgggggcaagaucagcgugcaguacaaccucucccacaccuacgcgguggacgccgccaaccacugcgggaccaucgccaacggcguccugcagacguucaugcggauggcguggggcgggagcuacaucgcccuggacuccggcaaggggagcugggacugcaucaugaccuccuaccaguaccucgugauccagaacaccaccugggaggaccacugccaguucagccgccccucccccaucggcuaccuggggcugcucagccagcggacgcgcgacaucuacaucagccggcgccugcugggcaccuucaccuggacccucuccgacagcgagggcaacgagacgcccgggggcuacugccugacccgguggaugcugaucgaggccgagcucaagugcuucgggaacaccgccguggccaagugcaacgagaagcacgacgaggaguucugcgacaugcugcgccuguucgacuucaacaagcaggcgauccggcgccucaagaccgaggcccagauguccauccagcugaucaacaaggccgucaacgcccugaucaacgaccagcucaucaugaagaaccaccuccgggacaucaugggcauccccuacugcaacuacagcaaguacugcuaccugaaccacacggugaccgggaagaccucccugccccgcugcugccuggugagcaacggcuccuaccugaacgagacccacuucagcgacgacaucgagcagcaggccgacaacaugaucacggagcuccugcagaaggaguacaucgaccggcagggcaagaccccgcuggggcucgucgaccuguucguguucuccaccagcuucuaccugaucuccaucuuccugcaccucgugaagaucccgacccaccgccacaucacgggcaagcccugccccaagccccaccggcugaaccacauggggaucugcagcugcggccuguacaagcacccggggguccccgugaaguggaagcgcugaggacuagucccuguucccagagcccacuuuuuuuucuuuuuuugaaauaaaauagccugucuuucagaucuaaaaaaaaaaaaaaaaaaaaaaaaaaaaaaaaaaaaaaaaaaaaaaaaaaaaaaaaaaaaaaaaaaaaaaaaaaaaaaaaaaaaaaaaaaaaaaaaaaaa

SEQ ID NO: 38640 - RNA, 1721 nt, Artificial Sequence
  mRNA product Design a-1 (A100) comprising derived and/or modified sequence from LASV(Lassa virus/H.sapiens-wt/NGA/2016/ISTH_0009;Clade II)__AVO03571__GPCmut11 (opt1)
aggagagucccgcagucggcguccagcggcucugcuuguucgugugugugucguugcaggccuuauucaagcuuaccaugggccagaucaucaccuucuuccaggaggugccccacgucaucgaggaggugaugaacaucgugcugaucgcccucagccugcuggccauccucaaggggaucuacaacgucgcgaccugcggccugcuggggcucguguccuuccugcugcucugcggccgcagcugcuccacgaccuacaaggggguguacgagcugcagacccuggagcucgacauggccagccugaacaugaccaugccgcuguccugcacgaagaacaacagccaccacuacaucauggucggcaacgagaccggccucgagcugacccugaccaacacguccaucaucaaccacaaguucugcaaccucagcgacgcccacaagaagaaccuguacgaccacgcccugauguccaucaucagcaccuuccaccucuccauccccaacuucaaccaguacgaggccaugagcugcgacuucaacgggggccggaucuccgugcaguacaaccugagccacuccuacgcgguggacgccgccaaccacugcgggaccaucgccaacggcguccugcagaccuucaugcgcauggcguggggcgggagcuacaucgcccucgacuccggcaaggggagcugggacugcaucaugacguccuaccaguaccugaucauccagaacaccaccugggaggaccacugccaguucagccggcccagccccaucggcuaccuggggcuccugucccagcgcacccgggacaucuacaucagccgccggcugcucggcacguucaccuggacccuguccgacagcgagggcaacgagacccccgggggcuacugccugacgcgcuggaugcucaucgaggccgagcugaagugcuucgggaacaccgccguggccaagugcaacgagaagcacgacgaggaguucugcgacaugcugcggcuguucgacuucaacaagcaggcgauccgccggcugaagaccgaggcccagauguccauccagcugaucaacaaggccgugaacgcccucaucaacgaccagcugaucaugaagaaccaccuccgcgacaucaugggcaucccguacugcaacuacagcaaguacugcuaccucaaccacaccgucacggggaagaccucccugccccggugcugccuggugagcaacggcuccuaccucaacgagacccacuucagcgacgacaucgagcagcaggccgacaacaugaucaccgagcugcugcagaaggaguacaucgaccgccagggcaagacgccccucgggcugguggaccuguucgucuucuccaccagcuucuaccugaucuccaucuuccuccaccuggugaagaucccgacccaccggcacaucaccggcaagcccugccccaagccccaccgccugaaccacauggggaucugcagcugcggccucuacaaccacccgggggugcccgucaaguggaagcggugaggacuagucccuguucccagagcccacuuuuuuuucuuuuuuugaaauaaaauagccugucuuucagaucuaaaaaaaaaaaaaaaaaaaaaaaaaaaaaaaaaaaaaaaaaaaaaaaaaaaaaaaaaaaaaaaaaaaaaaaaaaaaaaaaaaaaaaaaaaaaaaaaaaaa

SEQ ID NO: 38641 - RNA, 1721 nt, Artificial Sequence
  mRNA product Design a-1 (A100) comprising derived and/or modified sequence from LASV(Lassa virus/H.sapiens-wt/NGA/2016/ISTH_0017;Clade II)__AVO03567__GPCmut11 (opt1)
aggagagucccgcagucggcguccagcggcucugcuuguucgugugugugucguugcaggccuuauucaagcuuaccaugggccagaucaucaccuucuuccaggaggugccccacgucaucgaggaggugaugaacaucgugcugaucgcccucagccugcuggccauccucaaggggaucuacaacgucgcgaccugcggccuguucgggcugguguccuuccuccugcugugcggccgcagcugcuccacgaccuacaaggggguguacgagcuccagacccuggagcuggacauggccagccucaacaugaccaugccgcuguccugcacgaagaacaacagccaccacuacaucauggucggcaacgagaccggccuggagcucacccugaccaacacguccaucaucaaccacaaguucugcaaccugagcgacgcccacaagaagaaccucuacgaccacgcccugauguccaucaucagcaccuuccaccuguccauccccaacuucaaccaguacgaggccaugagcugcgacuucaacgggggcaagaucuccgugcaguacaaccucagccacaccuacgcgaucgacgccgccaaccacugcgggaccaucgccaacggcgugcugcagacguucaugcggauggcguggggcggguccuacaucgcccuggacagcggcaagggguccugggacugcaucaugaccagcuaccaguaccucaucauccagaacaccaccugggaggaccacugccaguucucccgccccagccccaucggcuaccuggggcugcucagccagcggacgcgcgacaucuacaucucccggcgccugcugggcaccuucaccuggacccucagcgacuccgagggcaacgagacgcccgggggcuacugccugacccgguggaugcugaucgaggccgagcucaagugcuucgggaacaccgccgucgccaagugcaacgagaagcacgacgaggaguucugcgacaugcugcgccuguucgacuucaacaagcaggcgauccggcgccucaagaccgaggcccagaugagcauccagcugaucaacaaggccgugaacgcccugaucaacgaccagcucaucaugaagaaccaccuccgggacaucaugggcauccccuacugcaacuacuccaaguacugcuaccugaaccacacggugaccgggaagaccagccugccccgcugcugccuggucuccaacggcagcuaccugaacgagacccacuucuccgacgacaucgagcagcaggccgacaacaugaucacggagcuccugcagaaggaguacauggaccggcagggcaagaccccgcuggggcucguggaccuguucguguucagcaccuccuucuaccugaucagcaucuuccugcaccucguccgcaucccgacccaccggcacgugaucggcaagcccugccccaagccccaccgccugaaccacauggggaucugcuccugcggccuguacaagcacccgggggugcccgucaaguggaagcggugaggacuagucccuguucccagagcccacuuuuuuuucuuuuuuugaaauaaaauagccugucuuucagaucuaaaaaaaaaaaaaaaaaaaaaaaaaaaaaaaaaaaaaaaaaaaaaaaaaaaaaaaaaaaaaaaaaaaaaaaaaaaaaaaaaaaaaaaaaaaaaaaaaaaa

SEQ ID NO: 38642 - RNA, 1721 nt, Artificial Sequence
  mRNA product Design a-1 (A100) comprising derived and/or modified sequence from LASV(Lassa virus/H.sapiens-wt/NGA/2018/ISTH_0959;Clade II)__AVV65099__GPCmut11 (opt1)
aggagagucccgcagucggcguccagcggcucugcuuguucgugugugugucguugcaggccuuauucaagcuuaccaugggccagaucaucaccuucuuccaggaggugccccacgucaucgaggaggugaugaacaucgugcugaucgcccucagccugcuggccauccucaaggggaucuacaacgucgugaccugcggccuguucgggcugguguccuuccuccugcugugcggccgcagcugcuccacgaccuacaagggggucuacgagcuccagacccuggagcuggacauggcgagccucaacaugaccaugccgcuguccugcacgaagaacaacagccaccacuacaucauggugggcaacgagaccggccuggagcucacccugaccaacacguccaucaucaaccacaaguucugcaaccugagcgacgcccacaagaagaaccucuacgaccacgcccugauguccaucaucagcaccuuccaccuguccauccccaacuucaaccaguacgaggccaugagcugcgacuucaacgggggcaagaucuccgugcaguacaaccucagccacgccuacgcgaucgacgccgccaaccacugcgggaccaucgccaacggcguccugcagaccuucaugcggauggcguggggcggguccuacaucgcccuggacagcggcaagggguccugggacugcaucaugacgagcuaccaguaccucaucauccagaacaccaccugggaggaccacugccaguucucccgccccagccccaucggcuaccuggggcugcucagccagcggacccgcgacaucuacaucucccggcgccugcugggcacguucaccuggacccucagcgacuccgagggcaacgagacccccgggggcuacugccugacgcgguggaugcugaucgaggccgagcucaagugcuucgggaacaccgccguggccaagugcaacgagaagcacgacgaggaguucugcgacaugcugcgccuguucgacuucaacaagcaggcgauccggcgccucaagaccgaggcccagaugagcauccagcugaucaacaaggccgugaacgcccugaucaacgaccagcucaucaugaagaaccaccuccgggacaucaugggcaucccguacugcaacuacuccaaguacugcuaccugaaccacaccgucacggggaagaccagccugccccgcugcugccugguguccaacggcagcuaccugaacgagacccacuucuccgacgacaucgagcagcaggccgacaacaugaucaccgagcuccugcagaaggaguacaucgaccggcagggcaagacgccccuggggcucguggaccuguucgucuucagcaccuccuucuaccugaucagcaucuuccugcaccucgugaagaucccgacccaccgccacgugaucggcaagcccugccccaagccccaccggcugaaccacauggggaucugcuccugcggccuguacaagcacccggggguccccgugaaguggaagcgcugaggacuagucccuguucccagagcccacuuuuuuuucuuuuuuugaaauaaaauagccugucuuucagaucuaaaaaaaaaaaaaaaaaaaaaaaaaaaaaaaaaaaaaaaaaaaaaaaaaaaaaaaaaaaaaaaaaaaaaaaaaaaaaaaaaaaaaaaaaaaaaaaaaaaa

SEQ ID NO: 38643 - RNA, 1721 nt, Artificial Sequence
  mRNA product Design a-1 (A100) comprising derived and/or modified sequence from LASV(LASV003-NIG-2008;Clade II)__AIT17580__GPCmut11 (opt1)
aggagagucccgcagucggcguccagcggcucugcuuguucgugugugugucguugcaggccuuauucaagcuuaccaugggccagaucaucaccuucuuccaggaggugccccacgucaucgaggaggugaugaacaucgugcugaucgcccucagccugcuggccauccucaaggggaucuacaacgucgcgaccugcggccuguucgggcugguguccuuccuccugcugugcggccgcagcugcuccacgaccuacaaggggguguacgagcuccagacccuggagcuggacauggccagccucaacaugaccaugccgcuguccugcacgaagaacaacagccaccacuacaucauggucggcaacgagaccggccuggagcucacccugaccaacacguccaucaucaaccacaaguucugcaaccugagcgacgcccacaagaagaaccucuacgaccacgcccugauguccaucaucagcaccuuccaccuguccauccccaacuucaaccaguacgaggccaugagcugcgacuucaacgggggcaagaucuccgugcaguacaaccucagccacaccuacgcgguggacgccgccaaccacugcgggaccaucgccaacggcguccugcagacguucaugcggauggcguggggcggguccuacaucgcccuggacagcggcaagggguccugggacugcaucaugaccagcuaccaguaccucaucauccagaacaccaccugggaggaccacugccaguucucccgccccagccccaucggcuaccuggggcugcucagccagcggacgcgcgacaucuacaucucccggcgccugcugggcaccuucaccuggacccucagcgacuccgagagcaacgagacgccgggcggguacugccugacccgguggaugcugaucgaggccgagcucaagugcuucggcaacaccgccguggccaagugcaacgagaagcacgacgaggaguucugcgacaugcugcgccuguucgacuucaacaagcaggcgauccggcgccucaaggccgaggcccagauguccauccagcugaucaacaaggccgugaacgcccugaucaacgaccagcucaucaugaagaaccaccuccgggacaucauggggauccccuacugcaacuacagcaaguacugcuaccugaaccacaccgucacgggccgcaccucccugccccggugcugccuggugagcaacggguccuaccugaacgagacccacuucagcgacgacaucgagcagcaggcggacaacaugaucaccgagcuccugcagaaggaguacauggaccgccagggcaagacgccccugggccucguggaccuguucgucuucuccaccagcuucuaccugaucuccaucuuccugcaccucgugaagaucccgacccaccggcacgugaucgggaagcccugccccaagccccaccgccugaaccacaugggcaucugcagcugcgggcuguacaagcacccgggcguccccgugaaguggaagcggugaggacuagucccuguucccagagcccacuuuuuuuucuuuuuuugaaauaaaauagccugucuuucagaucuaaaaaaaaaaaaaaaaaaaaaaaaaaaaaaaaaaaaaaaaaaaaaaaaaaaaaaaaaaaaaaaaaaaaaaaaaaaaaaaaaaaaaaaaaaaaaaaaaaaa

SEQ ID NO: 38644 - RNA, 1721 nt, Artificial Sequence
  mRNA product Design a-1 (A100) comprising derived and/or modified sequence from LASV(LASV035-NIG-2009;Clade II)__AIT17588__GPCmut11 (opt1)
aggagagucccgcagucggcguccagcggcucugcuuguucgugugugugucguugcaggccuuauucaagcuuaccaugggccagaucaucaccuucuuccaggaggugccccacgucaucgaggaggugaugaacaucgugcugaucgcccucagccugcuggccauccucaaggggaucuacaacgucgcgaccugcggccuguucgggcugguguccuuccuccugcugugcggccgcagcugcuccacgaccuacaaggggguguacgagcuccagacccuggagcuggacauggccagccucaacaugaccaugccgcuguccugcacgaagaacaacagccaccacuacaucauggucggcaacgagaccggccuggagcucacccugaccaacacguccaucaucaaccacaaguucugcaaccugagcgacgcccacaagaagaaccucuacgaccacgcccugauguccaucaucagcaccuuccaccuguccauccccaacuucaaccaguacgaggccaugagcugcgacuucaacgggggcaagaucuccgugcaguacaaccucagccacgcguacgccguggacgccgccaaccacugcgggaccaucgcgaacggcguccugcagaccuucaugcggauggccuggggcggguccuacaucgcccuggacagcggcaagggguccugggacugcaucaugacgagcuaccaguaccucaucauccagaacaccaccugggaggaccacugccaguucucccgccccagccccaucggcuaccuggggcugcucagccagcggacccgcgacaucuacaucucccggcgccugcugggcacguucaccuggacccucagcgacuccgagggcaacgagacccccgggggcuacugccugacgcgguggaugcugaucgaggccgagcucaagugcuucgggaacaccgccguggcgaagugcaacgagaagcacgacgaggaguucugcgacaugcugcgccuguucgacuucaacaagcaggccauccggcgccucaaggccgaggcccagaugagcauccagcugaucaacaaggccgugaacgcgcugaucaacgaccagcucaucaugaagaaccaccuccgggacaucaugggcauccccuacugcaacuacuccaaguacugcuaccugaaccacaccgucaccgggaagacgagccugccccgcugcugccugguguccaacggcagcuaccugaacgagacccacuucuccgacgacaucgagcagcaggccgacaacaugaucaccgagcuccugcagaaggaguacaucgaccggcagggcaagaccccgcuggggcucguggaccuguucgucuucagcacguccuucuaccugaucagcaucuuccugcaccucgugaagaucccgacccaccgccacgugaucggcaagcccugccccaagccccaccggcugaaccacauggggaucugcuccugcggccuguacaagcacccggggguccccgugaaguggaagcgcugaggacuagucccuguucccagagcccacuuuuuuuucuuuuuuugaaauaaaauagccugucuuucagaucuaaaaaaaaaaaaaaaaaaaaaaaaaaaaaaaaaaaaaaaaaaaaaaaaaaaaaaaaaaaaaaaaaaaaaaaaaaaaaaaaaaaaaaaaaaaaaaaaaaaa

SEQ ID NO: 38645 - RNA, 1721 nt, Artificial Sequence
  mRNA product Design a-1 (A100) comprising derived and/or modified sequence from LASV(LASV1000-NIG-2009;Clade II)__AIT17782__GPCmut11 (opt1)
aggagagucccgcagucggcguccagcggcucugcuuguucgugugugugucguugcaggccuuauucaagcuuaccaugggccagaucaucaccuucuuccaggaggugccccacgucaucgaggaggugaugaacaucgugcugaucgcccucagccugcuggccauccucaaggggaucuacaacgucgcgaccugcggccuguucgggcugguguccuuccuccugcugugcggccgcagcugcuccacgaccuacaaggggguguacgagcuccagacccuggagcuggacauggccagccucaacaugaccaugccgcuguccugcacgaagaacaacagccaccacuacaucauggucggcaacgagaccggccuggagcucacccugaccaacacguccaucaucaaccacaaguucugcaaccugagcgacgcccacaagaagaaccucuacgaccacgcccugauguccaucaucagcaccuuccaccuguccauccccaacuucaaccaguacgaggccaugagcugcgacuucaacgggggcaagaucuccgugcaguacaaccucagccacaccuacgcgguggacgccgccaaccacugcgggaccaucgccaacggcguccugcagacguucaugcggauggcguggggcggguccuacaucgcccuggacagcggcaagggguccugggacugcaucaugaccagcuaccaguaccucaucauccagaacaccaccugggaggaccacugccaguucucccgccccagccccaucggcuaccuggggcugcucagccagcggacgcgcgacaucuacaucucccggcgccugcugggcaccuucaccuggacccucagcgacuccgagggcaacgagacgcccgggggcuacugccugacccgguggaugcugaucgaggccgagcucaagugcuucgggaacaccgccguggccaagugcaacgagaagcacgacgaggaguucugcgacaugcugcgccuguucgacuucaacaagcaggcgaucaagcggcucaagaccgaggcccagaugagcauccagcugaucaacaaggccgugaacgcccugaucaacgaccagcucaucaugaagaaccaccuccgcgacaucaugggcauccccuacugcaacuacuccaaguacugcuaccugaaccacacggucaccgggaagaccagccugccccggugcugccugguguccaacggcagcuaccugaacgagacccacuucuccgacgacaucgagcagcaggccgacaacaugaucacggagcuccugcagaaggaguacaucgaccgccagggcaagaccccgcuggggcucguggaccuguucgucuucagcaccuccuucuaccugaucagcaucuuccugcaccucgugaagaucccgacccaccggcacguggucggcaagcccugccccaagccccaccgccugaaccacauggggaucugcuccugcggccuguacaagcacccgggggugcccgugaaguggaagcggugaggacuagucccuguucccagagcccacuuuuuuuucuuuuuuugaaauaaaauagccugucuuucagaucuaaaaaaaaaaaaaaaaaaaaaaaaaaaaaaaaaaaaaaaaaaaaaaaaaaaaaaaaaaaaaaaaaaaaaaaaaaaaaaaaaaaaaaaaaaaaaaaaaaaa

SEQ ID NO: 38646 - RNA, 1721 nt, Artificial Sequence
  mRNA product Design a-1 (A100) comprising derived and/or modified sequence from LASV(LASV221-NIG-2010;Clade II)__AIT17624__GPCmut11 (opt1)
aggagagucccgcagucggcguccagcggcucugcuuguucgugugugugucguugcaggccuuauucaagcuuaccaugggccagaucaucaccuucuuccaggaggugccccacgucaucgaggaggugaugaacaucgugcugaucgcccucagccugcuggccauccucaaggggaucuacaacgucgcgaccugcggccuguucgggcugguguccuuccuccugcugugcggccgcagcugcuccacgaccuacaaggggguguacgagcuccagacccuggagcuggacauggccagccucaacaugaccaugccgcuguccugcacgaagaacaacagccaccacuacaucauggucggcaacgagaccggccuggagcucacccugaccaacacguccaucaucaaccacaaguucugcaaccugagcgacgcccacaagaagaaccucuacgaccacgcccugauguccaucaucagcaccuuccaccuguccauccccaacuucaaccaguacgaggccaugagcugcgacuucaacgggggcaagaucuccgugcaguacaaccucagccacaccuacgcgaucgacgccgccaaccacugcgggaccaucgccaacggcgugcugcagacguucaugcggauggcguggggcggguccuacaucgcccuggacagcggcaagggguccugggacugcaucaugaccagcuaccaguaccucaucauccagaacaccaccugggaggaccacugccaguucucccgccccagccccaucggcuaccuggggcugcucagccagcggacgcgcgacaucuacaucucccggcgccugcugggcaccuucaccuggacccucagcgacuccgagggcaacgagacgcccgggggcuacugccugacccgguggaugcugaucgaggccgagcucaagugcuucgggaacaccgccgucgccaagugcaacgagaagcacgacgaggaguucugcgacaugcugcgccuguucgacuucaacaagcaggcgauccggcgccucaagaccgaggcccagaugagcauccagcugaucaacaaggccgugaacgcccugaucaacgaccagcucaucaugaagaaccaccuccgggacaucaugggcauccccuacugcaacuacuccaaguacugcuaccugaaccacacggugaccgggaagaccagccugccccgcugcugccuggucuccaacggcagcuaccugaacgagacccacuucuccgacgacaucgagcagcaggccgacaacaugaucacggagaugcuccagaaggaguacauggaccggcagggcaagaccccgcuggggcugguggaccucuucguguucagcaccuccuucuaccugaucagcaucuuccugcaccuggucaagaucccgacccaccgccacgugaucggcaagcccugccccaagccccaccggcucaaccacauggggaucugcuccugcggccuguacaagcacccgggggugcccgucaaguggaagcgcugaggacuagucccuguucccagagcccacuuuuuuuucuuuuuuugaaauaaaauagccugucuuucagaucuaaaaaaaaaaaaaaaaaaaaaaaaaaaaaaaaaaaaaaaaaaaaaaaaaaaaaaaaaaaaaaaaaaaaaaaaaaaaaaaaaaaaaaaaaaaaaaaaaaaa

SEQ ID NO: 38647 - RNA, 1721 nt, Artificial Sequence
  mRNA product Design a-1 (A100) comprising derived and/or modified sequence from LASV(LASV237-NIG-2010;Clade II)__AIT17638__GPCmut11 (opt1)
aggagagucccgcagucggcguccagcggcucugcuuguucgugugugugucguugcaggccuuauucaagcuuaccaugggccagaucaucaccuucuuccaggaggugccccacgucaucgaggaggugaugaacaucgugcugaucgcccucagccugcuggccauccucaaggggaucuacaacgucgcgaccugcggccuguucgggcugguguccuuccuccugcugugcggccgcagcugcuccacgaccuacaaggggguguacgagcuccagacccuggagcuggacauggccagccucaacaugaccaugccgcuguccugcacgaagaacaacagccaccacuacaucauggucggcaacgagaccggccuggagcucacccugaccaacacguccaucaucaaccacaaguucugcaaccugagcgacgcccacaagaaggaccucuacgaccacgcccugauguccaucaucagcaccuuccaccuguccauccccaacuucaaccaguacgaggccaugagcugcgacuucaacgggggcaagaucuccgugcaguacaaccucagccacaccuacgcgguggacgccgccaaccacugcgggaccaucgccaacggcguccugcagacguucaugcggauggcguggggcggguccuacaucgcccuggacagcggcaagggguccugggacugcaucaugaccagcuaccaguaccucaucauccagaacaccaccugggaggaccacugccaguucucccgccccagccccaucggcuaccuggggcugcucagccagcggacgcgcgacaucuacaucucccggcgccugcugggcaccuucaccuggacccucagcgacuccgagggcaacgagacgcccgggggcuacugccugacccgguggaugcugaucgaggccgagcucaagugcuucgggaacaccgccguggccaagugcaacgagaagcacgacgaggaguucugcgacaugcugcgccuguucgacuucaacaagcaggcgauccggcgccucaagaccgaggcccagaugagcauccagcugaucaacaaggccgugaacgcccugaucaacgaccagcucaucaugaagaaccaccuccgggacaucaugggcauccccuacugcaacuacuccaaguacugcuaccugaaccacacggucaccgggaagaccagccugccccgcugcugccugguguccaacggcagcuaccugaacgagacccacuucuccgacgacaucgagcagcaggccgacaacaugaucacggagcuccugcagaaggaguacauggaccggcagggcaagaccccgcuggggcucguggaccuguucgucuucagcaccuccuucuaccugaucagcaucuuccugcaccucaucaagaucccgacccaccgccacaucacgggcaagcccugccccaagccccaccggcugaaccacauggggaucugcuccugcggccuguacaagcacccgggggugcccgugaaguggaagcgcugaggacuagucccuguucccagagcccacuuuuuuuucuuuuuuugaaauaaaauagccugucuuucagaucuaaaaaaaaaaaaaaaaaaaaaaaaaaaaaaaaaaaaaaaaaaaaaaaaaaaaaaaaaaaaaaaaaaaaaaaaaaaaaaaaaaaaaaaaaaaaaaaaaaaa

SEQ ID NO: 38648 - RNA, 1721 nt, Artificial Sequence
  mRNA product Design a-1 (A100) comprising derived and/or modified sequence from LASV(LASV253-NIG-2011;Clade II)__AIT17670__GPCmut11 (opt1)
aggagagucccgcagucggcguccagcggcucugcuuguucgugugugugucguugcaggccuuauucaagcuuaccaugggccagaucaucaccuucuuccaggaggugccccacgucaucgaggaggugaugaacaucgugcugaucgcccucagccugcuggccauccucaaggggaucuacaacgucgcgaccugcggccuguucgggcugguguccuuccuccugcugugcggccgcagcugcuccacgaccuacaaggggguguacgagcuccagacccuggagcuggacauggccagccucaacaugaccaugccgcuguccugcacgaagaacaacagccaccacuacaucauggucggcaacgagaccggccuggagcucacccugaccaacacguccaucaucaaccacaaguucugcaaccugagcgacgcccacaagaagaaccucuacgaccacgcccugauguccaucaucagcaccuuccaccuguccauccccaacuucaaccaguacgaggccaugagcugcgacuucaacgggggcaagaucuccgugcaguacaaccucagccacaccuacgcgguggacgccgccaaccacugcgggaccaucgccaacggcguccugcagacguucaugcggauggcguggggcggguccuacaucgcccuggacagcggcaagggguccugggacugcaucaugaccagcuaccaguaccucaucauccagaacaccaccugggaggaccacugccaguucucccgccccagccccaucggcuaccuggggcugcucagccagcggacgcgcgacaucuacaucucccggcgccugcugggcaccuucaccuggacccucagcgacuccgagggcaacgagacgcccgggggcuacugccugacccgguggaugcugaucgaggccgagcucaagugcuucgggaacaccgccguggccaagugcaacgagaagcacgacgaggaguucugcgacaugcugcgccuguucgacuucaacaagcaggcgauccggcgccucaaggccgaggcccagaugagcauccagcugaucaacaaggccgugaacgcccugaucaacgaccagcucaucaugaagaaccaccuccgggacaucaugggcaucccguacugcaacuacuccaaguacugcuaccugaaccacaccgucacggggcgcaccagccugccccggugcugccugguguccaacggcagcuaccugaacgagacccacuucuccgacgacaucgagcagcaggcggacaacaugaucaccgagcuccugcagaaggaguacaucgaccgccagggcaagacgccccuggggcucguggaccuguucgucuucagcaccuccuucuaccugaucagcaucuuccugcaccucgugaagaucccgacccaccggcacaucaucggcaagcccugccccaagccccaccgccugaaccacauggggaucugcuccugcggccuguacaagcacccgggggugcccgucaaguggaagcggugaggacuagucccuguucccagagcccacuuuuuuuucuuuuuuugaaauaaaauagccugucuuucagaucuaaaaaaaaaaaaaaaaaaaaaaaaaaaaaaaaaaaaaaaaaaaaaaaaaaaaaaaaaaaaaaaaaaaaaaaaaaaaaaaaaaaaaaaaaaaaaaaaaaaa

SEQ ID NO: 38649 - RNA, 1721 nt, Artificial Sequence
  mRNA product Design a-1 (A100) comprising derived and/or modified sequence from LASV(LASV254-NIG-2011;Clade II)__AIT17674__GPCmut11 (opt1)
aggagagucccgcagucggcguccagcggcucugcuuguucgugugugugucguugcaggccuuauucaagcuuaccaugggccagaucaucaccuucuuccaggaggugccccacgucaucgaggaggugaugaacaucgugcugaucgcccucagccugcuggccauccucaaggggaucuacaacgucgcgaccugcggccuguucgggcugguguccuuccuccugcugugcggccgcagcugcuccacgaccuacaaggggguguacgagcuccagacccuggagcuggacaugaccaaccucaacaugacgaugccgcugagcugcaccaagaacaacucccaccacuacaucauggucggcaacgagaccggccuggagcucacccugacgaacaccagcaucaucaaccacaaguucugcaaccuguccgacgcccacaagaagaaccucuacaaccacgcccugaugagcaucaucuccaccuuccaccugagcauccccaacuucaaccaguacgaggccauguccugcgacuucaacgggggcaagaucagcgugcaguacaaccucucccacagcuacgccguggacgcggccaaccacugcgggaccaucgccaacggcguccugcagacguucaugcggauggccuggggcggguccuacaucgcgcuggacagcggcaaggggaacugggacugcaucaugaccuccuaccaguaccucaucauccagaacaccaccugggaggaccacugccaguucagccgccccucccccaucggcuaccuggggcugcucagccagcggacgcgcgacaucuacaucagccggcgccugcugggcaccuucaccuggacccucuccgacagcgagggcaacgagacgcccgggggcuacugccugacccgguggaugcugaucgaggccgagcucaagugcuucgggaacaccgccguggccaagugcaacgagaagcacgacgaggaguucugcgacaugcugcgccuguucgacuucaacaagcaggccauccggcgccucaagaccgaggcgcaggccaacauccagcugaucaacaaggccgugaacgcccugaucaacgaccagcucaucaugaagaaccaccuccgggacaucaugggcauccccuacugcaacuacuccaaguacugcuaccugaaccacacggucaccgggaagaccagccugccccgcugcugccugguguccaacggcagcuaccugaacgagacccacuucuccgacgacaucgagcagcaggccgacaacaugaucacggagcuccugcagaaggaguacauggaccggcagggcaagaccccgcuggggcucguggaccuguucgucuucagcaccuccuucuaccugaucagcaucuuccugcaccucgugaagaucccgacccaccgccacgugaucggcaagcccugccccaagccccaccggcugaaccacauggggaucugcuccugcggccuguacaagcacccggggguccccgugaaguggaagcgcugaggacuagucccuguucccagagcccacuuuuuuuucuuuuuuugaaauaaaauagccugucuuucagaucuaaaaaaaaaaaaaaaaaaaaaaaaaaaaaaaaaaaaaaaaaaaaaaaaaaaaaaaaaaaaaaaaaaaaaaaaaaaaaaaaaaaaaaaaaaaaaaaaaaaa

SEQ ID NO: 38650 - RNA, 1721 nt, Artificial Sequence
  mRNA product Design a-1 (A100) comprising derived and/or modified sequence from LASV(Nig08-A19;Clade III)__ADU56618__GPCmut11 (opt1)
aggagagucccgcagucggcguccagcggcucugcuuguucgugugugugucguugcaggccuuauucaagcuuaccaugggccagaucgugaccuucuuccaggaggucccccacgugaucgaggaggugaugaacaucguccugaucgcccucagcauccuggccauccugaaggggcucuacaacaucgcgaccugcggccugaucgggcuggugacguuccuccugcuguccggccgcagcugcuccaugaccuacaaggggguguacgagcuccagacccuggagcugaacaugaacacccucaacaugacgaugccgcugagcugcaccaagaacaacucccaccacuacaucauggucggcaacgagaccggccuggagcucacccugacgaacaccagccugcuccaccacaaguucugcaaccuguccgacgcccacaagaagaaccuguacgaccacacccucaugagcaucaucuccaccuuccaccugagcauccccaacuucaaccaguacgaggccauguccugcgacuucaacgggggcaagaucacggugcaguacaaccugagccacuccuacgccaucgacgccgcgaaccacugcgggaccguggccaacggcguccuccagaccuucaugcggauggccuggggcgggagcuacaucgcccuggacuccggccgcgggaagugggacugcaucaugaccagcuaccaguaccugaucauccagaacacgaccugggaggaccacugccaguucucccggcccagccccaucggcuaccucgggcugcugucccagcgcacccgggacaucuacaucagccgccggcuccugggcaccuucacguggacccugagcgacuccgagggcaacgagacccccgggggcuacugccucacccgcuggaugcugaucgaggcggagcugaagugcuucgggaacacggccguggccaagugcaacgagaagcacgacgaggaguucugcgacaugcuccggcuguucgacuucaacaagcaggccauccgccggcugaaggccgaggcgcagaugagcauccagcucaucaacaaggccgugaacgcccugaucaacgaccagcugaucaugaagaaccaccuccgcgacaucaugggcauccccuacugcaacuacuccaaguacugcuaccugaaccacaccagcaccgggcggaccucccugccccgcugcugccucgucagcaacggcuccuaccugaacgagacgcacuucagcgacgacaucgagcagcaggccgacaacaugaucaccgagaugcugcagaaggaguaccucgaccggcagggcaagaccccgcuggggcugguggaccuguucguguucuccaccagcuucuaccucaucuccaucuuccugcaccuggucaagaucccgacgcaccgccacaucgugggcaagcccugccccaagccccaccggcucaaccacauggggaucugcagcugcggccuguacaagcagccgggggugcccguccgcuggaagcggugaggacuagucccuguucccagagcccacuuuuuuuucuuuuuuugaaauaaaauagccugucuuucagaucuaaaaaaaaaaaaaaaaaaaaaaaaaaaaaaaaaaaaaaaaaaaaaaaaaaaaaaaaaaaaaaaaaaaaaaaaaaaaaaaaaaaaaaaaaaaaaaaaaaaa

SEQ ID NO: 38651 - RNA, 1724 nt, Artificial Sequence
  mRNA product Design a-1 (A100) comprising derived and/or modified sequence from LASV(G1180-SLE-2010;Clade IV)__AIT17168__GPCmut11 (opt1)
aggagagucccgcagucggcguccagcggcucugcuuguucgugugugugucguugcaggccuuauucaagcuuaccaugggccagaucgugaccuucuuccaggaggucccccacgugaucgaggaggugaugaacaucguccugaucgcccucagcauccuggccgugcugaaggggcucuacaacuucgcgaccugcggccugguggggcugcucaccuuccugcugcucugcggccgcuccugcaccgccagccgguacaagggggucuacgagcugcagacccuggagcucaacauggagacccugaacaugacgaugccgcuguccugcaccaagaacaacagccaccacuacaucauggugggcaacgagaccggccucgagcugacccugacgaacaccuccaucaucaaccacaaguucugcaaccucagcgacgcccacaagaagaaccuguacgaccacgcccugauguccaucaucagcaccuuccaccucuccauccccaacuucaaccaguacgaggccaugagcugcgacuucaacgggggcaagaucuccgugcaguacaaccugagccacuccuacgcgggggacgccgccaaccacugcggcaccgucgccaacggggugcugcagacguucaugcgcauggcguggggcggcagcuacaucgcccucgacuccgggcacggcagcugggacugcaucaugaccuccuaccaguaccugaucauccagaacaccaccugggaggaccacugccaguucagccggcccucccccaucggguaccugggccuccugagccagcgcacgcgggacaucuacaucagccgccggcugcucggcaccuucaccuggacccuguccgacagcgaggggaaggacacgccgggcggguacugccugacccgcuggaugcucaucgaggccgagcugaagugcuucggcaacaccgccguggccaagugcaacgagaagcacgacgaggaguucugcgacaugcugcggcuguucgacuucaacaagcaggcgauccagcgccugaaggccgaggcccagauguccauccagcugaucaacaaggccgucaacgcccucaucaacgaccagcugaucaugaagaaccaccuccgggacaucauggggauccccuacugcaacuacagcaaguacugcuaccucaaccacaccacgaccggcaagaccucccugcccaagugcugccuggugagcaacggcuccuaccucaacgagacccacuucagcgacgacaucgagcagcaggcggacaacaugaucacggagaugcugcagaaggaguacauggagcgccaggggaagacgccccugggccucguggaccuguucgucuucuccaccagcuucuaccugaucuccaucuuccugcaccucgugaagaucccgacccaccggcacaucgugggcaagagcugccccaagccccaccgccugaaccacauggggaucugcuccugcgggcuguacaagcagcccggcgucccggugaaguggaagcggugaggacuagucccuguucccagagcccacuuuuuuuucuuuuuuugaaauaaaauagccugucuuucagaucuaaaaaaaaaaaaaaaaaaaaaaaaaaaaaaaaaaaaaaaaaaaaaaaaaaaaaaaaaaaaaaaaaaaaaaaaaaaaaaaaaaaaaaaaaaaaaaaaaaaa

SEQ ID NO: 38652 - RNA, 1724 nt, Artificial Sequence
  mRNA product Design a-1 (A100) comprising derived and/or modified sequence from LASV(G1442-SLE-2011;Clade IV)__AIT17180__GPCmut11 (opt1)
aggagagucccgcagucggcguccagcggcucugcuuguucgugugugugucguugcaggccuuauucaagcuuaccaugggccagaucgugaccuucuuccaggaggucccccacgugaucgaggaggugaugaacaucguccugaucgcccucagcauccuggccgugcugaaggggcucuacaacguggcgaccugcggccugaucgggcuggucacguuccuccugcugugcggccgcuccugcaccaccacccucuacaaggggguguacgagcugcagacgcuggagcucaacauggagacccugaacaugaccaugccgcugagcugcaccaagaacaacucccaccacuacauccgggugggcaacgagacgggccucgagcugacccugaccaacaccagcaucaucaaccacaaguucugcaaccucuccgacgcccacaagaagaaccuguacgaccacgcccugaugagcaucaucuccacguuccaccucagcauccccaacuucaaccaguacgaggccauguccugcgacuucaacgggggcaagaucagcguccaguacaaccugucccacagcuacgccggggacgcggccaaccacugcggcaccguggccaacggggugcugcagaccuucaugcgcauggccuggggcggcuccuacaucgcgcucgacagcgggcggggcaacugggacugcaucaugaccuccuaccaguaccugaucauccagaacacgaccugggacgaccacugccaguucagccgccccucccccaucggguaccugggccuccugagccagcggacccgcgacgucuacaucucccggcgccugcucggcaccuucacguggacccugagcgacagcgaggggaaggacaccccgggcggguacugccugacccgguggaugcucaucgaggccgagcugaagugcuucggcaacacggccguggccaagugcaacgagaagcacgacgaggaguucugcgacaugcugcgccucuucgacuucaacaagcaggccauccagcggcugaaggcggaggcccagauguccauccagcugaucaacaaggccgugaacgcccucaucaacgaccagcugaucaugaagaaccaccuccgcgacaucauggggauccccuacugcaacuacagcaaguacugcuaccugaacaacaccgccaccggcaagaccucccugcccaagugcugccugaucagcaacggcuccuaccucaacgagacgcacuucagcgacgacaucgagcaggaggcggacaacaugaucaccgagaugcugcagaaggaguacauggagcggcaggggaagacgccccugggccucgucgaccuguucguguucuccaccagcuucuaccugaucuccaucuuccugcaccucgugaagaucccgacccaccgccacaucgucggcaagagcugccccaagccccaccggcugaaccacauggggaucugcuccugcgggcuguacaagcagcccggcgugccggugcgcuggaagcggugaggacuagucccuguucccagagcccacuuuuuuuucuuuuuuugaaauaaaauagccugucuuucagaucuaaaaaaaaaaaaaaaaaaaaaaaaaaaaaaaaaaaaaaaaaaaaaaaaaaaaaaaaaaaaaaaaaaaaaaaaaaaaaaaaaaaaaaaaaaaaaaaaaaaa

SEQ ID NO: 38653 - RNA, 1724 nt, Artificial Sequence
  mRNA product Design a-1 (A100) comprising derived and/or modified sequence from LASV(G3010-SLE-2013;Clade IV)__AIT17344__GPCmut11 (opt1)
aggagagucccgcagucggcguccagcggcucugcuuguucgugugugugucguugcaggccuuauucaagcuuaccaugggccagaucgugaccuucuuccaggaggucccccacgugaucgaggaggugaugaacaucguccugaucgcccucagcauccuggccgugcugaaggggcucuacaacuucgcgaccugcggccugguggggcuggucacguuccuccugcugugcggccgcuccugcaccaccagccucuacaaggggguguacgagcugcagacccuggagcucaacauggagacgcugaacaugaccaugccgcuguccugcaccaagaacaacagccaccacuacaucauggugggcaacgagaccggccucgagcugacgcugaccaacaccuccaucaucaaccacaaguucugcaaccucagcgacgcccacaagaagaaccuguacaaccacgcccugauguccaucaucagcaccuuccaccucuccauccccaacuucaaccaguacgaggccaugagcugcgacuucaacgggggcaagaucuccguccaguacaaccugagccacuccuacgccggggacgcggccagccacugcggcacgguggccaacggggugcugcagaccuucaugcggauggccuggggcggcuccuacaucgcgcucgacagcggguacggcaagugggacugcaucaugaccuccuaccaguaccugaucauccagaacaccacgugggaggaccacugccaguucagccgccccucccccaucggguaccugggccuccugagccagcggacccgcgacaucuacaucagccggcgccugcucggcaccuucaccuggacgcuguccgacagcgaggggaaggacaccccgggcggguacugccugacccgguggaugcucaucgaggccgagcugaagugcuucggcaacaccgccgucgccaagugcaacgagaagcacgacgaggaguucugcgacaugcugcgccucuucgacuucaacaagcaggccauccagcggcugaagacggaggcgcagauguccauccagcugaucaacaaggccgugaacgcccucaucaacgaccagcugaucaugaagaaccaccuccgcgacaucauggggauccccuacugcaacuacagcaaguacugcuaccugaaccacaccaccaccggcaagacgucccugcccaagugcugccuggugagcaacggcuccuaccucaacgagacccacuucagcgacgacaucgagcagcaggccgacaacaugaucaccgagaugcugcagaaggaguacauggagcggcaggggaagacgccccugggccucgucgaccuguucguguucuccaccagcuucuaccugaucuccaucuuccugcaccucgugaagaucccgacccaccgccacaucgucggcaagagcugccccaagccccaccggcugaaccacauggggaucugcuccugcgggcuguacaagcagcccggcgugccggugcgcuggaagcggugaggacuagucccuguucccagagcccacuuuuuuuucuuuuuuugaaauaaaauagccugucuuucagaucuaaaaaaaaaaaaaaaaaaaaaaaaaaaaaaaaaaaaaaaaaaaaaaaaaaaaaaaaaaaaaaaaaaaaaaaaaaaaaaaaaaaaaaaaaaaaaaaaaaaa

SEQ ID NO: 38654 - RNA, 1724 nt, Artificial Sequence
  mRNA product Design a-1 (A100) comprising derived and/or modified sequence from LASV(G502-SLE-2009;Clade IV)__AIT17126__GPCmut11 (opt1)
aggagagucccgcagucggcguccagcggcucugcuuguucgugugugugucguugcaggccuuauucaagcuuaccaugggccagaucgugaccuucuuccaggaggucccccacgugaucgaggaggugaugaacaucguccugaucgcccucagcauccuggccgugcugaaggggcucuacaacuucgcgaccugcggccugguggggcugcucacguuccugcugcucugcggccgcuccugcaccaccgggcuguacaagggcgucuacgagcugcagacccucgagcugaacauggagacgcugaacaugaccaugccgcucagcugcaccaagaacaacucccaccacuacaucauggugggcaacgagaccgggcuggagcugacgcucaccaacaccagcaucaucaaccacaaguucugcaaccuguccgacgcccacaagaagaaccuguacgaccacgcccucaugagcaucaucuccaccuuccaccugagcauccccaacuucaaccaguacgaggccauguccugcgacuucaacggcgggaagaucagcgugcaguacaaccugucccacagcuacgccggcgacgcggccgaccacugcgggacggucgccaacggcgugcuccagaccuucaugcggauggccuggggcggguccuacaucgcgcuggacagcggccgcgggcggugggacugcaucaugaccuccuaccaguaccugaucauccagaacaccacgugggaggaccacugccaguucagccgccccucccccaucggcuaccucggccugcugagccagcggacccgcgacaucuacaucucccggcgccuccuggggaccuucaccuggacgcugagcgacagcgagggcaaggacacccccgggggcuacugccucacccgguggaugcugaucgaggccgagcugaagugcuucgggaacaccgccguggccaagugcaacgagaagcacgacgaggaguucugcgacaugcuccgccuguucgacuucaacaagcaggccauccagcggcugaaggcggaggcccagauguccauccagcucaucaacaaggccgucaacgcccugaucaacgaccagcuggugaugaagaaccaccuccgcgacaucaugggcauccccuacugcaacuacagccgguacugcuaccugaaccacacgaccaccggccgcaccucccugcccaagugcugccucgugagcaacggguccuaccugaacgagacgcacuucagcgacgacaucgagcagcaggccgacaacaugaucaccgagaugcugcagaaggaguacauggagcggcagggcaagaccccgcucgggcuggucgaccuguucguguucuccaccagcuucuaccugaucuccaucuuccuccaccuggugaagaucccgacgcaccgccacaucgucggcaagagcugccccaagccccaccggcugaaccacauggggaucugcuccugcggccucuacaagcagcccggcgugccggugaaguggaagcgcugaggacuagucccuguucccagagcccacuuuuuuuucuuuuuuugaaauaaaauagccugucuuucagaucuaaaaaaaaaaaaaaaaaaaaaaaaaaaaaaaaaaaaaaaaaaaaaaaaaaaaaaaaaaaaaaaaaaaaaaaaaaaaaaaaaaaaaaaaaaaaaaaaaaaa

SEQ ID NO: 38655 - RNA, 1724 nt, Artificial Sequence
  mRNA product Design a-1 (A100) comprising derived and/or modified sequence from LASV(G733-SLE-2010;Clade IV)__AIT17154__GPCmut11 (opt1)
aggagagucccgcagucggcguccagcggcucugcuuguucgugugugugucguugcaggccuuauucaagcuuaccaugggccagaucgugaccuucuuccaggaggucccccacgugaucgaggaggugaugaacaucguccugaucgcccucagcauccuggccgugcugaaggggcucuacaacuucgcgaccugcggcaucguggggcuggucuccuuccugcuccugugcggccgcagcugcacgaccucccuguacaaggggguguacgagcuccagacccuggagcugaacauggagacccucaacaugacgaugccgcugagcugcaccaagaacaacucccaccacuacaucauggugggcaacgagaccggccuggagcucacccugacgaacaccagcaucaucaaccacaaguucugcaaccuguccgacgcccacaagaagaaccucuacgaccacgcccugaugagcaucaucuccaccuuccaccugagcauccccaacuucaaccaguacgaggccauguccugcgacuucaacgggggcaagaucagcguccaguacaaccucucccacagcuacgccggggacgcggccaaccacugcggcaccaucgccaacggggugcugcagacguucaugcggauggccuggggcggcuccuacaucgcgcuggacagcgggcgcgaccggugggacugcaucaugaccuccuaccaguaccucaucauccagaacaccaccugggaggaccacugccaguucagccgccccucccccaucggcuaccuggggcugcucagccagcggacgcgcgacaucuacaucagccggcgccugcugggcaccuucaccuggacccucuccgacagcgagggcaaggacacgcccgggggcuacugccugacccgguggaugcugaucgaggccgagcucaagugcuucgggaacaccgccguggccaagugcaacgagaagcacgacgaggaguucugcgacaugcugcgccuguucgacuucaacaagcaggccauccagcggcucaaggcggaggcccagauguccauccagcugaucaacaaggccgucaacgcccugaucaacgaccagcucaucaugaagaaccaccuccgcgacaucaugggcauccccuacugcaacuacagcaaguacugcuaccugaaccacaccacgaccgggaagaccucccugcccaagugcugccuggugagcaacggcuccuaccugaacgagacccacuucagcgacgacaucgagcagcaggccgacaacaugaucacggagaugcuccagaaggaguacauggagcggcagggcaagaccccgcuggggcugguggaccucuucgucuucuccaccagcuucuaccugaucuccaucuuccugcaccuggugaagaucccgacccaccgccacguggucggcaagagcugccccaagccccaccggcucaaccacauggggaucugcuccugcggccuguacgggcagcccggcgugccggugaaguggaagcgcugaggacuagucccuguucccagagcccacuuuuuuuucuuuuuuugaaauaaaauagccugucuuucagaucuaaaaaaaaaaaaaaaaaaaaaaaaaaaaaaaaaaaaaaaaaaaaaaaaaaaaaaaaaaaaaaaaaaaaaaaaaaaaaaaaaaaaaaaaaaaaaaaaaaaa

SEQ ID NO: 38656 - RNA, 1724 nt, Artificial Sequence
  mRNA product Design a-1 (A100) comprising derived and/or modified sequence from MOPV/LASV reassortant(IGS-1;Clade IV)__AFY05576__GPCmut11 (opt1)
aggagagucccgcagucggcguccagcggcucugcuuguucgugugugugucguugcaggccuuauucaagcuuaccaugggccagaucgugaccuucuuccaggaggucccccacgugaucgaggaggugaugaacaucguccugaucgcccucagcgugcuggccgugcugaaggggcucuacaacuucgcgaccugcggccuggucgggcuggugacguuccuccugcugugcggccgcuccugcaccaccagccucuacaaggggguguacgagcugcagacccuggagcucaacauggagacgcugaacaugaccaugccgcuguccugcaccaagaacaacagccaccacuacaucauggucggcaacgagaccggccucgagcugacgcugaccaacaccuccaucaucaaccacaaguucugcaaccucagcgacgcccacaagaagaaccuguacgaccacgcccugauguccaucaucagcaccuuccaccucuccauccccaacuucaaccaguacgaggccaugagcugcgacuucaacgggggcaagaucuccgugcaguacaaccugagccacuccuacgccggggacgcggccaaccacugcggcacgguggccaacgggguccugcagaccuucaugcggauggccuggggcggcagcuacaucgcgcucgacuccgggcgcggcaacugggacugcaucaugaccagcuaccaguaccugaucauccagaacaccacgugggaggaccacugccaguucucccggcccagccccaucggguaccugggccuccugucccagcgcacccgggacaucuacaucagccgccggcugcucggcaccuucaccuggacgcugagcgacuccgagggggaggacaccccgggcggguacugccugacccgcuggaugcucaucgaggccgagcugaagugcuucggcaacaccgccguggccaagugcaacgagaagcacgacgaggaguucugcgacaugcugcggcuguucgacuucaacaagcaggccauccagcgccugaaggcggaggcccagaugagcauccagcugaucaacaaggccgugaacgcccucaucaacgaccagcugaucaugaagaaccaccuccgggacaucauggggauccccuacugcaacuacuccaaguacugcuaccucaaccacacgaccaccggccgcaccagccugcccaagugcugccuggucuccaacggcagcuaccucaacgagacgcacuucuccgacgacaucgagcagcaggccgacaacaugaucaccgagaugcugcagaaggaguacauggagcggcaggggaagacgccccugggccucguggaccuguucguguucagcaccuccuucuaccugaucagcaucuuccugcaccucgucaagaucccgacccaccgccacaucguggggaaguccugccccaagccccaccggcugaaccacaugggcaucugcagcugcgggcuguacaagcagcccggcgugccggucaaguggaagcgcugaggacuagucccuguucccagagcccacuuuuuuuucuuuuuuugaaauaaaauagccugucuuucagaucuaaaaaaaaaaaaaaaaaaaaaaaaaaaaaaaaaaaaaaaaaaaaaaaaaaaaaaaaaaaaaaaaaaaaaaaaaaaaaaaaaaaaaaaaaaaaaaaaaaaa

SEQ ID NO: 38657 - RNA, 1724 nt, Artificial Sequence
  mRNA product Design a-1 (A100) comprising derived and/or modified sequence from LASV(LM765-SLE-2012;Clade IV)__AIT17814__GPCmut11 (opt1)
aggagagucccgcagucggcguccagcggcucugcuuguucgugugugugucguugcaggccuuauucaagcuuaccaugggccagaucgugaccuucuuccaggaggucccccacgugaucgaggaggugaugaacaucguccugaucgcccucagcauccuggccgugcugaaggggcucuacaacuucgcgaccugcggccugguggggcuggucacguuccuccugcugugcggccgcuccugcaccaccagccucuacaaggggguguacgagcugcagacccuggagcucaacauggagacgcugaacaugaccaugccgcuguccugcaccaagaacaacagccaccacuacaucauggugggcaacgagaccggccucgagcugacgcugaccaacaccuccaucaucgaccacaaguucugcaaccucagcgacgcccaccggaagaaccuguacgaccacgcccugauguccaucaucagcaccuuccaccucuccauccccaacuucaaccaguacgaggccaugagcugcgacuucaacgggggcaagaucuccguccaguacaaccugagccacuccuacgccaaggacgcggccgaccacugcgggacgguggccaacggcgugcugcagaccuucaugcgcauggccuggggcgggagcuacaucgcgcucgacuccggccgggggcgcugggacugcaucaugaccagcuaccaguaccugaucauccagaacaccacgugggaggaccacugccaguucucccggcccagccccaucggcuaccuggggcuccugucccagcgcacccgggacaucuacaucagccgccggcugcucggcaccuucaccuggacgcugagcgacuccgagggcaaggacacccccgggggcuacugccugacccgcuggaugcucaucgaggccgagcugaagugcuucgggaacaccgccgucgccaagugcaacgagaagcacgacgaggaguucugcgacaugcugcggcuguucgacuucaacaagcaggccauccagcgccugaaggcggaggcccagaugagcauccagcugaucaacaaggccgugaacgcccucaucaacgaccagcugaucaugaagaaccaccuccgggacaucaugggcauccccuacugcaacuacuccaaguacugcuaccucaaccacacgaccaccgggaagaccagccugcccaagugcugccugguguccaacggcagcuaccucaacgagacgcacuucuccgacgacaucgagcagcaggccgacaacaugaucaccgagaugcugcagaaggaguacauggagcgccagggcaagaccccgcuggggcucgucgaccuguucguguucagcaccuccuucuaccugaucagcaucuuccugcaccucgugaagaucccgacgcaccggcacaucgucggcaagcccugccccaagccccaccgccugaaccacauggggaucugcuccugcggccuguacaagcagccgggggugcccgugaaguggaagcggugaggacuagucccuguucccagagcccacuuuuuuuucuuuuuuugaaauaaaauagccugucuuucagaucuaaaaaaaaaaaaaaaaaaaaaaaaaaaaaaaaaaaaaaaaaaaaaaaaaaaaaaaaaaaaaaaaaaaaaaaaaaaaaaaaaaaaaaaaaaaaaaaaaaaa

SEQ ID NO: 38658 - RNA, 1724 nt, Artificial Sequence
  mRNA product Design a-1 (A100) comprising derived and/or modified sequence from LASV(LM776-SLE-2012;Clade IV)__AIT17824__GPCmut11 (opt1)
aggagagucccgcagucggcguccagcggcucugcuuguucgugugugugucguugcaggccuuauucaagcuuaccaugggccagaucgugaccuucuuccaggaggucccccacgugaucgaggaggugaugaacaucguccugaucgcccucagcauccuggccgugcugaaggggcucuacaacuucgcgaccugcggccugguggggcuggucacguuccuccugcugugcggccgcuccugcaccaccagcguguacaaggggguguacgagcuccagacccuggagcugaacauggagacgcucaacaugaccaugccgcuguccugcaccaagaacaacagccaccacuacaucauggucggcaacgagaccggccuggagcucacgcugaccaacaccuccaucaucaaccacaaguucugcaaccugagcgacgcccacaagaagaaccucuacgaccacgcccugauguccaucaucagcaccuuccaccuguccauccccaacuucaaccaguacgaggccaugagcugcgacuucaacgggggcaagaucuccgugcaguacaaccucagccacuccuacgccggggacgcggccaaccacugcggcacgguggccaacgggguccugcagaccuucaugcggauggccuggggcggcagcuacaucgcgcuggacuccgggcacggcaagugggacugcaucaugaccagcuaccaguaccucaucauccagaacaccacgugggaggaccacugccaguucucccgccccagccccaucggguaccugggccugcucucccagcggacccgcgacaucuacaucagccggcgccugcugggcaccuucaccuggacgcucagcgacuccgaggggaaggacaccccgggcggguacugccugacccgguggaugcugaucgaggccgagcucaagugcuucggcaacaccgccguggccaagugcaacgagaagcacgacgaggaguucugcgacaugcugcgccuguucgacuucaacaagcaggccauccagcggcucaaggcggaggcccagaugagcauccagcugaucaacaaggccgugaacgcccugaucaacgaccagcucaucaugaagaaccaccuccgcgacaucauggggauccccuacugcaacuacuccaaguacugcuaccugaaccacacgaccaccggcaagaccagccugcccaagugcugccuggucuccaacggcagcuaccugaacgagacgcacuucuccgacgacaucgagcagcaggccgacaacaugaucaccgagaugcuccagaaggaguacauggagcggcaggggaagacgccccugggccugguggaccucuucguguucagcaccuccuucuaccugaucagcaucuuccugcaccuggucaagaucccgacccaccgccacaucguggggaaguccugccccaagccccaccggcucaaccacaugggcaucugcagcugcgggcuguacaagcagcccggcgugccgguccgcuggaagcggugaggacuagucccuguucccagagcccacuuuuuuuucuuuuuuugaaauaaaauagccugucuuucagaucuaaaaaaaaaaaaaaaaaaaaaaaaaaaaaaaaaaaaaaaaaaaaaaaaaaaaaaaaaaaaaaaaaaaaaaaaaaaaaaaaaaaaaaaaaaaaaaaaaaaa

SEQ ID NO: 38659 - RNA, 1724 nt, Artificial Sequence
  mRNA product Design a-1 (A100) comprising derived and/or modified sequence from LASV(Mad39;Clade IV)__ANH09722__GPCmut11 (opt1)
aggagagucccgcagucggcguccagcggcucugcuuguucgugugugugucguugcaggccuuauucaagcuuaccaugggccagaucgugaccuucuuccaggaggucccccacgugaucgaggaggugaugaacaucguccugaucgcccucagcauccuggccgugcugaaggggcucuacaacguggcgaccugcggccugaucgggcuggucacguuccuccugcugugcggccgcuccugcaccaccacccucuacaaggggguguacgagcugcaggcccuggagcucaacauggagacgcugaacaugaccaugccgcugagcugcaccaagaacaacucccaccacuacauccgggugggcaacgagaccggccucgagcugacgcugaccaacaccagccucaucaaccacaaguucugcaaccuguccgacgcccacaagaagaaccuguacgaccacgcccucaugagcaucaucuccaccuuccaccugagcauccccaacuucaaccaguacgaggccauguccugcgacuucaacgacgggaagaucagcguccaguacaaccugucccacacguacgcgggcgacaccgccaaccacugcgggaccguggccaacggcgugcuccagaccuucaugcgcauggccuggggcgggagcuacaucgcgcuggacuccggccgcgggggcugggacugcaucaugacgagcuaccaguaccugaucauccagaacaccaccugggaggaccacugccaguucucccggcccagccccaucggguaccucggccugcugucccagcggacccgcgacaucuacaucagccggcgccuccugggcacguucaccuggacccuguccgacagcgaggggaaggacaccccgggcggguacugccucacgcgguggaugcugaucgaggccgagcugaagugcuucggcaacaccgccgucgccaagugcaacgagaagcacgacgaggaguucugcgacaugcuccgccuguucgacuucaacaagcaggccauccagcggcugaaggcggaggcccagaugagcauccagcucaucaacaaggccgugaacgcccugaucaacgaccagcugaucaugaagaaccaccuccgcgacaucauggggauccccuacugcaacuacuccaaguacugcuaccugaaccacaccgugaccggcaagacgagccugcccaagugcugccucgucuccaacggcagcuaccugaacgagacccacuucuccgacgacaucgagcagcaggccgacaacaugaucaccgagaugcugcagaaggaguacauggagcggcaggggaagacgccccucggccugguggaccuguucguguucagcaccuccuucuaccugaucagcaucuuccuccaccuggucaagaucccgacccaccgccacgugguggggaagcccugccccaagccccaccggcugaaccacaugggcaucugcuccugcggguucuacaagcagccgggcguccccgugcgcuggaagcggugaggacuagucccuguucccagagcccacuuuuuuuucuuuuuuugaaauaaaauagccugucuuucagaucuaaaaaaaaaaaaaaaaaaaaaaaaaaaaaaaaaaaaaaaaaaaaaaaaaaaaaaaaaaaaaaaaaaaaaaaaaaaaaaaaaaaaaaaaaaaaaaaaaaaa

SEQ ID NO: 38660 - RNA, 1724 nt, Artificial Sequence
  mRNA product Design a-1 (A100) comprising derived and/or modified sequence from LASV(Z0947-SLE-2011;Clade IV)__AIT17840__GPCmut11 (opt1)
aggagagucccgcagucggcguccagcggcucugcuuguucgugugugugucguugcaggccuuauucaagcuuaccaugggccagaucgugaccuucuuccaggaggucccccacgugaucgaggaggugaugaacaucguccugaucgcccucagcauccuggccgugcugaaggggcucuacaacuucgcgaccugcggccugguggggcuggucacguuccuccugcugugcggccgcuccugcaccaucagccucuacaaggggguguacgagcugcagacccuggagcucaacauggagacccugaacaugacgaugccgcuguccugcaccaagaacaacagccaccacuacaucauggugggcaacgagaccggccucgagcugacccugacgaacaccuccaucaucaaccacaaguucugcaaccucagcgacgcccacaagaagaaccuguacgaccacgcccugauguccaucaucagcaccuuccaccucuccauccccaacuucaaccaguacgaggccaugagcugcgacuucaacgggggcaagaucuccguccaguacaaccugagccacuccuacgccggggacgcggccaaccacugcggcaccguggccaacggggugcugcagacguucaugcggauggccuggggcggcagcuacaucgcgcucgacuccgggcgcgaccggugggacugcaucaugaccagcuaccaguaccugaucauccagaacaccaccugggaggaccacugccaguucucccgccccagccccaucggcuaccuggggcuccugucccagcggacgcgcgacaucuacaucagccggcgccugcucggcaccuucaccuggacccugagcgacuccgagggcaaggacacgcccgggggcuacugccugacccgguggaugcucaucgaggccgagcugaagugcuucgggaacaccgccgucgccaagugcaacgagaagcacgacgaggaguucugcgacaugcugcgccucuucgacuucaacaagcaggccauccagcggcugaaggcggaggcccagaugagcauccagcugaucaacaaggccgugaacgcccucaucaacgaccagcugaucaugaagaaccaccuccgcgacaucaugggcauccccuacugcaacuacuccaaguacugcuaccugaaccacaccacgaccgggaagaccagccugcccaagugcugccugguguccaacggcagcuaccucaacgagacccacuucuccgacgacaucgagcagcaggccgacaacaugaucacggagaugcugcagaaggaguacauggagcggcagggcaagaccccgcuggggcucgucgaccuguucguguucagcaccuccuucuaccugaucagcaucuuccugcaccucgugaagaucccgacccaccgccacaucgucggcaagcccugccccaagccccaccggcugaaccacauggggaucugcuccugcggccuguacaagcagccgggggugcccgugaaguggaagcgcugaggacuagucccuguucccagagcccacuuuuuuuucuuuuuuugaaauaaaauagccugucuuucagaucuaaaaaaaaaaaaaaaaaaaaaaaaaaaaaaaaaaaaaaaaaaaaaaaaaaaaaaaaaaaaaaaaaaaaaaaaaaaaaaaaaaaaaaaaaaaaaaaaaaaa

SEQ ID NO: 38661 - RNA, 1724 nt, Artificial Sequence
  mRNA product Design a-1 (A100) comprising derived and/or modified sequence from LASV(Josiah;Clade IV)__NP_694870__GPCmut11 (opt1)
aggagagucccgcagucggcguccagcggcucugcuuguucgugugugugucguugcaggccuuauucaagcuuaccaugggccagaucgugaccuucuuccaggaggucccccacgugaucgaggaggugaugaacaucguccugaucgcccucagcgugcuggccgugcugaaggggcucuacaacuucgcgaccugcggccuggucgggcuggugacguuccuccugcugugcggccgcuccugcaccaccagccucuacaaggggguguacgagcugcagacccuggagcucaacauggagacgcugaacaugaccaugccgcuguccugcaccaagaacaacagccaccacuacaucauggucggcaacgagaccggccucgagcugacgcugaccaacaccuccaucaucaaccacaaguucugcaaccucagcgacgcccacaagaagaaccuguacgaccacgcccugauguccaucaucagcaccuuccaccucuccauccccaacuucaaccaguacgaggccaugagcugcgacuucaacgggggcaagaucuccgugcaguacaaccugagccacuccuacgccggggacgcggccaaccacugcggcacgguggccaacgggguccugcagaccuucaugcggauggccuggggcggcagcuacaucgcgcucgacuccgggcgcggcaacugggacugcaucaugaccagcuaccaguaccugaucauccagaacaccacgugggaggaccacugccaguucucccggcccagccccaucggguaccugggccuccugucccagcgcacccgggacaucuacaucagccgccggcugcucggcaccuucaccuggacgcugagcgacuccgaggggaaggacaccccgggcggguacugccugacccgcuggaugcucaucgaggccgagcugaagugcuucggcaacaccgccguggccaagugcaacgagaagcacgacgaggaguucugcgacaugcugcggcuguucgacuucaacaagcaggccauccagcgccugaaggcggaggcccagaugagcauccagcugaucaacaaggccgugaacgcccucaucaacgaccagcugaucaugaagaaccaccuccgggacaucauggggauccccuacugcaacuacuccaaguacugcuaccucaaccacacgaccaccggccgcaccagccugcccaagugcugccuggucuccaacggcagcuaccucaacgagacgcacuucuccgacgacaucgagcagcaggccgacaacaugaucaccgagaugcugcagaaggaguacauggagcggcaggggaagacgccccugggccugguggaccucuucguguucagcaccuccuucuaccugaucagcaucuuccugcaccucgucaagaucccgacccaccgccacaucguggggaaguccugccccaagccccaccggcugaaccacaugggcaucugcagcugcgggcuguacaagcagcccggcgugccggucaaguggaagcgcugaggacuagucccuguucccagagcccacuuuuuuuucuuuuuuugaaauaaaauagccugucuuucagaucuaaaaaaaaaaaaaaaaaaaaaaaaaaaaaaaaaaaaaaaaaaaaaaaaaaaaaaaaaaaaaaaaaaaaaaaaaaaaaaaaaaaaaaaaaaaaaaaaaaaa

SEQ ID NO: 38662 - RNA, 1721 nt, Artificial Sequence
  mRNA product Design a-1 (A100) comprising derived and/or modified sequence from LASV(LP;Clade I)__AAF86701__GPCmut11 (opt1)
aggagagucccgcagucggcguccagcggcucugcuuguucgugugugugucguugcaggccuuauucaagcuuaccaugggccagaucaucaccuucuuccaggaggugccccacgucaucgaggaggugaugaacaucgugcugaucgcccucagccugcuggccauccucaaggggcuguacaacaucgcgaccugcggcaucaucgggcuggucgccuuccucuuccugugcggcaaguccugcagccugacgcucaagggcggguacgagcugcagacccuggagcucaacauggagacccugaacaugaccaugccgcuguccugcacgaagaacagcucccaccacuacauccgcgugggcaacgagaccgggcucgagcugacccugaccaacacgagcaucaucaaccacaaguucugcaaccucuccgacgcccacaagaagaaccuguacgaccacgcccugaugagcaucaucuccaccuuccaccucagcauccccaacuucaaccaguacgaggccauguccugcgacuucaacggcgggaagaucagcgugcaguacaaccugucccacagcuacgcgggcgacgccgccgagcacugcgggaccgucgccaacggcgugcugcagaccuucaugcggauggcguggggcgggcgcuacaucgcccucgacuccggcaaggggaacugggacugcaucaugacgagcuaccaguaccugaucauccagaacaccaccugggaggaccacugccaguucucccggcccagccccaucggcuaccugggccuccugucccagcgcacccgggacaucuacaucagccgccggcugcucgggacguucaccuggacccugagcgacuccgagggcaacgagacccccgggggcuacugccugacgcgcuggaugcucaucgaggccgagcugaagugcuucgggaacaccgccguggccaagugcaacgagaagcacgacgaggaguucugcgacaugcugcggcuguucgacuucaacaagcaggcgauccgccggcugaaggccgaggcccagaugagcauccagcugaucaacaaggccgucaacgcccucaucaacgaccagcugaucaugaagaaccaccuccgcgacaucaugggcauccccuacugcaacuacuccaaguacugcuaccucaaccacaccagcuccggccggaccagccugcccaagugcugccugaucuccaacgggagcuaccucaacgagacgcaguucuccgacgacaucgagcagcaggcggacaacaugaucaccgagaugcugcagaaggaguacaucgagcgccagggcaagaccccgcuggggcugguggacaucuucaucuucagcaccuccuucuaccucaucagcaucuuccugcaccugaucaagaucccgacgcaccggcacaucgugggcaagcccugccccaagccccaccgccucaaccacaugggggucugcuccugcggccuguacaagcacccgggcgugcccaccaaguggaagcggugaggacuagucccuguucccagagcccacuuuuuuuucuuuuuuugaaauaaaauagccugucuuucagaucuaaaaaaaaaaaaaaaaaaaaaaaaaaaaaaaaaaaaaaaaaaaaaaaaaaaaaaaaaaaaaaaaaaaaaaaaaaaaaaaaaaaaaaaaaaaaaaaaaaaa

SEQ ID NO: 38663 - RNA, 1721 nt, Artificial Sequence
  mRNA product Design a-1 (A100) comprising derived and/or modified sequence from LASV(803213;Clade II)__AAF86703__GPCmut11 (opt1)
aggagagucccgcagucggcguccagcggcucugcuuguucgugugugugucguugcaggccuuauucaagcuuaccaugggccagaucaucaccuucuuccaggaggugccccacgucaucgaggaggugaugaacaucgugcugaucgcccucagccugcuggccauccucaaggggaucuacaacgucgcgaccugcggccuguucgggcugaucuccuuccuccugcugugcggccgcagcugcuccgugacguacaaggggguguacgagcuccagacccuggagcugaacauggccaaccucaacaugaccaugccgcugagcugcaccaagaacaacucccaccacuacaucauggucggcaacgagacgggccuggagcucacccugaccaacaccagcaucaucaaccacaaguucugcaaccuguccgacgcccacaagaagaaccucuacgaccacgcccugaugagcaucaucuccacguuccaccugagcauccccaacuucaaccaguacgaggccauguccugcgacuucaacgggggcaagaucagcgugcaguacaaccucucccacagcuucgcgguggacgccgccaaccacugcgggaccaucgccaacggcguccugcagaccuucaugcggauggcguggggcggguccuacaucgcccuggacagcggcaaggggaacugggacugcaucaugaccuccuaccaguaccucaucauccagaacacgaccugggaggaccacugccaguucagccgccccucccccaucggcuaccuggggcugcucagccagcggacccgcgacaucuacaucagccggcgccugcugggcaccuucacguggacccucuccgacagcgagggcaacgaggcccccgggggcuacugccugacccgguggaugcugaucgaggccgagcucaagugcuucgggaacaccgccguggcgaagugcaacgagaagcacgacgaggaguucugcgacaugcugcgccuguucgacuucaacaagcaggccaucaagcggcucaagacggaggcccagauguccauccagcugaucaacaaggccgugaacgcccugaucaacgaccagcucaucaugaagaaccaccuccgcgacaucaugggcauccccuacugcaacuacagccgguacugcuaccugaaccacaccgucaccgggaagaccucccugccccgcugcugccuggugagcaacggcuccuaccugaacgagacgcacuucagcgacgacaucgagcagcaggcggacaacaugaucaccgagaugcuccagaaggaguacauggaccggcagggcaagaccccgcuggggcugguggaccuguucgucuucuccaccagcuucuaccucaucuccaucuuccugcaccuggugaagaucccgacgcaccgccacaucgugggcaagcccugccccaagccccaccggcucaaccacauggggaucugcagcugcggccuguacaagcacccggggguccccgugaaguggaagcgcugaggacuagucccuguucccagagcccacuuuuuuuucuuuuuuugaaauaaaauagccugucuuucagaucuaaaaaaaaaaaaaaaaaaaaaaaaaaaaaaaaaaaaaaaaaaaaaaaaaaaaaaaaaaaaaaaaaaaaaaaaaaaaaaaaaaaaaaaaaaaaaaaaaaaa

SEQ ID NO: 38664 - RNA, 1721 nt, Artificial Sequence
  mRNA product Design a-1 (A100) comprising derived and/or modified sequence from LASV(GA391;Clade III)__CAA36645__GPCmut11 (opt1)
aggagagucccgcagucggcguccagcggcucugcuuguucgugugugugucguugcaggccuuauucaagcuuaccaugggccagaucgugaccuucuuccaggaggucccccacgugaucgaggaggugaugaacaucguccugaucgcccucagcauccuggccauccugaaggggcucuacaacguggcgaccugcggccugaucgggcuggugacguuccuccugcuguccggccgcagcugcucccucaucuacaaggggaccuacgagcugcagacccuggagcucaacauggagacccugaacaugacgaugccgcugagcugcaccaagaacaacucccaccacuacauccgggucggcaacgagaccggccucgagcugacccugacgaacaccagcauccucaaccacaaguucugcaaccuguccgacgcccacaagcgcaaccuguacgaccacagccucauguccaucaucagcaccuuccaccuguccauccccaacuucaaccaguacgaggccaugagcugcgacuucaacgggggcaagaucaccgugcaguacaaccugucccacagcuucgccguggacgccgcggggcacugcggcacgcucgccaacgggguccugcagaccuucaugcggauggccuggggcggcuccuacaucgcccuggacagcgggcgcggcaacugggacugcaucaugaccuccuaccaguaccucaucauccagaacaccacgugggacgaccacugccaguucagccggcccucccccaucggguaccugggccugcucagccagcgcacccgggacaucuacaucagccgccggcugcugggcaccuucaccuggacgcucuccgacagcgaggggaacgagaccccgggcggguacugccugacccgcuggaugcugaucgaggcggagcucaagugcuucggcaacaccgccguggccaagugcaacgagaagcacgacgaggaguucugcgacaugcugcggcuguucgacuucaacaagcaggccauccgccggcucaagacggaggcccagauguccauccagcugaucaacaaggcggugaacgcccugaucaacgaccagcucaucaugaagaaccaccuccgcgacaucauggggauccccuacugcaacuacagccgguacugcuaccugaaccacaccuccaccggcaagaccagccugccccgcugcugccugaucuccaacggcagcuaccugaacgagacgaaguucuccgacgacaucgagcagcaggccgacaacaugaucaccgagaugcugcagaaggaguacaucgaccggcaggggaagacgccccucggccuggucgaccuguucguguucagcaccuccuucuaccucaucagcaucuuccugcaccuggugaagaucccgacccaccgccacaucgucgggaagcccugccccaagccccaccggcucaaccacaugggcaucugcuccugcgggcuguacaagcagccgggcgugcccgugcgcuggaagcggugaggacuagucccuguucccagagcccacuuuuuuuucuuuuuuugaaauaaaauagccugucuuucagaucuaaaaaaaaaaaaaaaaaaaaaaaaaaaaaaaaaaaaaaaaaaaaaaaaaaaaaaaaaaaaaaaaaaaaaaaaaaaaaaaaaaaaaaaaaaaaaaaaaaaa

SEQ ID NO: 38665 - RNA, 1724 nt, Artificial Sequence
  mRNA product Design a-1 (A100) comprising derived and/or modified sequence from LASV(AV;Clade V)__CCA30314__GPCmut11 (opt1)
aggagagucccgcagucggcguccagcggcucugcuuguucgugugugugucguugcaggccuuauucaagcuuaccaugggccagaucgugaccuucuuccaggaggucccccacgugaucgaggaggugaugaacaucguccugaucgcccucagcauccuggccgugcugaaggggcucuacaacaucgcgaccugcggccugaucgggcugaucacguuccuccugcugugcggccgcuccugcagcuccaaccucuacaaggggguguacgagcugcagagccuggaccucaacauggagacccugaacaugaccaugccgcuguccugcaccaagaacaacagccaccacuacauccgggucggcaacgacacgggccucgagcugacccugaccaacaccuccauccucaaccacaaguucugcaaccugagcgacgcccacaagaaggaccuguacgaccacgcccucauguccaucaucagcacguuccaccuguccauccccaacuucaaccaguacgaggccaugagcugcgacuucaacgggggcaagaucuccgugcaguacaaccugagccacuccuacgccaucgacgcggccaaccacugcgggaccguggccaacggcauccuccagaccuucaugcgcauggccuggggcgggagcuacaucgcgcuggacuccggccgggggaacugggacugcaucaugaccagcuaccaguaccugaucauccagaacacgaccugggagaaccacugccaguucucccgccccagccccaucggcuaccucgggcugcugagccagcggacccgcgacaucuacaucucccggcgccuccugggcaccuucacguggacccugagcgacuccgagggcaacgccacccccgggggcuacugccucacccgguggaugcugaucgaggccgagcugaagugcuucgggaacacggccgucgccaagugcaacgagaagcacgacgaggaguucugcgacaugcuccgccuguucgacuucaacaagcaggcgaucagccggcugaaguccgaggcccagaugagcauccagcucaucaacaaggccgugaacgcccugaucaacgaccagcugaucaugaagaaccaccuccgcgacaucaugggcauccccuacugcaacuacuccaaguacugcuaccugaaccacaccaucaccgggaagaccagccugcccaagugcugccucguguccaacggcagcuaccugaacgagacgcacuucuccgacgacaucgagcagcaggccgacaacaugaucaccgagaugcugcagaaggaguacauggagcggcagggcaagaccccgcuggggcucgucgaccuguucguguucagcaccuccuucuaccugaucagcaucuuccuccgccuggugaagaucccgacgcaccggcacaucgucggcaagcccugccccaagccccaccgccugaaccacauggggaucugcuccugcggccucuacaagcagccgggggugcccgugcgguggaagcgcugaggacuagucccuguucccagagcccacuuuuuuuucuuuuuuugaaauaaaauagccugucuuucagaucuaaaaaaaaaaaaaaaaaaaaaaaaaaaaaaaaaaaaaaaaaaaaaaaaaaaaaaaaaaaaaaaaaaaaaaaaaaaaaaaaaaaaaaaaaaaaaaaaaaaa

SEQ ID NO: 38666 - RNA, 1721 nt, Artificial Sequence
  mRNA product Design a-1 (A100) comprising derived and/or modified sequence from LASV(Togo/2016/7082;Clade VI)__AMR44577__GPCmut11 (opt1)
aggagagucccgcagucggcguccagcggcucugcuuguucgugugugugucguugcaggccuuauucaagcuuaccaugggccagaucaucaccuucuuccaggaggugccccacgucaucgaggaggugaugaacaucgugcugaucgcccucagccugcuggccauccucaagggggucuacaacguggcgaccugcggcaucaucgggcuggugacguuccuguuccucugcggccgcuccugcagccugaucuacaagggguccuacgagcugcagacccucgagcugaacauggagacccugaacaugaccaugccgcucagcugcacgaagaacuccagccaccacuacauccgggucggcaacgagaccggccuggagcugacccucaccaacacguccaucaucaaccacaaguucugcaaccugagcgacgcccacaagcgcaaccuguacgaccacgcccucauguccauccugagcaccuuccaccuguccauccccaacuucaaccaguacgaggccaugagcugcgacuucaacgggggcaagaucuccgugcaguacaaccucagccacgccuacgcgguggacgccgccgagcacugcgggaccgucgccaacggcgugcugcagaccuucaugcggauggcguggggcggguccuacaucgcccuggacagcggccgcgggaacugggacugcaucaugacguccuaccaguaccucaucauccagaacaccaccugggaggaccacugccaguucagccggcccucccccaucggcuaccuggggcugcucagccagcgcacccgggacaucuacaucagccgccggcugcugggcacguucaccuggacccucuccgacagcgagggcaacgagacccccgggggcuacugccugacgcgcuggaugcugaucgaggccgagcucaagugcuucgggaacaccgccguggccaagugcaacgagaagcacgacgaggaguucugcgacaugcugcggcuguucgacuucaacaagcaggcgauccagcgccucaaguccgaggcccagaugagcauccagcugaucaacaaggccgucaacgcccugaucaacgaccagcucaucaugaagaaccaccuccgggacaugaugggcauccccuacugcaacuacuccaaguacugcuaccugaaccacaccagcuccgggcgcaccagccugcccaagugcugccugguguccaacggcagcuaccugaacgagacgcacuucuccgacgacaucgagcagcaggccgacaacaugaucaccgagaugcuccagaaggaguacaucgaccggcagggcaagaccccgcuggggcugguggaccuguucgucuucagcaccuccuucuaccucaucagcaucuuccugcaccugaucaagaucccgacgcaccgccacaucgugggcaagcccugccccaagccccaccggcucaaccacauggggaucugcuccugcggccuguacaagcagccgggggugcccacccgcuggaagcggugaggacuagucccuguucccagagcccacuuuuuuuucuuuuuuugaaauaaaauagccugucuuucagaucuaaaaaaaaaaaaaaaaaaaaaaaaaaaaaaaaaaaaaaaaaaaaaaaaaaaaaaaaaaaaaaaaaaaaaaaaaaaaaaaaaaaaaaaaaaaaaaaaaaaa

SEQ ID NO: 38667 - RNA, 1721 nt, Artificial Sequence
  mRNA product Design a-1 (A100) comprising derived and/or modified sequence from LASV(KAK-428;Clade n.d. (VII))__ANH09740__GPCmut11 (opt1)
aggagagucccgcagucggcguccagcggcucugcuuguucgugugugugucguugcaggccuuauucaagcuuaccaugggccagaucgugaccuucuuccaggaggucccccacgugaucgaggaggugaugaacaucguccugaucgcccucagccugcuggccauccucaaggggcuguacaacuucgcgaccugcggcgugaucgggcugaucacguuccuccugcugugcggccgcuccugcagcgccaccuacaaggggcaguacgagcuccagacccuggagcugaacauggagucccucaacaugaccaugccgcugagcugcacgaagaacaacucccaccacuacauccgggccggcaacaacaccggccuggagcucacccugaccaacacgagcaucaucucccacaaguucugcaaccugagcgacgcccacaagaagaaccucuacgaccacacccugauguccaucaucaccaccuuccaccugagcauccccaacuucaaccaguacgaggccauguccugcgacuucaacgggggcaagaucagcauccaguacaaccucucccacagcuacgcgggggacgccgcccagcacugcggcacgguggccaacgggguccugcagaccuucaugcgcauggcguggggcggcuccuaccuggcccucgacagcgggcggcgcggcugggacugcaucaucuccagcuaccaguaccugaucauccagaacaccaccugggacgaccacugccaguucucccggcccagccccaucggguaccugggcuucgugagccagaagacgcgcgacaucuacaucucccggcgccuccugggcaccuucaccuggacccugagcgacuccgaggggcacgacaugccgggcggguacugccucacgcgguggaugcugaucgaggccgaccugaagugcuucggcaacaccgccguggccaagugcaacgagaagcacgacgaggaguucugcgacauguggcgccucuucgacuucaacaagcaggcgauccagcggcugaaggccgaggcccagaugaacauccagcugaucaacaaggccgucaacgcccucaucaacgaccagcugaugaugaagaaccaccuccgcgacaucauggggauccccuacugcaacuacagcaaguucugcuaccugaacaacaccaccacgggccggaccucccugccccgcugcugccugaucagcaacggcuccuaccucaacgagacccacuucagcgacgacaucgagcagcaggcggacaacaugaucaccgagaugcugcagaaggaguacauggaccggcaggggaagacgccccugggccucguggaccuguucguguucuccaccagcuucuaccugaucaccaucuuccugcaccucgucaagaucccgacccaccgccacaucguggggaagcccugccccaagccccaccggcugaaccacaugggcaucugcuccugcgggcuguacaagcagccgggcgugcccguccgcuggaagcggugaggacuagucccuguucccagagcccacuuuuuuuucuuuuuuugaaauaaaauagccugucuuucagaucuaaaaaaaaaaaaaaaaaaaaaaaaaaaaaaaaaaaaaaaaaaaaaaaaaaaaaaaaaaaaaaaaaaaaaaaaaaaaaaaaaaaaaaaaaaaaaaaaaaaa

SEQ ID NO: 38668 - RNA, 1721 nt, Artificial Sequence; identical to SEQ ID NO: 38662
  mRNA product Design a-1 (A100) comprising derived and/or modified sequence from LASV(Pinneo-NIG-1969;Clade I)__AIT17836__GPCmut11 (opt1)

SEQ ID NO: 38669 - RNA, 1721 nt, Artificial Sequence
  mRNA product Design a-1 (A100) comprising derived and/or modified sequence from LASV(ISTH0009-NIG-2011;Clade II)__AIT17404__GPCmut11 (opt1)
aggagagucccgcagucggcguccagcggcucugcuuguucgugugugugucguugcaggccuuauucaagcuuaccaugggccagaucaucaccuucuuccaggaggugccccacgucaucgaggaggugaugaacaucgugcugaucgcccucagccugcuggccauccucaaggggaucuacaacgucgcgaccugcggccuguucgggcugguguccuuccuccugcugugcggccgcagcugcuccacgaccuacaaggggguguacgagcuccagacccuggagcuggacauggccagccucaacaugaccaugccgcuguccugcacgaagaacaacagccaccacuacaucauggucggcaacgagaccggccuggagcucacccugaccaacacguccaucaucaaccacaaguucugcaaccugagcgacgcccacaagaagaaccucuacgaccacgcccugauguccaucaucagcaccuuccaccuguccauccccaacuucaaccaguacgaggccaugagcugcgacuucaacgggggcaagaucuccgugcaguacaaccucagccacgcguacgccguggacgccgccaaccacugcgggaccaucgcgaacggcguccugcagaccuucaugcggauggccuggggcggguccuacaucgcccuggacagcggcaagggguccugggacugcaucaugacgagcuaccaguaccucaucauccagaacaccaccugggaggaccacugccaguucucccgccccagccccaucggcuaccuggggcugcucagccagcggacccgcgacaucuacaucucccggcgccugcugggcacguucaccuggacccucagcgacuccgagggcaacgagacccccgggggcuacugccugacgcgguggaugcugaucgaggccgagcucaagugcuucgggaacaccgccguggcgaagugcaacgagaagcacgacgaggaguucugcgacaugcugcgccuguucgacuucaacaagcaggccauccggcgccucaagaccgaggcccagaugagcauccagcugaucaacaaggccgugaacgcccugaucaacgaccagcucaucaugaagaaccaccuccgggacaucaugggcaucccguacugcaacuacuccaaguacugcuaccugaaccacaccgucacggggaagaccagccugccccgcugcugccugguguccaacggcagcuaccugaacgagacccacuucuccgacgacaucgagcagcaggcggacaacaugaucaccgagcuccugcagaaggaguacauggaccggcagggcaagacgccccuggggcugguggaccucuucgucuucagcaccuccuucuaccugaucagcaucuuccugcaccucaucaagaucccgacccaccgccacaucaccggcaagcccugccccaagccccaccggcugaaccacauggggaucugcuccugcggccuguacaagcacccgggggugcccgugaaguggaagcgcugaggacuagucccuguucccagagcccacuuuuuuuucuuuuuuugaaauaaaauagccugucuuucagaucuaaaaaaaaaaaaaaaaaaaaaaaaaaaaaaaaaaaaaaaaaaaaaaaaaaaaaaaaaaaaaaaaaaaaaaaaaaaaaaaaaaaaaaaaaaaaaaaaaaaa

SEQ ID NO: 38670 - RNA, 1721 nt, Artificial Sequence
  mRNA product Design a-1 (A100) comprising derived and/or modified sequence from LASV(ISTH2010-NIG-2012;Clade II)__AIT17482__GPCmut11 (opt1)
aggagagucccgcagucggcguccagcggcucugcuuguucgugugugugucguugcaggccuuauucaagcuuaccaugggccagaucaucaccuucuuccaggaggugccccacgucaucgaggaggugaugaacaucgugcugaucgcccucagccugcuggccauccucaaggggaucuacaacgucgcgaccugcggccuguucgggcugguguccuuccuccugcugugcggccgcagcugcuccacgaccuacaaggggguguacgagcuccagacccuggagcuggacauggccagccucaacaugaccaugccgcuguccugcacgaagaacaacagccaccacuacaucauggucggcaacgagaccggccuggagcucacccugaccaacacguccaucaucaaccacaaguucugcaaccugagcgacgcccacaagaagaaccucuacgaccacgcccugauguccaucaucagcaccuuccaccuguccauccccaacuucaaccaguacgaggccaugagcugcgacuucaacgggggcaagaucuccgugcaguacaaccucagccacgcguacgccguggacgccgccaaccacugcgggaccaucgcgaacggcguccugcagaccuucaugcggauggccuggggcggguccuacaucgcccuggacagcggcaagggguccugggacugcaucaugacgagcuaccaguaccucaucauccagaacaucaccugggaggaccacugccaguucucccgccccagccccaucggcuaccuggggcugcucagccagcggacccgcgacaucuacaucucccggcgccugcugggcaccuucacguggacccucagcgacuccgagggcaacgagacccccgggggcuacugccugacccgguggaugcugaucgaggccgagcucaagugcuucgggaacacggccguggcgaagugcaacgagaagcacgacgaggaguucugcgacaugcugcgccuguucgacuucaacaagcaggccauccggcgccucaagaccgaggcccagaugagcauccagcugaucaacaaggccgugaacgcccugaucaacgaccagcucaucaugaagaaccaccuccgggacaucaugggcauccccuacugcaacuacuccaaguacugcuaccugaaccacaccgucaccgggaagacgagccugccccgcugcugccugguguccaacggcagcuaccugaacgagacccacuucuccgacgacaucgagcagcaggcggacaacaugaucaccgagcuccugcagaaggaguacaucgaccggcagggcaagaccccgcuggggcugguggaccucuucgucuucagcacguccuucuaccugaucagcaucuuccugcaccucgugaagaucccgacccaccgccacguggucggcaagcccugccccaagccccaccggcugaaccacauggggaucugcuccugcggccuguacaagcacccgggggugcccgugaaguggaagcgcugaggacuagucccuguucccagagcccacuuuuuuuucuuuuuuugaaauaaaauagccugucuuucagaucuaaaaaaaaaaaaaaaaaaaaaaaaaaaaaaaaaaaaaaaaaaaaaaaaaaaaaaaaaaaaaaaaaaaaaaaaaaaaaaaaaaaaaaaaaaaaaaaaaaaa

SEQ ID NO: 38671 - RNA, 1721 nt, Artificial Sequence
  mRNA product Design a-1 (A100) comprising derived and/or modified sequence from LASV(Lassa virus/H.sapiens-wt/NGA/2015/ISTH_0543;Clade II)__AVO03639__GPCmut11 (opt1)
aggagagucccgcagucggcguccagcggcucugcuuguucgugugugugucguugcaggccuuauucaagcuuaccaugggccagaucaucaccuucuuccaggaggugccccacgucaucgaggaggugaugaacaucgugcugaucgcccucagccugcuggccauccucaaggggaucuacaacgucgcgaccugcggccuguucgggcugguguccuuccuccugcugugcggccgcagcugcuccacgaccuacaaggggguguacgagcuccagacccuggagcuggacauggccaaccucaacaugaccaugccgcugagcugcacgaagaacaacucccaccacuacaucauggucggcaacgagaccggccuggagcucacccugaccaacacgagcaucaucaaccacaaguucugcaaccuguccgacgcccacaagaagaaccucuacgaccacgcccugaugagcaucaucuccaccuuccaccugagcauccccaacuucaaccaguacgaggccauguccugcgacuucaacgggggcaagaucagcgugcaguacaaccucucccacaccuacgcgguggacgccgccaaccacugcgggaccaucgccaacggcguccugcagacguucaugcggauggcguggggcgggagcuacaucgcccuggacuccggcaaggggagcugggacugcaucaugaccuccuaccaguaccucgugauccagaacaccaccugggaggaccacugccaguucagccgccccucccccaucggcuaccuggggcugcucagccagcggacgcgcgacaucuacaucagccggcgccugcugggcaccuucaccuggacccucuccgacagcgagggcaacgagacgcccgggggcuacugccugacccgguggaugcugaucgaggccgagcucaagugcuucgggaacaccgccguggccaagugcaacgagaagcacgacgaggaguucugcgacaugcugcgccuguucgacuucaacaagcaggcgauccggcgccucaagaccgaggcccagauguccauccagcugaucaacaaggccgucaacgcccugaucaacgaccagcucaucaugaagaaccaccuccgggacaucaugggcauccccuacugcaacuacagcaaguacugcuaccugaaccacacggugaccgggaagaccucccugccccgcugcugccuggugagcaacggcuccuaccugaacgagacccacuucagcgacgacaucgagcagcaggccgacaacaugaucacggagcuccugcagaaggaguacaucgaccggcagggcaagaccccgcuggggcuggucgaccucuucguguucuccaccagcuucuaccugaucuccaucuuccugcaccucgugaagaucccgacccaccgccacaucacgggcaagcccugccccaagccccaccggcugaaccacauggggaucugcagcugcggccuguacaagcacccggggguccccgugaaguggaagcgcugaggacuagucccuguucccagagcccacuuuuuuuucuuuuuuugaaauaaaauagccugucuuucagaucuaaaaaaaaaaaaaaaaaaaaaaaaaaaaaaaaaaaaaaaaaaaaaaaaaaaaaaaaaaaaaaaaaaaaaaaaaaaaaaaaaaaaaaaaaaaaaaaaaaaa

SEQ ID NO: 38672 - RNA, 1721 nt, Artificial Sequence
  mRNA product Design a-1 (A100) comprising derived and/or modified sequence from LASV(Lassa virus/H.sapiens-wt/NGA/2016/ISTH_0009;Clade II)__AVO03571__GPCmut11 (opt1)
aggagagucccgcagucggcguccagcggcucugcuuguucgugugugugucguugcaggccuuauucaagcuuaccaugggccagaucaucaccuucuuccaggaggugccccacgucaucgaggaggugaugaacaucgugcugaucgcccucagccugcuggccauccucaaggggaucuacaacgucgcgaccugcggccugcuggggcucguguccuuccugcugcucugcggccgcagcugcuccacgaccuacaaggggguguacgagcugcagacccuggagcucgacauggccagccugaacaugaccaugccgcuguccugcacgaagaacaacagccaccacuacaucauggucggcaacgagaccggccucgagcugacccugaccaacacguccaucaucaaccacaaguucugcaaccucagcgacgcccacaagaagaaccuguacgaccacgcccugauguccaucaucagcaccuuccaccucuccauccccaacuucaaccaguacgaggccaugagcugcgacuucaacgggggccggaucuccgugcaguacaaccugagccacuccuacgcgguggacgccgccaaccacugcgggaccaucgccaacggcguccugcagaccuucaugcgcauggcguggggcgggagcuacaucgcccucgacuccggcaaggggagcugggacugcaucaugacguccuaccaguaccugaucauccagaacaccaccugggaggaccacugccaguucagccggcccagccccaucggcuaccuggggcuccugucccagcgcacccgggacaucuacaucagccgccggcugcucggcacguucaccuggacccuguccgacagcgagggcaacgagacccccgggggcuacugccugacgcgcuggaugcucaucgaggccgagcugaagugcuucgggaacaccgccguggccaagugcaacgagaagcacgacgaggaguucugcgacaugcugcggcuguucgacuucaacaagcaggcgauccgccggcugaagaccgaggcccagauguccauccagcugaucaacaaggccgugaacgcccucaucaacgaccagcugaucaugaagaaccaccuccgcgacaucaugggcaucccguacugcaacuacagcaaguacugcuaccucaaccacaccgucacggggaagaccucccugccccggugcugccuggugagcaacggcuccuaccucaacgagacccacuucagcgacgacaucgagcagcaggccgacaacaugaucaccgagcugcugcagaaggaguacaucgaccgccagggcaagacgccccuggggcucguggaccuguucgucuucuccaccagcuucuaccugaucuccaucuuccuccaccuggugaagaucccgacccaccggcacaucaccggcaagcccugccccaagccccaccgccugaaccacauggggaucugcagcugcggccucuacaaccacccgggggugcccgucaaguggaagcggugaggacuagucccuguucccagagcccacuuuuuuuucuuuuuuugaaauaaaauagccugucuuucagaucuaaaaaaaaaaaaaaaaaaaaaaaaaaaaaaaaaaaaaaaaaaaaaaaaaaaaaaaaaaaaaaaaaaaaaaaaaaaaaaaaaaaaaaaaaaaaaaaaaaaa

SEQ ID NO: 38673 - RNA, 1721 nt, Artificial Sequence
  mRNA product Design a-1 (A100) comprising derived and/or modified sequence from LASV(Lassa virus/H.sapiens-wt/NGA/2016/ISTH_0017;Clade II)__AVO03567__GPCmut11 (opt1)
aggagagucccgcagucggcguccagcggcucugcuuguucgugugugugucguugcaggccuuauucaagcuuaccaugggccagaucaucaccuucuuccaggaggugccccacgucaucgaggaggugaugaacaucgugcugaucgcccucagccugcuggccauccucaaggggaucuacaacgucgcgaccugcggccuguucgggcugguguccuuccuccugcugugcggccgcagcugcuccacgaccuacaaggggguguacgagcuccagacccuggagcuggacauggccagccucaacaugaccaugccgcuguccugcacgaagaacaacagccaccacuacaucauggucggcaacgagaccggccuggagcucacccugaccaacacguccaucaucaaccacaaguucugcaaccugagcgacgcccacaagaagaaccucuacgaccacgcccugauguccaucaucagcaccuuccaccuguccauccccaacuucaaccaguacgaggccaugagcugcgacuucaacgggggcaagaucuccgugcaguacaaccucagccacaccuacgcgaucgacgccgccaaccacugcgggaccaucgccaacggcgugcugcagacguucaugcggauggcguggggcggguccuacaucgcccuggacagcggcaagggguccugggacugcaucaugaccagcuaccaguaccucaucauccagaacaccaccugggaggaccacugccaguucucccgccccagccccaucggcuaccuggggcugcucagccagcggacgcgcgacaucuacaucucccggcgccugcugggcaccuucaccuggacccucagcgacuccgagggcaacgagacgcccgggggcuacugccugacccgguggaugcugaucgaggccgagcucaagugcuucgggaacaccgccgucgccaagugcaacgagaagcacgacgaggaguucugcgacaugcugcgccuguucgacuucaacaagcaggcgauccggcgccucaagaccgaggcccagaugagcauccagcugaucaacaaggccgugaacgcccugaucaacgaccagcucaucaugaagaaccaccuccgggacaucaugggcauccccuacugcaacuacuccaaguacugcuaccugaaccacacggugaccgggaagaccagccugccccgcugcugccuggucuccaacggcagcuaccugaacgagacccacuucuccgacgacaucgagcagcaggccgacaacaugaucacggagcuccugcagaaggaguacauggaccggcagggcaagaccccgcuggggcugguggaccucuucguguucagcaccuccuucuaccugaucagcaucuuccugcaccucguccgcaucccgacccaccggcacgugaucggcaagcccugccccaagccccaccgccugaaccacauggggaucugcuccugcggccuguacaagcacccgggggugcccgucaaguggaagcggugaggacuagucccuguucccagagcccacuuuuuuuucuuuuuuugaaauaaaauagccugucuuucagaucuaaaaaaaaaaaaaaaaaaaaaaaaaaaaaaaaaaaaaaaaaaaaaaaaaaaaaaaaaaaaaaaaaaaaaaaaaaaaaaaaaaaaaaaaaaaaaaaaaaaa

SEQ ID NO: 38674 - RNA, 1721 nt, Artificial Sequence
  mRNA product Design a-1 (A100) comprising derived and/or modified sequence from LASV(Lassa virus/H.sapiens-wt/NGA/2018/ISTH_0959;Clade II)__AVV65099__GPCmut11 (opt1)
aggagagucccgcagucggcguccagcggcucugcuuguucgugugugugucguugcaggccuuauucaagcuuaccaugggccagaucaucaccuucuuccaggaggugccccacgucaucgaggaggugaugaacaucgugcugaucgcccucagccugcuggccauccucaaggggaucuacaacgucgugaccugcggccuguucgggcugguguccuuccuccugcugugcggccgcagcugcuccacgaccuacaagggggucuacgagcuccagacccuggagcuggacauggcgagccucaacaugaccaugccgcuguccugcacgaagaacaacagccaccacuacaucauggugggcaacgagaccggccuggagcucacccugaccaacacguccaucaucaaccacaaguucugcaaccugagcgacgcccacaagaagaaccucuacgaccacgcccugauguccaucaucagcaccuuccaccuguccauccccaacuucaaccaguacgaggccaugagcugcgacuucaacgggggcaagaucuccgugcaguacaaccucagccacgccuacgcgaucgacgccgccaaccacugcgggaccaucgccaacggcguccugcagaccuucaugcggauggcguggggcggguccuacaucgcccuggacagcggcaagggguccugggacugcaucaugacgagcuaccaguaccucaucauccagaacaccaccugggaggaccacugccaguucucccgccccagccccaucggcuaccuggggcugcucagccagcggacccgcgacaucuacaucucccggcgccugcugggcacguucaccuggacccucagcgacuccgagggcaacgagacccccgggggcuacugccugacgcgguggaugcugaucgaggccgagcucaagugcuucgggaacaccgccguggccaagugcaacgagaagcacgacgaggaguucugcgacaugcugcgccuguucgacuucaacaagcaggcgauccggcgccucaagaccgaggcccagaugagcauccagcugaucaacaaggccgugaacgcccugaucaacgaccagcucaucaugaagaaccaccuccgggacaucaugggcaucccguacugcaacuacuccaaguacugcuaccugaaccacaccgucacggggaagaccagccugccccgcugcugccugguguccaacggcagcuaccugaacgagacccacuucuccgacgacaucgagcagcaggccgacaacaugaucaccgagcuccugcagaaggaguacaucgaccggcagggcaagacgccccuggggcugguggaccucuucgucuucagcaccuccuucuaccugaucagcaucuuccugcaccucgugaagaucccgacccaccgccacgugaucggcaagcccugccccaagccccaccggcugaaccacauggggaucugcuccugcggccuguacaagcacccggggguccccgugaaguggaagcgcugaggacuagucccuguucccagagcccacuuuuuuuucuuuuuuugaaauaaaauagccugucuuucagaucuaaaaaaaaaaaaaaaaaaaaaaaaaaaaaaaaaaaaaaaaaaaaaaaaaaaaaaaaaaaaaaaaaaaaaaaaaaaaaaaaaaaaaaaaaaaaaaaaaaaa

SEQ ID NO: 38675 - RNA, 1721 nt, Artificial Sequence
  mRNA product Design a-1 (A100) comprising derived and/or modified sequence from LASV(LASV003-NIG-2008;Clade II)__AIT17580__GPCmut11 (opt1)
aggagagucccgcagucggcguccagcggcucugcuuguucgugugugugucguugcaggccuuauucaagcuuaccaugggccagaucaucaccuucuuccaggaggugccccacgucaucgaggaggugaugaacaucgugcugaucgcccucagccugcuggccauccucaaggggaucuacaacgucgcgaccugcggccuguucgggcugguguccuuccuccugcugugcggccgcagcugcuccacgaccuacaaggggguguacgagcuccagacccuggagcuggacauggccagccucaacaugaccaugccgcuguccugcacgaagaacaacagccaccacuacaucauggucggcaacgagaccggccuggagcucacccugaccaacacguccaucaucaaccacaaguucugcaaccugagcgacgcccacaagaagaaccucuacgaccacgcccugauguccaucaucagcaccuuccaccuguccauccccaacuucaaccaguacgaggccaugagcugcgacuucaacgggggcaagaucuccgugcaguacaaccucagccacaccuacgcgguggacgccgccaaccacugcgggaccaucgccaacggcguccugcagacguucaugcggauggcguggggcggguccuacaucgcccuggacagcggcaagggguccugggacugcaucaugaccagcuaccaguaccucaucauccagaacaccaccugggaggaccacugccaguucucccgccccagccccaucggcuaccuggggcugcucagccagcggacgcgcgacaucuacaucucccggcgccugcugggcaccuucaccuggacccucagcgacuccgagagcaacgagacgccgggcggguacugccugacccgguggaugcugaucgaggccgagcucaagugcuucggcaacaccgccguggccaagugcaacgagaagcacgacgaggaguucugcgacaugcugcgccuguucgacuucaacaagcaggcgauccggcgccucaaggccgaggcccagauguccauccagcugaucaacaaggccgugaacgcccugaucaacgaccagcucaucaugaagaaccaccuccgggacaucauggggauccccuacugcaacuacagcaaguacugcuaccugaaccacaccgucacgggccgcaccucccugccccggugcugccuggugagcaacggguccuaccugaacgagacccacuucagcgacgacaucgagcagcaggcggacaacaugaucaccgagcuccugcagaaggaguacauggaccgccagggcaagacgccccugggccugguggaccucuucgucuucuccaccagcuucuaccugaucuccaucuuccugcaccucgugaagaucccgacccaccggcacgugaucgggaagcccugccccaagccccaccgccugaaccacaugggcaucugcagcugcgggcuguacaagcacccgggcguccccgugaaguggaagcggugaggacuagucccuguucccagagcccacuuuuuuuucuuuuuuugaaauaaaauagccugucuuucagaucuaaaaaaaaaaaaaaaaaaaaaaaaaaaaaaaaaaaaaaaaaaaaaaaaaaaaaaaaaaaaaaaaaaaaaaaaaaaaaaaaaaaaaaaaaaaaaaaaaaaa

SEQ ID NO: 38676 - RNA, 1721 nt, Artificial Sequence
  mRNA product Design a-1 (A100) comprising derived and/or modified sequence from LASV(LASV035-NIG-2009;Clade II)__AIT17588__GPCmut11 (opt1)
aggagagucccgcagucggcguccagcggcucugcuuguucgugugugugucguugcaggccuuauucaagcuuaccaugggccagaucaucaccuucuuccaggaggugccccacgucaucgaggaggugaugaacaucgugcugaucgcccucagccugcuggccauccucaaggggaucuacaacgucgcgaccugcggccuguucgggcugguguccuuccuccugcugugcggccgcagcugcuccacgaccuacaaggggguguacgagcuccagacccuggagcuggacauggccagccucaacaugaccaugccgcuguccugcacgaagaacaacagccaccacuacaucauggucggcaacgagaccggccuggagcucacccugaccaacacguccaucaucaaccacaaguucugcaaccugagcgacgcccacaagaagaaccucuacgaccacgcccugauguccaucaucagcaccuuccaccuguccauccccaacuucaaccaguacgaggccaugagcugcgacuucaacgggggcaagaucuccgugcaguacaaccucagccacgcguacgccguggacgccgccaaccacugcgggaccaucgcgaacggcguccugcagaccuucaugcggauggccuggggcggguccuacaucgcccuggacagcggcaagggguccugggacugcaucaugacgagcuaccaguaccucaucauccagaacaccaccugggaggaccacugccaguucucccgccccagccccaucggcuaccuggggcugcucagccagcggacccgcgacaucuacaucucccggcgccugcugggcacguucaccuggacccucagcgacuccgagggcaacgagacccccgggggcuacugccugacgcgguggaugcugaucgaggccgagcucaagugcuucgggaacaccgccguggcgaagugcaacgagaagcacgacgaggaguucugcgacaugcugcgccuguucgacuucaacaagcaggccauccggcgccucaaggccgaggcccagaugagcauccagcugaucaacaaggccgugaacgcgcugaucaacgaccagcucaucaugaagaaccaccuccgggacaucaugggcauccccuacugcaacuacuccaaguacugcuaccugaaccacaccgucaccgggaagacgagccugccccgcugcugccugguguccaacggcagcuaccugaacgagacccacuucuccgacgacaucgagcagcaggccgacaacaugaucaccgagcuccugcagaaggaguacaucgaccggcagggcaagaccccgcuggggcugguggaccucuucgucuucagcacguccuucuaccugaucagcaucuuccugcaccucgugaagaucccgacccaccgccacgugaucggcaagcccugccccaagccccaccggcugaaccacauggggaucugcuccugcggccuguacaagcacccggggguccccgugaaguggaagcgcugaggacuagucccuguucccagagcccacuuuuuuuucuuuuuuugaaauaaaauagccugucuuucagaucuaaaaaaaaaaaaaaaaaaaaaaaaaaaaaaaaaaaaaaaaaaaaaaaaaaaaaaaaaaaaaaaaaaaaaaaaaaaaaaaaaaaaaaaaaaaaaaaaaaaa

SEQ ID NO: 38677 - RNA, 1721 nt, Artificial Sequence
  mRNA product Design a-1 (A100) comprising derived and/or modified sequence from LASV(LASV1000-NIG-2009;Clade II)__AIT17782__GPCmut11 (opt1)
aggagagucccgcagucggcguccagcggcucugcuuguucgugugugugucguugcaggccuuauucaagcuuaccaugggccagaucaucaccuucuuccaggaggugccccacgucaucgaggaggugaugaacaucgugcugaucgcccucagccugcuggccauccucaaggggaucuacaacgucgcgaccugcggccuguucgggcugguguccuuccuccugcugugcggccgcagcugcuccacgaccuacaaggggguguacgagcuccagacccuggagcuggacauggccagccucaacaugaccaugccgcuguccugcacgaagaacaacagccaccacuacaucauggucggcaacgagaccggccuggagcucacccugaccaacacguccaucaucaaccacaaguucugcaaccugagcgacgcccacaagaagaaccucuacgaccacgcccugauguccaucaucagcaccuuccaccuguccauccccaacuucaaccaguacgaggccaugagcugcgacuucaacgggggcaagaucuccgugcaguacaaccucagccacaccuacgcgguggacgccgccaaccacugcgggaccaucgccaacggcguccugcagacguucaugcggauggcguggggcggguccuacaucgcccuggacagcggcaagggguccugggacugcaucaugaccagcuaccaguaccucaucauccagaacaccaccugggaggaccacugccaguucucccgccccagccccaucggcuaccuggggcugcucagccagcggacgcgcgacaucuacaucucccggcgccugcugggcaccuucaccuggacccucagcgacuccgagggcaacgagacgcccgggggcuacugccugacccgguggaugcugaucgaggccgagcucaagugcuucgggaacaccgccguggccaagugcaacgagaagcacgacgaggaguucugcgacaugcugcgccuguucgacuucaacaagcaggcgaucaagcggcucaagaccgaggcccagaugagcauccagcugaucaacaaggccgugaacgcccugaucaacgaccagcucaucaugaagaaccaccuccgcgacaucaugggcauccccuacugcaacuacuccaaguacugcuaccugaaccacacggucaccgggaagaccagccugccccggugcugccugguguccaacggcagcuaccugaacgagacccacuucuccgacgacaucgagcagcaggccgacaacaugaucacggagcuccugcagaaggaguacaucgaccgccagggcaagaccccgcuggggcugguggaccucuucgucuucagcaccuccuucuaccugaucagcaucuuccugcaccucgugaagaucccgacccaccggcacguggucggcaagcccugccccaagccccaccgccugaaccacauggggaucugcuccugcggccuguacaagcacccgggggugcccgugaaguggaagcggugaggacuagucccuguucccagagcccacuuuuuuuucuuuuuuugaaauaaaauagccugucuuucagaucuaaaaaaaaaaaaaaaaaaaaaaaaaaaaaaaaaaaaaaaaaaaaaaaaaaaaaaaaaaaaaaaaaaaaaaaaaaaaaaaaaaaaaaaaaaaaaaaaaaaa

SEQ ID NO: 38678 - RNA, 1721 nt, Artificial Sequence
  mRNA product Design a-1 (A100) comprising derived and/or modified sequence from LASV(LASV221-NIG-2010;Clade II)__AIT17624__GPCmut11 (opt1)
aggagagucccgcagucggcguccagcggcucugcuuguucgugugugugucguugcaggccuuauucaagcuuaccaugggccagaucaucaccuucuuccaggaggugccccacgucaucgaggaggugaugaacaucgugcugaucgcccucagccugcuggccauccucaaggggaucuacaacgucgcgaccugcggccuguucgggcugguguccuuccuccugcugugcggccgcagcugcuccacgaccuacaaggggguguacgagcuccagacccuggagcuggacauggccagccucaacaugaccaugccgcuguccugcacgaagaacaacagccaccacuacaucauggucggcaacgagaccggccuggagcucacccugaccaacacguccaucaucaaccacaaguucugcaaccugagcgacgcccacaagaagaaccucuacgaccacgcccugauguccaucaucagcaccuuccaccuguccauccccaacuucaaccaguacgaggccaugagcugcgacuucaacgggggcaagaucuccgugcaguacaaccucagccacaccuacgcgaucgacgccgccaaccacugcgggaccaucgccaacggcgugcugcagacguucaugcggauggcguggggcggguccuacaucgcccuggacagcggcaagggguccugggacugcaucaugaccagcuaccaguaccucaucauccagaacaccaccugggaggaccacugccaguucucccgccccagccccaucggcuaccuggggcugcucagccagcggacgcgcgacaucuacaucucccggcgccugcugggcaccuucaccuggacccucagcgacuccgagggcaacgagacgcccgggggcuacugccugacccgguggaugcugaucgaggccgagcucaagugcuucgggaacaccgccgucgccaagugcaacgagaagcacgacgaggaguucugcgacaugcugcgccuguucgacuucaacaagcaggcgauccggcgccucaagaccgaggcccagaugagcauccagcugaucaacaaggccgugaacgcccugaucaacgaccagcucaucaugaagaaccaccuccgggacaucaugggcauccccuacugcaacuacuccaaguacugcuaccugaaccacacggugaccgggaagaccagccugccccgcugcugccuggucuccaacggcagcuaccugaacgagacccacuucuccgacgacaucgagcagcaggccgacaacaugaucacggagaugcuccagaaggaguacauggaccggcagggcaagaccccgcuggggcugguggaccuguucguguucagcaccuccuucuaccucaucagcaucuuccugcaccuggucaagaucccgacccaccgccacgugaucggcaagcccugccccaagccccaccggcucaaccacauggggaucugcuccugcggccuguacaagcacccgggggugcccgucaaguggaagcgcugaggacuagucccuguucccagagcccacuuuuuuuucuuuuuuugaaauaaaauagccugucuuucagaucuaaaaaaaaaaaaaaaaaaaaaaaaaaaaaaaaaaaaaaaaaaaaaaaaaaaaaaaaaaaaaaaaaaaaaaaaaaaaaaaaaaaaaaaaaaaaaaaaaaaa

SEQ ID NO: 38679 - RNA, 1721 nt, Artificial Sequence
  mRNA product Design a-1 (A100) comprising derived and/or modified sequence from LASV(LASV237-NIG-2010;Clade II)__AIT17638__GPCmut11 (opt1)
aggagagucccgcagucggcguccagcggcucugcuuguucgugugugugucguugcaggccuuauucaagcuuaccaugggccagaucaucaccuucuuccaggaggugccccacgucaucgaggaggugaugaacaucgugcugaucgcccucagccugcuggccauccucaaggggaucuacaacgucgcgaccugcggccuguucgggcugguguccuuccuccugcugugcggccgcagcugcuccacgaccuacaaggggguguacgagcuccagacccuggagcuggacauggccagccucaacaugaccaugccgcuguccugcacgaagaacaacagccaccacuacaucauggucggcaacgagaccggccuggagcucacccugaccaacacguccaucaucaaccacaaguucugcaaccugagcgacgcccacaagaaggaccucuacgaccacgcccugauguccaucaucagcaccuuccaccuguccauccccaacuucaaccaguacgaggccaugagcugcgacuucaacgggggcaagaucuccgugcaguacaaccucagccacaccuacgcgguggacgccgccaaccacugcgggaccaucgccaacggcguccugcagacguucaugcggauggcguggggcggguccuacaucgcccuggacagcggcaagggguccugggacugcaucaugaccagcuaccaguaccucaucauccagaacaccaccugggaggaccacugccaguucucccgccccagccccaucggcuaccuggggcugcucagccagcggacgcgcgacaucuacaucucccggcgccugcugggcaccuucaccuggacccucagcgacuccgagggcaacgagacgcccgggggcuacugccugacccgguggaugcugaucgaggccgagcucaagugcuucgggaacaccgccguggccaagugcaacgagaagcacgacgaggaguucugcgacaugcugcgccuguucgacuucaacaagcaggcgauccggcgccucaagaccgaggcccagaugagcauccagcugaucaacaaggccgugaacgcccugaucaacgaccagcucaucaugaagaaccaccuccgggacaucaugggcauccccuacugcaacuacuccaaguacugcuaccugaaccacacggucaccgggaagaccagccugccccgcugcugccugguguccaacggcagcuaccugaacgagacccacuucuccgacgacaucgagcagcaggccgacaacaugaucacggagcuccugcagaaggaguacauggaccggcagggcaagaccccgcuggggcugguggaccucuucgucuucagcaccuccuucuaccugaucagcaucuuccugcaccucaucaagaucccgacccaccgccacaucacgggcaagcccugccccaagccccaccggcugaaccacauggggaucugcuccugcggccuguacaagcacccgggggugcccgugaaguggaagcgcugaggacuagucccuguucccagagcccacuuuuuuuucuuuuuuugaaauaaaauagccugucuuucagaucuaaaaaaaaaaaaaaaaaaaaaaaaaaaaaaaaaaaaaaaaaaaaaaaaaaaaaaaaaaaaaaaaaaaaaaaaaaaaaaaaaaaaaaaaaaaaaaaaaaaa

SEQ ID NO: 38680 - RNA, 1721 nt, Artificial Sequence
  mRNA product Design a-1 (A100) comprising derived and/or modified sequence from LASV(LASV253-NIG-2011;Clade II)__AIT17670__GPCmut11 (opt1)
aggagagucccgcagucggcguccagcggcucugcuuguucgugugugugucguugcaggccuuauucaagcuuaccaugggccagaucaucaccuucuuccaggaggugccccacgucaucgaggaggugaugaacaucgugcugaucgcccucagccugcuggccauccucaaggggaucuacaacgucgcgaccugcggccuguucgggcugguguccuuccuccugcugugcggccgcagcugcuccacgaccuacaaggggguguacgagcuccagacccuggagcuggacauggccagccucaacaugaccaugccgcuguccugcacgaagaacaacagccaccacuacaucauggucggcaacgagaccggccuggagcucacccugaccaacacguccaucaucaaccacaaguucugcaaccugagcgacgcccacaagaagaaccucuacgaccacgcccugauguccaucaucagcaccuuccaccuguccauccccaacuucaaccaguacgaggccaugagcugcgacuucaacgggggcaagaucuccgugcaguacaaccucagccacaccuacgcgguggacgccgccaaccacugcgggaccaucgccaacggcguccugcagacguucaugcggauggcguggggcggguccuacaucgcccuggacagcggcaagggguccugggacugcaucaugaccagcuaccaguaccucaucauccagaacaccaccugggaggaccacugccaguucucccgccccagccccaucggcuaccuggggcugcucagccagcggacgcgcgacaucuacaucucccggcgccugcugggcaccuucaccuggacccucagcgacuccgagggcaacgagacgcccgggggcuacugccugacccgguggaugcugaucgaggccgagcucaagugcuucgggaacaccgccguggccaagugcaacgagaagcacgacgaggaguucugcgacaugcugcgccuguucgacuucaacaagcaggcgauccggcgccucaaggccgaggcccagaugagcauccagcugaucaacaaggccgugaacgcccugaucaacgaccagcucaucaugaagaaccaccuccgggacaucaugggcaucccguacugcaacuacuccaaguacugcuaccugaaccacaccgucacggggcgcaccagccugccccggugcugccugguguccaacggcagcuaccugaacgagacccacuucuccgacgacaucgagcagcaggcggacaacaugaucaccgagcuccugcagaaggaguacaucgaccgccagggcaagacgccccuggggcugguggaccucuucgucuucagcaccuccuucuaccugaucagcaucuuccugcaccucgugaagaucccgacccaccggcacaucaucggcaagcccugccccaagccccaccgccugaaccacauggggaucugcuccugcggccuguacaagcacccgggggugcccgucaaguggaagcggugaggacuagucccuguucccagagcccacuuuuuuuucuuuuuuugaaauaaaauagccugucuuucagaucuaaaaaaaaaaaaaaaaaaaaaaaaaaaaaaaaaaaaaaaaaaaaaaaaaaaaaaaaaaaaaaaaaaaaaaaaaaaaaaaaaaaaaaaaaaaaaaaaaaaa

SEQ ID NO: 38681 - RNA, 1721 nt, Artificial Sequence
  mRNA product Design a-1 (A100) comprising derived and/or modified sequence from LASV(LASV254-NIG-2011;Clade II)__AIT17674__GPCmut11 (opt1)
aggagagucccgcagucggcguccagcggcucugcuuguucgugugugugucguugcaggccuuauucaagcuuaccaugggccagaucaucaccuucuuccaggaggugccccacgucaucgaggaggugaugaacaucgugcugaucgcccucagccugcuggccauccucaaggggaucuacaacgucgcgaccugcggccuguucgggcugguguccuuccuccugcugugcggccgcagcugcuccacgaccuacaaggggguguacgagcuccagacccuggagcuggacaugaccaaccucaacaugacgaugccgcugagcugcaccaagaacaacucccaccacuacaucauggucggcaacgagaccggccuggagcucacccugacgaacaccagcaucaucaaccacaaguucugcaaccuguccgacgcccacaagaagaaccucuacaaccacgcccugaugagcaucaucuccaccuuccaccugagcauccccaacuucaaccaguacgaggccauguccugcgacuucaacgggggcaagaucagcgugcaguacaaccucucccacagcuacgccguggacgcggccaaccacugcgggaccaucgccaacggcguccugcagacguucaugcggauggccuggggcggguccuacaucgcgcuggacagcggcaaggggaacugggacugcaucaugaccuccuaccaguaccucaucauccagaacaccaccugggaggaccacugccaguucagccgccccucccccaucggcuaccuggggcugcucagccagcggacgcgcgacaucuacaucagccggcgccugcugggcaccuucaccuggacccucuccgacagcgagggcaacgagacgcccgggggcuacugccugacccgguggaugcugaucgaggccgagcucaagugcuucgggaacaccgccguggccaagugcaacgagaagcacgacgaggaguucugcgacaugcugcgccuguucgacuucaacaagcaggccauccggcgccucaagaccgaggcgcaggccaacauccagcugaucaacaaggccgugaacgcccugaucaacgaccagcucaucaugaagaaccaccuccgggacaucaugggcauccccuacugcaacuacuccaaguacugcuaccugaaccacacggucaccgggaagaccagccugccccgcugcugccugguguccaacggcagcuaccugaacgagacccacuucuccgacgacaucgagcagcaggccgacaacaugaucacggagcuccugcagaaggaguacauggaccggcagggcaagaccccgcuggggcugguggaccucuucgucuucagcaccuccuucuaccugaucagcaucuuccugcaccucgugaagaucccgacccaccgccacgugaucggcaagcccugccccaagccccaccggcugaaccacauggggaucugcuccugcggccuguacaagcacccggggguccccgugaaguggaagcgcugaggacuagucccuguucccagagcccacuuuuuuuucuuuuuuugaaauaaaauagccugucuuucagaucuaaaaaaaaaaaaaaaaaaaaaaaaaaaaaaaaaaaaaaaaaaaaaaaaaaaaaaaaaaaaaaaaaaaaaaaaaaaaaaaaaaaaaaaaaaaaaaaaaaaa

SEQ ID NO: 38682 - RNA, 1721 nt, Artificial Sequence
  mRNA product Design a-1 (A100) comprising derived and/or modified sequence from LASV(Nig08-A19;Clade III)__ADU56618__GPCmut11 (opt1)
aggagagucccgcagucggcguccagcggcucugcuuguucgugugugugucguugcaggccuuauucaagcuuaccaugggccagaucgugaccuucuuccaggaggucccccacgugaucgaggaggugaugaacaucguccugaucgcccucagcauccuggccauccugaaggggcucuacaacaucgcgaccugcggccugaucgggcuggugacguuccuccugcuguccggccgcagcugcuccaugaccuacaaggggguguacgagcuccagacccuggagcugaacaugaacacccucaacaugacgaugccgcugagcugcaccaagaacaacucccaccacuacaucauggucggcaacgagaccggccuggagcucacccugacgaacaccagccugcuccaccacaaguucugcaaccuguccgacgcccacaagaagaaccuguacgaccacacccucaugagcaucaucuccaccuuccaccugagcauccccaacuucaaccaguacgaggccauguccugcgacuucaacgggggcaagaucacggugcaguacaaccugagccacuccuacgccaucgacgccgcgaaccacugcgggaccguggccaacggcguccuccagaccuucaugcggauggccuggggcgggagcuacaucgcccuggacuccggccgcgggaagugggacugcaucaugaccagcuaccaguaccugaucauccagaacacgaccugggaggaccacugccaguucucccggcccagccccaucggcuaccucgggcugcugucccagcgcacccgggacaucuacaucagccgccggcuccugggcaccuucacguggacccugagcgacuccgagggcaacgagacccccgggggcuacugccucacccgcuggaugcugaucgaggcggagcugaagugcuucgggaacacggccguggccaagugcaacgagaagcacgacgaggaguucugcgacaugcuccggcuguucgacuucaacaagcaggccauccgccggcugaaggccgaggcgcagaugagcauccagcucaucaacaaggccgugaacgcccugaucaacgaccagcugaucaugaagaaccaccuccgcgacaucaugggcauccccuacugcaacuacuccaaguacugcuaccugaaccacaccagcaccgggcggaccucccugccccgcugcugccucgucagcaacggcuccuaccugaacgagacgcacuucagcgacgacaucgagcagcaggccgacaacaugaucaccgagaugcugcagaaggaguaccuggaccggcagggcaagaccccgcucgggcugguggaccuguucguguucuccaccagcuucuaccucaucuccaucuuccugcaccuggucaagaucccgacgcaccgccacaucgugggcaagcccugccccaagccccaccggcucaaccacauggggaucugcagcugcggccuguacaagcagccgggggugcccguccgcuggaagcggugaggacuagucccuguucccagagcccacuuuuuuuucuuuuuuugaaauaaaauagccugucuuucagaucuaaaaaaaaaaaaaaaaaaaaaaaaaaaaaaaaaaaaaaaaaaaaaaaaaaaaaaaaaaaaaaaaaaaaaaaaaaaaaaaaaaaaaaaaaaaaaaaaaaaa

SEQ ID NO: 38683 - RNA, 1724 nt, Artificial Sequence
  mRNA product Design a-1 (A100) comprising derived and/or modified sequence from LASV(G1180-SLE-2010;Clade IV)__AIT17168__GPCmut11 (opt1)
aggagagucccgcagucggcguccagcggcucugcuuguucgugugugugucguugcaggccuuauucaagcuuaccaugggccagaucgugaccuucuuccaggaggucccccacgugaucgaggaggugaugaacaucguccugaucgcccucagcauccuggccgugcugaaggggcucuacaacuucgcgaccugcggccugguggggcugcucaccuuccugcugcucugcggccgcuccugcaccgccagccgguacaagggggucuacgagcugcagacccuggagcucaacauggagacccugaacaugacgaugccgcuguccugcaccaagaacaacagccaccacuacaucauggugggcaacgagaccggccucgagcugacccugacgaacaccuccaucaucaaccacaaguucugcaaccucagcgacgcccacaagaagaaccuguacgaccacgcccugauguccaucaucagcaccuuccaccucuccauccccaacuucaaccaguacgaggccaugagcugcgacuucaacgggggcaagaucuccgugcaguacaaccugagccacuccuacgcgggggacgccgccaaccacugcggcaccgucgccaacggggugcugcagacguucaugcgcauggcguggggcggcagcuacaucgcccucgacuccgggcacggcagcugggacugcaucaugaccuccuaccaguaccugaucauccagaacaccaccugggaggaccacugccaguucagccggcccucccccaucggguaccugggccuccugagccagcgcacgcgggacaucuacaucagccgccggcugcucggcaccuucaccuggacccuguccgacagcgaggggaaggacacgccgggcggguacugccugacccgcuggaugcucaucgaggccgagcugaagugcuucggcaacaccgccguggccaagugcaacgagaagcacgacgaggaguucugcgacaugcugcggcuguucgacuucaacaagcaggcgauccagcgccugaaggccgaggcccagauguccauccagcugaucaacaaggccgucaacgcccucaucaacgaccagcugaucaugaagaaccaccuccgggacaucauggggauccccuacugcaacuacagcaaguacugcuaccucaaccacaccacgaccggcaagaccucccugcccaagugcugccuggugagcaacggcuccuaccucaacgagacccacuucagcgacgacaucgagcagcaggcggacaacaugaucacggagaugcugcagaaggaguacauggagcgccaggggaagacgccccugggccugguggaccucuucgucuucuccaccagcuucuaccugaucuccaucuuccugcaccucgugaagaucccgacccaccggcacaucgugggcaagagcugccccaagccccaccgccugaaccacauggggaucugcuccugcgggcuguacaagcagcccggcgucccggugaaguggaagcggugaggacuagucccuguucccagagcccacuuuuuuuucuuuuuuugaaauaaaauagccugucuuucagaucuaaaaaaaaaaaaaaaaaaaaaaaaaaaaaaaaaaaaaaaaaaaaaaaaaaaaaaaaaaaaaaaaaaaaaaaaaaaaaaaaaaaaaaaaaaaaaaaaaaaa

SEQ ID NO: 38684 - RNA, 1724 nt, Artificial Sequence
  mRNA product Design a-1 (A100) comprising derived and/or modified sequence from LASV(G1442-SLE-2011;Clade IV)__AIT17180__GPCmut11 (opt1)
aggagagucccgcagucggcguccagcggcucugcuuguucgugugugugucguugcaggccuuauucaagcuuaccaugggccagaucgugaccuucuuccaggaggucccccacgugaucgaggaggugaugaacaucguccugaucgcccucagcauccuggccgugcugaaggggcucuacaacguggcgaccugcggccugaucgggcuggucacguuccuccugcugugcggccgcuccugcaccaccacccucuacaaggggguguacgagcugcagacgcuggagcucaacauggagacccugaacaugaccaugccgcugagcugcaccaagaacaacucccaccacuacauccgggugggcaacgagacgggccucgagcugacccugaccaacaccagcaucaucaaccacaaguucugcaaccucuccgacgcccacaagaagaaccuguacgaccacgcccugaugagcaucaucuccacguuccaccucagcauccccaacuucaaccaguacgaggccauguccugcgacuucaacgggggcaagaucagcguccaguacaaccugucccacagcuacgccggggacgcggccaaccacugcggcaccguggccaacggggugcugcagaccuucaugcgcauggccuggggcggcuccuacaucgcgcucgacagcgggcggggcaacugggacugcaucaugaccuccuaccaguaccugaucauccagaacacgaccugggacgaccacugccaguucagccgccccucccccaucggguaccugggccuccugagccagcggacccgcgacgucuacaucucccggcgccugcucggcaccuucacguggacccugagcgacagcgaggggaaggacaccccgggcggguacugccugacccgguggaugcucaucgaggccgagcugaagugcuucggcaacacggccguggccaagugcaacgagaagcacgacgaggaguucugcgacaugcugcgccucuucgacuucaacaagcaggccauccagcggcugaaggcggaggcccagauguccauccagcugaucaacaaggccgugaacgcccucaucaacgaccagcugaucaugaagaaccaccuccgcgacaucauggggauccccuacugcaacuacagcaaguacugcuaccugaacaacaccgccaccggcaagaccucccugcccaagugcugccugaucagcaacggcuccuaccucaacgagacgcacuucagcgacgacaucgagcaggaggcggacaacaugaucaccgagaugcugcagaaggaguacauggagcggcaggggaagacgccccugggccuggucgaccucuucguguucuccaccagcuucuaccugaucuccaucuuccugcaccucgugaagaucccgacccaccgccacaucgucggcaagagcugccccaagccccaccggcugaaccacauggggaucugcuccugcgggcuguacaagcagcccggcgugccggugcgcuggaagcggugaggacuagucccuguucccagagcccacuuuuuuuucuuuuuuugaaauaaaauagccugucuuucagaucuaaaaaaaaaaaaaaaaaaaaaaaaaaaaaaaaaaaaaaaaaaaaaaaaaaaaaaaaaaaaaaaaaaaaaaaaaaaaaaaaaaaaaaaaaaaaaaaaaaaa

SEQ ID NO: 38685 - RNA, 1724 nt, Artificial Sequence
  mRNA product Design a-1 (A100) comprising derived and/or modified sequence from LASV(G3010-SLE-2013;Clade IV)__AIT17344__GPCmut11 (opt1)
aggagagucccgcagucggcguccagcggcucugcuuguucgugugugugucguugcaggccuuauucaagcuuaccaugggccagaucgugaccuucuuccaggaggucccccacgugaucgaggaggugaugaacaucguccugaucgcccucagcauccuggccgugcugaaggggcucuacaacuucgcgaccugcggccugguggggcuggucacguuccuccugcugugcggccgcuccugcaccaccagccucuacaaggggguguacgagcugcagacccuggagcucaacauggagacgcugaacaugaccaugccgcuguccugcaccaagaacaacagccaccacuacaucauggugggcaacgagaccggccucgagcugacgcugaccaacaccuccaucaucaaccacaaguucugcaaccucagcgacgcccacaagaagaaccuguacaaccacgcccugauguccaucaucagcaccuuccaccucuccauccccaacuucaaccaguacgaggccaugagcugcgacuucaacgggggcaagaucuccguccaguacaaccugagccacuccuacgccggggacgcggccagccacugcggcacgguggccaacggggugcugcagaccuucaugcggauggccuggggcggcuccuacaucgcgcucgacagcggguacggcaagugggacugcaucaugaccuccuaccaguaccugaucauccagaacaccacgugggaggaccacugccaguucagccgccccucccccaucggguaccugggccuccugagccagcggacccgcgacaucuacaucagccggcgccugcucggcaccuucaccuggacgcuguccgacagcgaggggaaggacaccccgggcggguacugccugacccgguggaugcucaucgaggccgagcugaagugcuucggcaacaccgccgucgccaagugcaacgagaagcacgacgaggaguucugcgacaugcugcgccucuucgacuucaacaagcaggccauccagcggcugaagacggaggcgcagauguccauccagcugaucaacaaggccgugaacgcccucaucaacgaccagcugaucaugaagaaccaccuccgcgacaucauggggauccccuacugcaacuacagcaaguacugcuaccugaaccacaccaccaccggcaagacgucccugcccaagugcugccuggugagcaacggcuccuaccucaacgagacccacuucagcgacgacaucgagcagcaggccgacaacaugaucaccgagaugcugcagaaggaguacauggagcggcaggggaagacgccccugggccuggucgaccucuucguguucuccaccagcuucuaccugaucuccaucuuccugcaccucgugaagaucccgacccaccgccacaucgucggcaagagcugccccaagccccaccggcugaaccacauggggaucugcuccugcgggcuguacaagcagcccggcgugccggugcgcuggaagcggugaggacuagucccuguucccagagcccacuuuuuuuucuuuuuuugaaauaaaauagccugucuuucagaucuaaaaaaaaaaaaaaaaaaaaaaaaaaaaaaaaaaaaaaaaaaaaaaaaaaaaaaaaaaaaaaaaaaaaaaaaaaaaaaaaaaaaaaaaaaaaaaaaaaaa

SEQ ID NO: 38686 - RNA, 1724 nt, Artificial Sequence
  mRNA product Design a-1 (A100) comprising derived and/or modified sequence from LASV(G502-SLE-2009;Clade IV)__AIT17126__GPCmut11 (opt1)
aggagagucccgcagucggcguccagcggcucugcuuguucgugugugugucguugcaggccuuauucaagcuuaccaugggccagaucgugaccuucuuccaggaggucccccacgugaucgaggaggugaugaacaucguccugaucgcccucagcauccuggccgugcugaaggggcucuacaacuucgcgaccugcggccugguggggcugcucacguuccugcugcucugcggccgcuccugcaccaccgggcuguacaagggcgucuacgagcugcagacccucgagcugaacauggagacgcugaacaugaccaugccgcucagcugcaccaagaacaacucccaccacuacaucauggugggcaacgagaccgggcuggagcugacgcucaccaacaccagcaucaucaaccacaaguucugcaaccuguccgacgcccacaagaagaaccuguacgaccacgcccucaugagcaucaucuccaccuuccaccugagcauccccaacuucaaccaguacgaggccauguccugcgacuucaacggcgggaagaucagcgugcaguacaaccugucccacagcuacgccggcgacgcggccgaccacugcgggacggucgccaacggcgugcuccagaccuucaugcggauggccuggggcggguccuacaucgcgcuggacagcggccgcgggcggugggacugcaucaugaccuccuaccaguaccugaucauccagaacaccacgugggaggaccacugccaguucagccgccccucccccaucggcuaccucggccugcugagccagcggacccgcgacaucuacaucucccggcgccuccuggggaccuucaccuggacgcugagcgacagcgagggcaaggacacccccgggggcuacugccucacccgguggaugcugaucgaggccgagcugaagugcuucgggaacaccgccguggccaagugcaacgagaagcacgacgaggaguucugcgacaugcuccgccuguucgacuucaacaagcaggccauccagcggcugaaggcggaggcccagauguccauccagcucaucaacaaggccgucaacgcccugaucaacgaccagcuggugaugaagaaccaccuccgcgacaucaugggcauccccuacugcaacuacagccgguacugcuaccugaaccacacgaccaccggccgcaccucccugcccaagugcugccucgugagcaacggguccuaccugaacgagacgcacuucagcgacgacaucgagcagcaggccgacaacaugaucaccgagaugcugcagaaggaguacauggagcggcagggcaagaccccgcuggggcucgucgaccuguucguguucuccaccagcuucuaccugaucuccaucuuccuccaccuggugaagaucccgacgcaccgccacaucgucggcaagagcugccccaagccccaccggcugaaccacauggggaucugcuccugcggccucuacaagcagcccggcgugccggugaaguggaagcgcugaggacuagucccuguucccagagcccacuuuuuuuucuuuuuuugaaauaaaauagccugucuuucagaucuaaaaaaaaaaaaaaaaaaaaaaaaaaaaaaaaaaaaaaaaaaaaaaaaaaaaaaaaaaaaaaaaaaaaaaaaaaaaaaaaaaaaaaaaaaaaaaaaaaaa

SEQ ID NO: 38687 - RNA, 1724 nt, Artificial Sequence
  mRNA product Design a-1 (A100) comprising derived and/or modified sequence from LASV(G733-SLE-2010;Clade IV)__AIT17154__GPCmut11 (opt1)
aggagagucccgcagucggcguccagcggcucugcuuguucgugugugugucguugcaggccuuauucaagcuuaccaugggccagaucgugaccuucuuccaggaggucccccacgugaucgaggaggugaugaacaucguccugaucgcccucagcauccuggccgugcugaaggggcucuacaacuucgcgaccugcggcaucguggggcuggucuccuuccugcuccugugcggccgcagcugcacgaccucccuguacaaggggguguacgagcuccagacccuggagcugaacauggagacccucaacaugacgaugccgcugagcugcaccaagaacaacucccaccacuacaucauggugggcaacgagaccggccuggagcucacccugacgaacaccagcaucaucaaccacaaguucugcaaccuguccgacgcccacaagaagaaccucuacgaccacgcccugaugagcaucaucuccaccuuccaccugagcauccccaacuucaaccaguacgaggccauguccugcgacuucaacgggggcaagaucagcguccaguacaaccucucccacagcuacgccggggacgcggccaaccacugcggcaccaucgccaacggggugcugcagacguucaugcggauggccuggggcggcuccuacaucgcgcuggacagcgggcgcgaccggugggacugcaucaugaccuccuaccaguaccucaucauccagaacaccaccugggaggaccacugccaguucagccgccccucccccaucggcuaccuggggcugcucagccagcggacgcgcgacaucuacaucagccggcgccugcugggcaccuucaccuggacccucuccgacagcgagggcaaggacacgcccgggggcuacugccugacccgguggaugcugaucgaggccgagcucaagugcuucgggaacaccgccguggccaagugcaacgagaagcacgacgaggaguucugcgacaugcugcgccuguucgacuucaacaagcaggccauccagcggcucaaggcggaggcccagauguccauccagcugaucaacaaggccgucaacgcccugaucaacgaccagcucaucaugaagaaccaccuccgcgacaucaugggcauccccuacugcaacuacagcaaguacugcuaccugaaccacaccacgaccgggaagaccucccugcccaagugcugccuggugagcaacggcuccuaccugaacgagacccacuucagcgacgacaucgagcagcaggccgacaacaugaucacggagaugcuccagaaggaguacauggagcggcagggcaagaccccgcuggggcugguggaccuguucgucuucuccaccagcuucuaccucaucuccaucuuccugcaccuggugaagaucccgacccaccgccacguggucggcaagagcugccccaagccccaccggcucaaccacauggggaucugcuccugcggccuguacgggcagcccggcgugccggugaaguggaagcgcugaggacuagucccuguucccagagcccacuuuuuuuucuuuuuuugaaauaaaauagccugucuuucagaucuaaaaaaaaaaaaaaaaaaaaaaaaaaaaaaaaaaaaaaaaaaaaaaaaaaaaaaaaaaaaaaaaaaaaaaaaaaaaaaaaaaaaaaaaaaaaaaaaaaaa

SEQ ID NO: 38688 - RNA, 1724 nt, Artificial Sequence
  mRNA product Design a-1 (A100) comprising derived and/or modified sequence from MOPV/LASV reassortant(IGS-1;Clade IV)__AFY05576__GPCmut11 (opt1)
aggagagucccgcagucggcguccagcggcucugcuuguucgugugugugucguugcaggccuuauucaagcuuaccaugggccagaucgugaccuucuuccaggaggucccccacgugaucgaggaggugaugaacaucguccugaucgcccucagcgugcuggccgugcugaaggggcucuacaacuucgcgaccugcggccuggucgggcuggugacguuccuccugcugugcggccgcuccugcaccaccagccucuacaaggggguguacgagcugcagacccuggagcucaacauggagacgcugaacaugaccaugccgcuguccugcaccaagaacaacagccaccacuacaucauggucggcaacgagaccggccucgagcugacgcugaccaacaccuccaucaucaaccacaaguucugcaaccucagcgacgcccacaagaagaaccuguacgaccacgcccugauguccaucaucagcaccuuccaccucuccauccccaacuucaaccaguacgaggccaugagcugcgacuucaacgggggcaagaucuccgugcaguacaaccugagccacuccuacgccggggacgcggccaaccacugcggcacgguggccaacgggguccugcagaccuucaugcggauggccuggggcggcagcuacaucgcgcucgacuccgggcgcggcaacugggacugcaucaugaccagcuaccaguaccugaucauccagaacaccacgugggaggaccacugccaguucucccggcccagccccaucggguaccugggccuccugucccagcgcacccgggacaucuacaucagccgccggcugcucggcaccuucaccuggacgcugagcgacuccgagggggaggacaccccgggcggguacugccugacccgcuggaugcucaucgaggccgagcugaagugcuucggcaacaccgccguggccaagugcaacgagaagcacgacgaggaguucugcgacaugcugcggcuguucgacuucaacaagcaggccauccagcgccugaaggcggaggcccagaugagcauccagcugaucaacaaggccgugaacgcccucaucaacgaccagcugaucaugaagaaccaccuccgggacaucauggggauccccuacugcaacuacuccaaguacugcuaccucaaccacacgaccaccggccgcaccagccugcccaagugcugccuggucuccaacggcagcuaccucaacgagacgcacuucuccgacgacaucgagcagcaggccgacaacaugaucaccgagaugcugcagaaggaguacauggagcggcaggggaagacgccccugggccugguggaccucuucguguucagcaccuccuucuaccugaucagcaucuuccugcaccucgucaagaucccgacccaccgccacaucguggggaaguccugccccaagccccaccggcugaaccacaugggcaucugcagcugcgggcuguacaagcagcccggcgugccggucaaguggaagcgcugaggacuagucccuguucccagagcccacuuuuuuuucuuuuuuugaaauaaaauagccugucuuucagaucuaaaaaaaaaaaaaaaaaaaaaaaaaaaaaaaaaaaaaaaaaaaaaaaaaaaaaaaaaaaaaaaaaaaaaaaaaaaaaaaaaaaaaaaaaaaaaaaaaaaa

SEQ ID NO: 38689 - RNA, 1724 nt, Artificial Sequence
  mRNA product Design a-1 (A100) comprising derived and/or modified sequence from LASV(LM765-SLE-2012;Clade IV)__AIT17814__GPCmut11 (opt1)
aggagagucccgcagucggcguccagcggcucugcuuguucgugugugugucguugcaggccuuauucaagcuuaccaugggccagaucgugaccuucuuccaggaggucccccacgugaucgaggaggugaugaacaucguccugaucgcccucagcauccuggccgugcugaaggggcucuacaacuucgcgaccugcggccugguggggcuggucacguuccuccugcugugcggccgcuccugcaccaccagccucuacaaggggguguacgagcugcagacccuggagcucaacauggagacgcugaacaugaccaugccgcuguccugcaccaagaacaacagccaccacuacaucauggugggcaacgagaccggccucgagcugacgcugaccaacaccuccaucaucgaccacaaguucugcaaccucagcgacgcccaccggaagaaccuguacgaccacgcccugauguccaucaucagcaccuuccaccucuccauccccaacuucaaccaguacgaggccaugagcugcgacuucaacgggggcaagaucuccguccaguacaaccugagccacuccuacgccaaggacgcggccgaccacugcgggacgguggccaacggcgugcugcagaccuucaugcgcauggccuggggcgggagcuacaucgcgcucgacuccggccgggggcgcugggacugcaucaugaccagcuaccaguaccugaucauccagaacaccacgugggaggaccacugccaguucucccggcccagccccaucggcuaccuggggcuccugucccagcgcacccgggacaucuacaucagccgccggcugcucggcaccuucaccuggacgcugagcgacuccgagggcaaggacacccccgggggcuacugccugacccgcuggaugcucaucgaggccgagcugaagugcuucgggaacaccgccgucgccaagugcaacgagaagcacgacgaggaguucugcgacaugcugcggcuguucgacuucaacaagcaggccauccagcgccugaaggcggaggcccagaugagcauccagcugaucaacaaggccgugaacgcccucaucaacgaccagcugaucaugaagaaccaccuccgggacaucaugggcauccccuacugcaacuacuccaaguacugcuaccucaaccacacgaccaccgggaagaccagccugcccaagugcugccugguguccaacggcagcuaccucaacgagacgcacuucuccgacgacaucgagcagcaggccgacaacaugaucaccgagaugcugcagaaggaguacauggagcgccagggcaagaccccgcuggggcuggucgaccucuucguguucagcaccuccuucuaccugaucagcaucuuccugcaccucgugaagaucccgacgcaccggcacaucgucggcaagcccugccccaagccccaccgccugaaccacauggggaucugcuccugcggccuguacaagcagccgggggugcccgugaaguggaagcggugaggacuagucccuguucccagagcccacuuuuuuuucuuuuuuugaaauaaaauagccugucuuucagaucuaaaaaaaaaaaaaaaaaaaaaaaaaaaaaaaaaaaaaaaaaaaaaaaaaaaaaaaaaaaaaaaaaaaaaaaaaaaaaaaaaaaaaaaaaaaaaaaaaaaa

SEQ ID NO: 38690 - RNA, 1724 nt, Artificial Sequence
  mRNA product Design a-1 (A100) comprising derived and/or modified sequence from LASV(LM776-SLE-2012;Clade IV)__AIT17824__GPCmut11 (opt1)
aggagagucccgcagucggcguccagcggcucugcuuguucgugugugugucguugcaggccuuauucaagcuuaccaugggccagaucgugaccuucuuccaggaggucccccacgugaucgaggaggugaugaacaucguccugaucgcccucagcauccuggccgugcugaaggggcucuacaacuucgcgaccugcggccugguggggcuggucacguuccuccugcugugcggccgcuccugcaccaccagcguguacaaggggguguacgagcuccagacccuggagcugaacauggagacgcucaacaugaccaugccgcuguccugcaccaagaacaacagccaccacuacaucauggucggcaacgagaccggccuggagcucacgcugaccaacaccuccaucaucaaccacaaguucugcaaccugagcgacgcccacaagaagaaccucuacgaccacgcccugauguccaucaucagcaccuuccaccuguccauccccaacuucaaccaguacgaggccaugagcugcgacuucaacgggggcaagaucuccgugcaguacaaccucagccacuccuacgccggggacgcggccaaccacugcggcacgguggccaacgggguccugcagaccuucaugcggauggccuggggcggcagcuacaucgcgcuggacuccgggcacggcaagugggacugcaucaugaccagcuaccaguaccucaucauccagaacaccacgugggaggaccacugccaguucucccgccccagccccaucggguaccugggccugcucucccagcggacccgcgacaucuacaucagccggcgccugcugggcaccuucaccuggacgcucagcgacuccgaggggaaggacaccccgggcggguacugccugacccgguggaugcugaucgaggccgagcucaagugcuucggcaacaccgccguggccaagugcaacgagaagcacgacgaggaguucugcgacaugcugcgccuguucgacuucaacaagcaggccauccagcggcucaaggcggaggcccagaugagcauccagcugaucaacaaggccgugaacgcccugaucaacgaccagcucaucaugaagaaccaccuccgcgacaucauggggauccccuacugcaacuacuccaaguacugcuaccugaaccacacgaccaccggcaagaccagccugcccaagugcugccuggucuccaacggcagcuaccugaacgagacgcacuucuccgacgacaucgagcagcaggccgacaacaugaucaccgagaugcuccagaaggaguacauggagcggcaggggaagacgccccugggccugguggaccuguucguguucagcaccuccuucuaccucaucagcaucuuccugcaccuggucaagaucccgacccaccgccacaucguggggaaguccugccccaagccccaccggcucaaccacaugggcaucugcagcugcgggcuguacaagcagcccggcgugccgguccgcuggaagcggugaggacuagucccuguucccagagcccacuuuuuuuucuuuuuuugaaauaaaauagccugucuuucagaucuaaaaaaaaaaaaaaaaaaaaaaaaaaaaaaaaaaaaaaaaaaaaaaaaaaaaaaaaaaaaaaaaaaaaaaaaaaaaaaaaaaaaaaaaaaaaaaaaaaaa

SEQ ID NO: 38691 - RNA, 1724 nt, Artificial Sequence
  mRNA product Design a-1 (A100) comprising derived and/or modified sequence from LASV(Mad39;Clade IV)__ANH09722__GPCmut11 (opt1)
aggagagucccgcagucggcguccagcggcucugcuuguucgugugugugucguugcaggccuuauucaagcuuaccaugggccagaucgugaccuucuuccaggaggucccccacgugaucgaggaggugaugaacaucguccugaucgcccucagcauccuggccgugcugaaggggcucuacaacguggcgaccugcggccugaucgggcuggucacguuccuccugcugugcggccgcuccugcaccaccacccucuacaaggggguguacgagcugcaggcccuggagcucaacauggagacgcugaacaugaccaugccgcugagcugcaccaagaacaacucccaccacuacauccgggugggcaacgagaccggccucgagcugacgcugaccaacaccagccucaucaaccacaaguucugcaaccuguccgacgcccacaagaagaaccuguacgaccacgcccucaugagcaucaucuccaccuuccaccugagcauccccaacuucaaccaguacgaggccauguccugcgacuucaacgacgggaagaucagcguccaguacaaccugucccacacguacgcgggcgacaccgccaaccacugcgggaccguggccaacggcgugcuccagaccuucaugcgcauggccuggggcgggagcuacaucgcgcuggacuccggccgcgggggcugggacugcaucaugacgagcuaccaguaccugaucauccagaacaccaccugggaggaccacugccaguucucccggcccagccccaucggguaccucggccugcugucccagcggacccgcgacaucuacaucagccggcgccuccugggcacguucaccuggacccuguccgacagcgaggggaaggacaccccgggcggguacugccucacgcgguggaugcugaucgaggccgagcugaagugcuucggcaacaccgccgucgccaagugcaacgagaagcacgacgaggaguucugcgacaugcuccgccuguucgacuucaacaagcaggccauccagcggcugaaggcggaggcccagaugagcauccagcucaucaacaaggccgugaacgcccugaucaacgaccagcugaucaugaagaaccaccuccgcgacaucauggggauccccuacugcaacuacuccaaguacugcuaccugaaccacaccgugaccggcaagacgagccugcccaagugcugccucgucuccaacggcagcuaccugaacgagacccacuucuccgacgacaucgagcagcaggccgacaacaugaucaccgagaugcugcagaaggaguacauggagcggcaggggaagacgccccugggccucguggaccuguucguguucagcaccuccuucuaccugaucagcaucuuccuccaccuggucaagaucccgacccaccgccacgugguggggaagcccugccccaagccccaccggcugaaccacaugggcaucugcuccugcggguucuacaagcagccgggcguccccgugcgcuggaagcggugaggacuagucccuguucccagagcccacuuuuuuuucuuuuuuugaaauaaaauagccugucuuucagaucuaaaaaaaaaaaaaaaaaaaaaaaaaaaaaaaaaaaaaaaaaaaaaaaaaaaaaaaaaaaaaaaaaaaaaaaaaaaaaaaaaaaaaaaaaaaaaaaaaaaa

SEQ ID NO: 38692 - RNA, 1724 nt, Artificial Sequence
  mRNA product Design a-1 (A100) comprising derived and/or modified sequence from LASV(Z0947-SLE-2011;Clade IV)__AIT17840__GPCmut11 (opt1)
aggagagucccgcagucggcguccagcggcucugcuuguucgugugugugucguugcaggccuuauucaagcuuaccaugggccagaucgugaccuucuuccaggaggucccccacgugaucgaggaggugaugaacaucguccugaucgcccucagcauccuggccgugcugaaggggcucuacaacuucgcgaccugcggccugguggggcuggucacguuccuccugcugugcggccgcuccugcaccaucagccucuacaaggggguguacgagcugcagacccuggagcucaacauggagacccugaacaugacgaugccgcuguccugcaccaagaacaacagccaccacuacaucauggugggcaacgagaccggccucgagcugacccugacgaacaccuccaucaucaaccacaaguucugcaaccucagcgacgcccacaagaagaaccuguacgaccacgcccugauguccaucaucagcaccuuccaccucuccauccccaacuucaaccaguacgaggccaugagcugcgacuucaacgggggcaagaucuccguccaguacaaccugagccacuccuacgccggggacgcggccaaccacugcggcaccguggccaacggggugcugcagacguucaugcggauggccuggggcggcagcuacaucgcgcucgacuccgggcgcgaccggugggacugcaucaugaccagcuaccaguaccugaucauccagaacaccaccugggaggaccacugccaguucucccgccccagccccaucggcuaccuggggcuccugucccagcggacgcgcgacaucuacaucagccggcgccugcucggcaccuucaccuggacccugagcgacuccgagggcaaggacacgcccgggggcuacugccugacccgguggaugcucaucgaggccgagcugaagugcuucgggaacaccgccgucgccaagugcaacgagaagcacgacgaggaguucugcgacaugcugcgccucuucgacuucaacaagcaggccauccagcggcugaaggcggaggcccagaugagcauccagcugaucaacaaggccgugaacgcccucaucaacgaccagcugaucaugaagaaccaccuccgcgacaucaugggcauccccuacugcaacuacuccaaguacugcuaccugaaccacaccacgaccgggaagaccagccugcccaagugcugccugguguccaacggcagcuaccucaacgagacccacuucuccgacgacaucgagcagcaggccgacaacaugaucacggagaugcugcagaaggaguacauggagcggcagggcaagaccccgcuggggcuggucgaccucuucguguucagcaccuccuucuaccugaucagcaucuuccugcaccucgugaagaucccgacccaccgccacaucgucggcaagcccugccccaagccccaccggcugaaccacauggggaucugcuccugcggccuguacaagcagccgggggugcccgugaaguggaagcgcugaggacuagucccuguucccagagcccacuuuuuuuucuuuuuuugaaauaaaauagccugucuuucagaucuaaaaaaaaaaaaaaaaaaaaaaaaaaaaaaaaaaaaaaaaaaaaaaaaaaaaaaaaaaaaaaaaaaaaaaaaaaaaaaaaaaaaaaaaaaaaaaaaaaaa

SEQ ID NO: 38693 - RNA, 1724 nt, Artificial Sequence
  mRNA product Design a-1 (A100) comprising derived and/or modified sequence from LASV(Josiah;Clade IV)__NP_694870__GPCmut11 (opt4)
aggagagucccgcagucggcguccagcggcucugcuuguucgugugugugucguugcaggccuuauucaagcuuaccaugggccagaucgugaccuucuuccaggaggugccccacgugaucgaggaggugaugaacaucgugcugaucgcccugagcgugcuggccgugcugaagggccuguacaacuucgccaccugcggccuggugggccuggugaccuuccugcugcugugcggcagaagcugcaccaccagccuguacaagggcguguacgagcugcagacccuggagcugaacauggagacccugaacaugaccaugccccugagcugcaccaagaacaacagccaccacuacaucauggugggcaacgagaccggccuggagcugacccugaccaacaccagcaucaucaaccacaaguucugcaaccugagcgacgcccacaagaagaaccuguacgaccacgcccugaugagcaucaucagcaccuuccaccugagcauccccaacuucaaccaguacgaggccaugagcugcgacuucaacggcggcaagaucagcgugcaguacaaccugagccacagcuacgccggcgacgccgccaaccacugcggcaccguggccaacggcgugcugcagaccuucaugagaauggccuggggcggcagcuacaucgcccuggacagcggcagaggcaacugggacugcaucaugaccagcuaccaguaccugaucauccagaacaccaccugggaggaccacugccaguucagcagacccagccccaucggcuaccugggccugcugagccagagaaccagagacaucuacaucagcagaagacugcugggcaccuucaccuggacccugagcgacagcgagggcaaggacacccccggcggcuacugccugaccagauggaugcugaucgaggccgagcugaagugcuucggcaacaccgccguggccaagugcaacgagaagcacgacgaggaguucugcgacaugcugagacuguucgacuucaacaagcaggccauccagagacugaaggccgaggcccagaugagcauccagcugaucaacaaggccgugaacgcccugaucaacgaccagcugaucaugaagaaccaccugagagacaucaugggcauccccuacugcaacuacagcaaguacugcuaccugaaccacaccaccaccggcagaaccagccugcccaagugcugccuggugagcaacggcagcuaccugaacgagacccacuucagcgacgacaucgagcagcaggccgacaacaugaucaccgagaugcugcagaaggaguacauggagagacagggcaagaccccccugggccugguggaccuguucguguucagcaccagcuucuaccugaucagcaucuuccugcaccuggugaagauccccacccacagacacaucgugggcaagagcugccccaagccccacagacugaaccacaugggcaucugcagcugcggccuguacaagcagcccggcgugcccgugaaguggaagagaugaggacuagucccuguucccagagcccacuuuuuuuucuuuuuuugaaauaaaauagccugucuuucagaucuaaaaaaaaaaaaaaaaaaaaaaaaaaaaaaaaaaaaaaaaaaaaaaaaaaaaaaaaaaaaaaaaaaaaaaaaaaaaaaaaaaaaaaaaaaaaaaaaaaaa

SEQ ID NO: 38694 - RNA, 1721 nt, Artificial Sequence
  mRNA product Design a-1 (A100) comprising derived and/or modified sequence from LASV(LP;Clade I)__AAF86701__GPCmut11 (opt4)
aggagagucccgcagucggcguccagcggcucugcuuguucgugugugugucguugcaggccuuauucaagcuuaccaugggccagaucaucaccuucuuccaggaggugccccacgugaucgaggaggugaugaacaucgugcugaucgcccugagccugcuggccauccugaagggccuguacaacaucgccaccugcggcaucaucggccugguggccuuccuguuccugugcggcaagagcugcagccugacccugaagggcggcuacgagcugcagacccuggagcugaacauggagacccugaacaugaccaugccccugagcugcaccaagaacagcagccaccacuacaucagagugggcaacgagaccggccuggagcugacccugaccaacaccagcaucaucaaccacaaguucugcaaccugagcgacgcccacaagaagaaccuguacgaccacgcccugaugagcaucaucagcaccuuccaccugagcauccccaacuucaaccaguacgaggccaugagcugcgacuucaacggcggcaagaucagcgugcaguacaaccugagccacagcuacgccggcgacgccgccgagcacugcggcaccguggccaacggcgugcugcagaccuucaugagaauggccuggggcggcagauacaucgcccuggacagcggcaagggcaacugggacugcaucaugaccagcuaccaguaccugaucauccagaacaccaccugggaggaccacugccaguucagcagacccagccccaucggcuaccugggccugcugagccagagaaccagagacaucuacaucagcagaagacugcugggcaccuucaccuggacccugagcgacagcgagggcaacgagacccccggcggcuacugccugaccagauggaugcugaucgaggccgagcugaagugcuucggcaacaccgccguggccaagugcaacgagaagcacgacgaggaguucugcgacaugcugagacuguucgacuucaacaagcaggccaucagaagacugaaggccgaggcccagaugagcauccagcugaucaacaaggccgugaacgcccugaucaacgaccagcugaucaugaagaaccaccugagagacaucaugggcauccccuacugcaacuacagcaaguacugcuaccugaaccacaccagcagcggcagaaccagccugcccaagugcugccugaucagcaacggcagcuaccugaacgagacccaguucagcgacgacaucgagcagcaggccgacaacaugaucaccgagaugcugcagaaggaguacaucgagagacagggcaagaccccccugggccugguggacaucuucaucuucagcaccagcuucuaccugaucagcaucuuccugcaccugaucaagauccccacccacagacacaucgugggcaagcccugccccaagccccacagacugaaccacaugggcgugugcagcugcggccuguacaagcaccccggcgugcccaccaaguggaagagaugaggacuagucccuguucccagagcccacuuuuuuuucuuuuuuugaaauaaaauagccugucuuucagaucuaaaaaaaaaaaaaaaaaaaaaaaaaaaaaaaaaaaaaaaaaaaaaaaaaaaaaaaaaaaaaaaaaaaaaaaaaaaaaaaaaaaaaaaaaaaaaaaaaaaa

SEQ ID NO: 38695 - RNA, 1721 nt, Artificial Sequence
  mRNA product Design a-1 (A100) comprising derived and/or modified sequence from LASV(803213;Clade II)__AAF86703__GPCmut11 (opt4)
aggagagucccgcagucggcguccagcggcucugcuuguucgugugugugucguugcaggccuuauucaagcuuaccaugggccagaucaucaccuucuuccaggaggugccccacgugaucgaggaggugaugaacaucgugcugaucgcccugagccugcuggccauccugaagggcaucuacaacguggccaccugcggccuguucggccugaucagcuuccugcugcugugcggcagaagcugcagcgugaccuacaagggcguguacgagcugcagacccuggagcugaacauggccaaccugaacaugaccaugccccugagcugcaccaagaacaacagccaccacuacaucauggugggcaacgagaccggccuggagcugacccugaccaacaccagcaucaucaaccacaaguucugcaaccugagcgacgcccacaagaagaaccuguacgaccacgcccugaugagcaucaucagcaccuuccaccugagcauccccaacuucaaccaguacgaggccaugagcugcgacuucaacggcggcaagaucagcgugcaguacaaccugagccacagcuucgccguggacgccgccaaccacugcggcaccaucgccaacggcgugcugcagaccuucaugagaauggccuggggcggcagcuacaucgcccuggacagcggcaagggcaacugggacugcaucaugaccagcuaccaguaccugaucauccagaacaccaccugggaggaccacugccaguucagcagacccagccccaucggcuaccugggccugcugagccagagaaccagagacaucuacaucagcagaagacugcugggcaccuucaccuggacccugagcgacagcgagggcaacgaggcccccggcggcuacugccugaccagauggaugcugaucgaggccgagcugaagugcuucggcaacaccgccguggccaagugcaacgagaagcacgacgaggaguucugcgacaugcugagacuguucgacuucaacaagcaggccaucaagagacugaagaccgaggcccagaugagcauccagcugaucaacaaggccgugaacgcccugaucaacgaccagcugaucaugaagaaccaccugagagacaucaugggcauccccuacugcaacuacagcagauacugcuaccugaaccacaccgugaccggcaagaccagccugcccagaugcugccuggugagcaacggcagcuaccugaacgagacccacuucagcgacgacaucgagcagcaggccgacaacaugaucaccgagaugcugcagaaggaguacauggacagacagggcaagaccccccugggccugguggaccuguucguguucagcaccagcuucuaccugaucagcaucuuccugcaccuggugaagauccccacccacagacacaucgugggcaagcccugccccaagccccacagacugaaccacaugggcaucugcagcugcggccuguacaagcaccccggcgugcccgugaaguggaagagaugaggacuagucccuguucccagagcccacuuuuuuuucuuuuuuugaaauaaaauagccugucuuucagaucuaaaaaaaaaaaaaaaaaaaaaaaaaaaaaaaaaaaaaaaaaaaaaaaaaaaaaaaaaaaaaaaaaaaaaaaaaaaaaaaaaaaaaaaaaaaaaaaaaaaa

SEQ ID NO: 38696 - RNA, 1721 nt, Artificial Sequence
  mRNA product Design a-1 (A100) comprising derived and/or modified sequence from LASV(GA391;Clade III)__CAA36645__GPCmut11 (opt4)
aggagagucccgcagucggcguccagcggcucugcuuguucgugugugugucguugcaggccuuauucaagcuuaccaugggccagaucgugaccuucuuccaggaggugccccacgugaucgaggaggugaugaacaucgugcugaucgcccugagcauccuggccauccugaagggccuguacaacguggccaccugcggccugaucggccuggugaccuuccugcugcugagcggcagaagcugcagccugaucuacaagggcaccuacgagcugcagacccuggagcugaacauggagacccugaacaugaccaugccccugagcugcaccaagaacaacagccaccacuacaucagagugggcaacgagaccggccuggagcugacccugaccaacaccagcauccugaaccacaaguucugcaaccugagcgacgcccacaagagaaaccuguacgaccacagccugaugagcaucaucagcaccuuccaccugagcauccccaacuucaaccaguacgaggccaugagcugcgacuucaacggcggcaagaucaccgugcaguacaaccugagccacagcuucgccguggacgccgccggccacugcggcacccuggccaacggcgugcugcagaccuucaugagaauggccuggggcggcagcuacaucgcccuggacagcggcagaggcaacugggacugcaucaugaccagcuaccaguaccugaucauccagaacaccaccugggacgaccacugccaguucagcagacccagccccaucggcuaccugggccugcugagccagagaaccagagacaucuacaucagcagaagacugcugggcaccuucaccuggacccugagcgacagcgagggcaacgagacccccggcggcuacugccugaccagauggaugcugaucgaggccgagcugaagugcuucggcaacaccgccguggccaagugcaacgagaagcacgacgaggaguucugcgacaugcugagacuguucgacuucaacaagcaggccaucagaagacugaagaccgaggcccagaugagcauccagcugaucaacaaggccgugaacgcccugaucaacgaccagcugaucaugaagaaccaccugagagacaucaugggcauccccuacugcaacuacagcagauacugcuaccugaaccacaccagcaccggcaagaccagccugcccagaugcugccugaucagcaacggcagcuaccugaacgagaccaaguucagcgacgacaucgagcagcaggccgacaacaugaucaccgagaugcugcagaaggaguacaucgacagacagggcaagaccccccugggccugguggaccuguucguguucagcaccagcuucuaccugaucagcaucuuccugcaccuggugaagauccccacccacagacacaucgugggcaagcccugccccaagccccacagacugaaccacaugggcaucugcagcugcggccuguacaagcagcccggcgugcccgugagauggaagagaugaggacuagucccuguucccagagcccacuuuuuuuucuuuuuuugaaauaaaauagccugucuuucagaucuaaaaaaaaaaaaaaaaaaaaaaaaaaaaaaaaaaaaaaaaaaaaaaaaaaaaaaaaaaaaaaaaaaaaaaaaaaaaaaaaaaaaaaaaaaaaaaaaaaaa

SEQ ID NO: 38697 - RNA, 1724 nt, Artificial Sequence
  mRNA product Design a-1 (A100) comprising derived and/or modified sequence from LASV(AV;Clade V)__CCA30314__GPCmut11 (opt4)
aggagagucccgcagucggcguccagcggcucugcuuguucgugugugugucguugcaggccuuauucaagcuuaccaugggccagaucgugaccuucuuccaggaggugccccacgugaucgaggaggugaugaacaucgugcugaucgcccugagcauccuggccgugcugaagggccuguacaacaucgccaccugcggccugaucggccugaucaccuuccugcugcugugcggcagaagcugcagcagcaaccuguacaagggcguguacgagcugcagagccuggaccugaacauggagacccugaacaugaccaugccccugagcugcaccaagaacaacagccaccacuacaucagagugggcaacgacaccggccuggagcugacccugaccaacaccagcauccugaaccacaaguucugcaaccugagcgacgcccacaagaaggaccuguacgaccacgcccugaugagcaucaucagcaccuuccaccugagcauccccaacuucaaccaguacgaggccaugagcugcgacuucaacggcggcaagaucagcgugcaguacaaccugagccacagcuacgccaucgacgccgccaaccacugcggcaccguggccaacggcauccugcagaccuucaugagaauggccuggggcggcagcuacaucgcccuggacagcggcagaggcaacugggacugcaucaugaccagcuaccaguaccugaucauccagaacaccaccugggagaaccacugccaguucagcagacccagccccaucggcuaccugggccugcugagccagagaaccagagacaucuacaucagcagaagacugcugggcaccuucaccuggacccugagcgacagcgagggcaacgccacccccggcggcuacugccugaccagauggaugcugaucgaggccgagcugaagugcuucggcaacaccgccguggccaagugcaacgagaagcacgacgaggaguucugcgacaugcugagacuguucgacuucaacaagcaggccaucagcagacugaagagcgaggcccagaugagcauccagcugaucaacaaggccgugaacgcccugaucaacgaccagcugaucaugaagaaccaccugagagacaucaugggcauccccuacugcaacuacagcaaguacugcuaccugaaccacaccaucaccggcaagaccagccugcccaagugcugccuggugagcaacggcagcuaccugaacgagacccacuucagcgacgacaucgagcagcaggccgacaacaugaucaccgagaugcugcagaaggaguacauggagagacagggcaagaccccccugggccugguggaccuguucguguucagcaccagcuucuaccugaucagcaucuuccugagacuggugaagauccccacccacagacacaucgugggcaagcccugccccaagccccacagacugaaccacaugggcaucugcagcugcggccuguacaagcagcccggcgugcccgugagauggaagagaugaggacuagucccuguucccagagcccacuuuuuuuucuuuuuuugaaauaaaauagccugucuuucagaucuaaaaaaaaaaaaaaaaaaaaaaaaaaaaaaaaaaaaaaaaaaaaaaaaaaaaaaaaaaaaaaaaaaaaaaaaaaaaaaaaaaaaaaaaaaaaaaaaaaaa

SEQ ID NO: 38698 - RNA, 1721 nt, Artificial Sequence
  mRNA product Design a-1 (A100) comprising derived and/or modified sequence from LASV(Togo/2016/7082;Clade VI)__AMR44577__GPCmut11 (opt4)
aggagagucccgcagucggcguccagcggcucugcuuguucgugugugugucguugcaggccuuauucaagcuuaccaugggccagaucaucaccuucuuccaggaggugccccacgugaucgaggaggugaugaacaucgugcugaucgcccugagccugcuggccauccugaagggcguguacaacguggccaccugcggcaucaucggccuggugaccuuccuguuccugugcggcagaagcugcagccugaucuacaagggcagcuacgagcugcagacccuggagcugaacauggagacccugaacaugaccaugccccugagcugcaccaagaacagcagccaccacuacaucagagugggcaacgagaccggccuggagcugacccugaccaacaccagcaucaucaaccacaaguucugcaaccugagcgacgcccacaagagaaaccuguacgaccacgcccugaugagcauccugagcaccuuccaccugagcauccccaacuucaaccaguacgaggccaugagcugcgacuucaacggcggcaagaucagcgugcaguacaaccugagccacgccuacgccguggacgccgccgagcacugcggcaccguggccaacggcgugcugcagaccuucaugagaauggccuggggcggcagcuacaucgcccuggacagcggcagaggcaacugggacugcaucaugaccagcuaccaguaccugaucauccagaacaccaccugggaggaccacugccaguucagcagacccagccccaucggcuaccugggccugcugagccagagaaccagagacaucuacaucagcagaagacugcugggcaccuucaccuggacccugagcgacagcgagggcaacgagacccccggcggcuacugccugaccagauggaugcugaucgaggccgagcugaagugcuucggcaacaccgccguggccaagugcaacgagaagcacgacgaggaguucugcgacaugcugagacuguucgacuucaacaagcaggccauccagagacugaagagcgaggcccagaugagcauccagcugaucaacaaggccgugaacgcccugaucaacgaccagcugaucaugaagaaccaccugagagacaugaugggcauccccuacugcaacuacagcaaguacugcuaccugaaccacaccagcagcggcagaaccagccugcccaagugcugccuggugagcaacggcagcuaccugaacgagacccacuucagcgacgacaucgagcagcaggccgacaacaugaucaccgagaugcugcagaaggaguacaucgacagacagggcaagaccccccugggccugguggaccuguucguguucagcaccagcuucuaccugaucagcaucuuccugcaccugaucaagauccccacccacagacacaucgugggcaagcccugccccaagccccacagacugaaccacaugggcaucugcagcugcggccuguacaagcagcccggcgugcccaccagauggaagagaugaggacuagucccuguucccagagcccacuuuuuuuucuuuuuuugaaauaaaauagccugucuuucagaucuaaaaaaaaaaaaaaaaaaaaaaaaaaaaaaaaaaaaaaaaaaaaaaaaaaaaaaaaaaaaaaaaaaaaaaaaaaaaaaaaaaaaaaaaaaaaaaaaaaaa

SEQ ID NO: 38699 - RNA, 1721 nt, Artificial Sequence
  mRNA product Design a-1 (A100) comprising derived and/or modified sequence from LASV(KAK-428;Clade n.d. (VII))__ANH09740__GPCmut11 (opt4)
aggagagucccgcagucggcguccagcggcucugcuuguucgugugugugucguugcaggccuuauucaagcuuaccaugggccagaucgugaccuucuuccaggaggugccccacgugaucgaggaggugaugaacaucgugcugaucgcccugagccugcuggccauccugaagggccuguacaacuucgccaccugcggcgugaucggccugaucaccuuccugcugcugugcggcagaagcugcagcgccaccuacaagggccaguacgagcugcagacccuggagcugaacauggagagccugaacaugaccaugccccugagcugcaccaagaacaacagccaccacuacaucagagccggcaacaacaccggccuggagcugacccugaccaacaccagcaucaucagccacaaguucugcaaccugagcgacgcccacaagaagaaccuguacgaccacacccugaugagcaucaucaccaccuuccaccugagcauccccaacuucaaccaguacgaggccaugagcugcgacuucaacggcggcaagaucagcauccaguacaaccugagccacagcuacgccggcgacgccgcccagcacugcggcaccguggccaacggcgugcugcagaccuucaugagaauggccuggggcggcagcuaccuggcccuggacagcggcagaagaggcugggacugcaucaucagcagcuaccaguaccugaucauccagaacaccaccugggacgaccacugccaguucagcagacccagccccaucggcuaccugggcuucgugagccagaagaccagagacaucuacaucagcagaagacugcugggcaccuucaccuggacccugagcgacagcgagggccacgacaugcccggcggcuacugccugaccagauggaugcugaucgaggccgaccugaagugcuucggcaacaccgccguggccaagugcaacgagaagcacgacgaggaguucugcgacauguggagacuguucgacuucaacaagcaggccauccagagacugaaggccgaggcccagaugaacauccagcugaucaacaaggccgugaacgcccugaucaacgaccagcugaugaugaagaaccaccugagagacaucaugggcauccccuacugcaacuacagcaaguucugcuaccugaacaacaccaccaccggcagaaccagccugcccagaugcugccugaucagcaacggcagcuaccugaacgagacccacuucagcgacgacaucgagcagcaggccgacaacaugaucaccgagaugcugcagaaggaguacauggacagacagggcaagaccccccugggccugguggaccuguucguguucagcaccagcuucuaccugaucaccaucuuccugcaccuggugaagauccccacccacagacacaucgugggcaagcccugccccaagccccacagacugaaccacaugggcaucugcagcugcggccuguacaagcagcccggcgugcccgugagauggaagagaugaggacuagucccuguucccagagcccacuuuuuuuucuuuuuuugaaauaaaauagccugucuuucagaucuaaaaaaaaaaaaaaaaaaaaaaaaaaaaaaaaaaaaaaaaaaaaaaaaaaaaaaaaaaaaaaaaaaaaaaaaaaaaaaaaaaaaaaaaaaaaaaaaaaaa

SEQ ID NO: 38700 - RNA, 1721 nt, Artificial Sequence; identical to SEQ ID NO: 38694
  mRNA product Design a-1 (A100) comprising derived and/or modified sequence from LASV(Pinneo-NIG-1969;Clade I)__AIT17836__GPCmut11 (opt4)

SEQ ID NO: 38701 - RNA, 1721 nt, Artificial Sequence
  mRNA product Design a-1 (A100) comprising derived and/or modified sequence from LASV(ISTH0009-NIG-2011;Clade II)__AIT17404__GPCmut11 (opt4)
aggagagucccgcagucggcguccagcggcucugcuuguucgugugugugucguugcaggccuuauucaagcuuaccaugggccagaucaucaccuucuuccaggaggugccccacgugaucgaggaggugaugaacaucgugcugaucgcccugagccugcuggccauccugaagggcaucuacaacguggccaccugcggccuguucggccuggugagcuuccugcugcugugcggcagaagcugcagcaccaccuacaagggcguguacgagcugcagacccuggagcuggacauggccagccugaacaugaccaugccccugagcugcaccaagaacaacagccaccacuacaucauggugggcaacgagaccggccuggagcugacccugaccaacaccagcaucaucaaccacaaguucugcaaccugagcgacgcccacaagaagaaccuguacgaccacgcccugaugagcaucaucagcaccuuccaccugagcauccccaacuucaaccaguacgaggccaugagcugcgacuucaacggcggcaagaucagcgugcaguacaaccugagccacgccuacgccguggacgccgccaaccacugcggcaccaucgccaacggcgugcugcagaccuucaugagaauggccuggggcggcagcuacaucgcccuggacagcggcaagggcagcugggacugcaucaugaccagcuaccaguaccugaucauccagaacaccaccugggaggaccacugccaguucagcagacccagccccaucggcuaccugggccugcugagccagagaaccagagacaucuacaucagcagaagacugcugggcaccuucaccuggacccugagcgacagcgagggcaacgagacccccggcggcuacugccugaccagauggaugcugaucgaggccgagcugaagugcuucggcaacaccgccguggccaagugcaacgagaagcacgacgaggaguucugcgacaugcugagacuguucgacuucaacaagcaggccaucagaagacugaagaccgaggcccagaugagcauccagcugaucaacaaggccgugaacgcccugaucaacgaccagcugaucaugaagaaccaccugagagacaucaugggcauccccuacugcaacuacagcaaguacugcuaccugaaccacaccgugaccggcaagaccagccugcccagaugcugccuggugagcaacggcagcuaccugaacgagacccacuucagcgacgacaucgagcagcaggccgacaacaugaucaccgagcugcugcagaaggaguacauggacagacagggcaagaccccccugggccugguggaccuguucguguucagcaccagcuucuaccugaucagcaucuuccugcaccugaucaagauccccacccacagacacaucaccggcaagcccugccccaagccccacagacugaaccacaugggcaucugcagcugcggccuguacaagcaccccggcgugcccgugaaguggaagagaugaggacuagucccuguucccagagcccacuuuuuuuucuuuuuuugaaauaaaauagccugucuuucagaucuaaaaaaaaaaaaaaaaaaaaaaaaaaaaaaaaaaaaaaaaaaaaaaaaaaaaaaaaaaaaaaaaaaaaaaaaaaaaaaaaaaaaaaaaaaaaaaaaaaaa

SEQ ID NO: 38702 - RNA, 1721 nt, Artificial Sequence
  mRNA product Design a-1 (A100) comprising derived and/or modified sequence from LASV(ISTH2010-NIG-2012;Clade II)__AIT17482__GPCmut11 (opt4)
aggagagucccgcagucggcguccagcggcucugcuuguucgugugugugucguugcaggccuuauucaagcuuaccaugggccagaucaucaccuucuuccaggaggugccccacgugaucgaggaggugaugaacaucgugcugaucgcccugagccugcuggccauccugaagggcaucuacaacguggccaccugcggccuguucggccuggugagcuuccugcugcugugcggcagaagcugcagcaccaccuacaagggcguguacgagcugcagacccuggagcuggacauggccagccugaacaugaccaugccccugagcugcaccaagaacaacagccaccacuacaucauggugggcaacgagaccggccuggagcugacccugaccaacaccagcaucaucaaccacaaguucugcaaccugagcgacgcccacaagaagaaccuguacgaccacgcccugaugagcaucaucagcaccuuccaccugagcauccccaacuucaaccaguacgaggccaugagcugcgacuucaacggcggcaagaucagcgugcaguacaaccugagccacgccuacgccguggacgccgccaaccacugcggcaccaucgccaacggcgugcugcagaccuucaugagaauggccuggggcggcagcuacaucgcccuggacagcggcaagggcagcugggacugcaucaugaccagcuaccaguaccugaucauccagaacaucaccugggaggaccacugccaguucagcagacccagccccaucggcuaccugggccugcugagccagagaaccagagacaucuacaucagcagaagacugcugggcaccuucaccuggacccugagcgacagcgagggcaacgagacccccggcggcuacugccugaccagauggaugcugaucgaggccgagcugaagugcuucggcaacaccgccguggccaagugcaacgagaagcacgacgaggaguucugcgacaugcugagacuguucgacuucaacaagcaggccaucagaagacugaagaccgaggcccagaugagcauccagcugaucaacaaggccgugaacgcccugaucaacgaccagcugaucaugaagaaccaccugagagacaucaugggcauccccuacugcaacuacagcaaguacugcuaccugaaccacaccgugaccggcaagaccagccugcccagaugcugccuggugagcaacggcagcuaccugaacgagacccacuucagcgacgacaucgagcagcaggccgacaacaugaucaccgagcugcugcagaaggaguacaucgacagacagggcaagaccccccugggccugguggaccuguucguguucagcaccagcuucuaccugaucagcaucuuccugcaccuggugaagauccccacccacagacacguggugggcaagcccugccccaagccccacagacugaaccacaugggcaucugcagcugcggccuguacaagcaccccggcgugcccgugaaguggaagagaugaggacuagucccuguucccagagcccacuuuuuuuucuuuuuuugaaauaaaauagccugucuuucagaucuaaaaaaaaaaaaaaaaaaaaaaaaaaaaaaaaaaaaaaaaaaaaaaaaaaaaaaaaaaaaaaaaaaaaaaaaaaaaaaaaaaaaaaaaaaaaaaaaaaaa

SEQ ID NO: 38703 - RNA, 1721 nt, Artificial Sequence
  mRNA product Design a-1 (A100) comprising derived and/or modified sequence from LASV(Lassa virus/H.sapiens-wt/NGA/2015/ISTH_0543;Clade II)__AVO03639__GPCmut11 (opt4)
aggagagucccgcagucggcguccagcggcucugcuuguucgugugugugucguugcaggccuuauucaagcuuaccaugggccagaucaucaccuucuuccaggaggugccccacgugaucgaggaggugaugaacaucgugcugaucgcccugagccugcuggccauccugaagggcaucuacaacguggccaccugcggccuguucggccuggugagcuuccugcugcugugcggcagaagcugcagcaccaccuacaagggcguguacgagcugcagacccuggagcuggacauggccaaccugaacaugaccaugccccugagcugcaccaagaacaacagccaccacuacaucauggugggcaacgagaccggccuggagcugacccugaccaacaccagcaucaucaaccacaaguucugcaaccugagcgacgcccacaagaagaaccuguacgaccacgcccugaugagcaucaucagcaccuuccaccugagcauccccaacuucaaccaguacgaggccaugagcugcgacuucaacggcggcaagaucagcgugcaguacaaccugagccacaccuacgccguggacgccgccaaccacugcggcaccaucgccaacggcgugcugcagaccuucaugagaauggccuggggcggcagcuacaucgcccuggacagcggcaagggcagcugggacugcaucaugaccagcuaccaguaccuggugauccagaacaccaccugggaggaccacugccaguucagcagacccagccccaucggcuaccugggccugcugagccagagaaccagagacaucuacaucagcagaagacugcugggcaccuucaccuggacccugagcgacagcgagggcaacgagacccccggcggcuacugccugaccagauggaugcugaucgaggccgagcugaagugcuucggcaacaccgccguggccaagugcaacgagaagcacgacgaggaguucugcgacaugcugagacuguucgacuucaacaagcaggccaucagaagacugaagaccgaggcccagaugagcauccagcugaucaacaaggccgugaacgcccugaucaacgaccagcugaucaugaagaaccaccugagagacaucaugggcauccccuacugcaacuacagcaaguacugcuaccugaaccacaccgugaccggcaagaccagccugcccagaugcugccuggugagcaacggcagcuaccugaacgagacccacuucagcgacgacaucgagcagcaggccgacaacaugaucaccgagcugcugcagaaggaguacaucgacagacagggcaagaccccccugggccugguggaccuguucguguucagcaccagcuucuaccugaucagcaucuuccugcaccuggugaagauccccacccacagacacaucaccggcaagcccugccccaagccccacagacugaaccacaugggcaucugcagcugcggccuguacaagcaccccggcgugcccgugaaguggaagagaugaggacuagucccuguucccagagcccacuuuuuuuucuuuuuuugaaauaaaauagccugucuuucagaucuaaaaaaaaaaaaaaaaaaaaaaaaaaaaaaaaaaaaaaaaaaaaaaaaaaaaaaaaaaaaaaaaaaaaaaaaaaaaaaaaaaaaaaaaaaaaaaaaaaaa

SEQ ID NO: 38704 - RNA, 1721 nt, Artificial Sequence
  mRNA product Design a-1 (A100) comprising derived and/or modified sequence from LASV(Lassa virus/H.sapiens-wt/NGA/2016/ISTH_0009;Clade II)__AVO03571__GPCmut11 (opt4)
aggagagucccgcagucggcguccagcggcucugcuuguucgugugugugucguugcaggccuuauucaagcuuaccaugggccagaucaucaccuucuuccaggaggugccccacgugaucgaggaggugaugaacaucgugcugaucgcccugagccugcuggccauccugaagggcaucuacaacguggccaccugcggccugcugggccuggugagcuuccugcugcugugcggcagaagcugcagcaccaccuacaagggcguguacgagcugcagacccuggagcuggacauggccagccugaacaugaccaugccccugagcugcaccaagaacaacagccaccacuacaucauggugggcaacgagaccggccuggagcugacccugaccaacaccagcaucaucaaccacaaguucugcaaccugagcgacgcccacaagaagaaccuguacgaccacgcccugaugagcaucaucagcaccuuccaccugagcauccccaacuucaaccaguacgaggccaugagcugcgacuucaacggcggcagaaucagcgugcaguacaaccugagccacagcuacgccguggacgccgccaaccacugcggcaccaucgccaacggcgugcugcagaccuucaugagaauggccuggggcggcagcuacaucgcccuggacagcggcaagggcagcugggacugcaucaugaccagcuaccaguaccugaucauccagaacaccaccugggaggaccacugccaguucagcagacccagccccaucggcuaccugggccugcugagccagagaaccagagacaucuacaucagcagaagacugcugggcaccuucaccuggacccugagcgacagcgagggcaacgagacccccggcggcuacugccugaccagauggaugcugaucgaggccgagcugaagugcuucggcaacaccgccguggccaagugcaacgagaagcacgacgaggaguucugcgacaugcugagacuguucgacuucaacaagcaggccaucagaagacugaagaccgaggcccagaugagcauccagcugaucaacaaggccgugaacgcccugaucaacgaccagcugaucaugaagaaccaccugagagacaucaugggcauccccuacugcaacuacagcaaguacugcuaccugaaccacaccgugaccggcaagaccagccugcccagaugcugccuggugagcaacggcagcuaccugaacgagacccacuucagcgacgacaucgagcagcaggccgacaacaugaucaccgagcugcugcagaaggaguacaucgacagacagggcaagaccccccugggccugguggaccuguucguguucagcaccagcuucuaccugaucagcaucuuccugcaccuggugaagauccccacccacagacacaucaccggcaagcccugccccaagccccacagacugaaccacaugggcaucugcagcugcggccuguacaaccaccccggcgugcccgugaaguggaagagaugaggacuagucccuguucccagagcccacuuuuuuuucuuuuuuugaaauaaaauagccugucuuucagaucuaaaaaaaaaaaaaaaaaaaaaaaaaaaaaaaaaaaaaaaaaaaaaaaaaaaaaaaaaaaaaaaaaaaaaaaaaaaaaaaaaaaaaaaaaaaaaaaaaaaa

SEQ ID NO: 38705 - RNA, 1721 nt, Artificial Sequence
  mRNA product Design a-1 (A100) comprising derived and/or modified sequence from LASV(Lassa virus/H.sapiens-wt/NGA/2016/ISTH_0017;Clade II)__AVO03567__GPCmut11 (opt4)
aggagagucccgcagucggcguccagcggcucugcuuguucgugugugugucguugcaggccuuauucaagcuuaccaugggccagaucaucaccuucuuccaggaggugccccacgugaucgaggaggugaugaacaucgugcugaucgcccugagccugcuggccauccugaagggcaucuacaacguggccaccugcggccuguucggccuggugagcuuccugcugcugugcggcagaagcugcagcaccaccuacaagggcguguacgagcugcagacccuggagcuggacauggccagccugaacaugaccaugccccugagcugcaccaagaacaacagccaccacuacaucauggugggcaacgagaccggccuggagcugacccugaccaacaccagcaucaucaaccacaaguucugcaaccugagcgacgcccacaagaagaaccuguacgaccacgcccugaugagcaucaucagcaccuuccaccugagcauccccaacuucaaccaguacgaggccaugagcugcgacuucaacggcggcaagaucagcgugcaguacaaccugagccacaccuacgccaucgacgccgccaaccacugcggcaccaucgccaacggcgugcugcagaccuucaugagaauggccuggggcggcagcuacaucgcccuggacagcggcaagggcagcugggacugcaucaugaccagcuaccaguaccugaucauccagaacaccaccugggaggaccacugccaguucagcagacccagccccaucggcuaccugggccugcugagccagagaaccagagacaucuacaucagcagaagacugcugggcaccuucaccuggacccugagcgacagcgagggcaacgagacccccggcggcuacugccugaccagauggaugcugaucgaggccgagcugaagugcuucggcaacaccgccguggccaagugcaacgagaagcacgacgaggaguucugcgacaugcugagacuguucgacuucaacaagcaggccaucagaagacugaagaccgaggcccagaugagcauccagcugaucaacaaggccgugaacgcccugaucaacgaccagcugaucaugaagaaccaccugagagacaucaugggcauccccuacugcaacuacagcaaguacugcuaccugaaccacaccgugaccggcaagaccagccugcccagaugcugccuggugagcaacggcagcuaccugaacgagacccacuucagcgacgacaucgagcagcaggccgacaacaugaucaccgagcugcugcagaaggaguacauggacagacagggcaagaccccccugggccugguggaccuguucguguucagcaccagcuucuaccugaucagcaucuuccugcaccuggugagaauccccacccacagacacgugaucggcaagcccugccccaagccccacagacugaaccacaugggcaucugcagcugcggccuguacaagcaccccggcgugcccgugaaguggaagagaugaggacuagucccuguucccagagcccacuuuuuuuucuuuuuuugaaauaaaauagccugucuuucagaucuaaaaaaaaaaaaaaaaaaaaaaaaaaaaaaaaaaaaaaaaaaaaaaaaaaaaaaaaaaaaaaaaaaaaaaaaaaaaaaaaaaaaaaaaaaaaaaaaaaaa

SEQ ID NO: 38706 - RNA, 1721 nt, Artificial Sequence
  mRNA product Design a-1 (A100) comprising derived and/or modified sequence from LASV(Lassa virus/H.sapiens-wt/NGA/2018/ISTH_0959;Clade II)__AVV65099__GPCmut11 (opt4)
aggagagucccgcagucggcguccagcggcucugcuuguucgugugugugucguugcaggccuuauucaagcuuaccaugggccagaucaucaccuucuuccaggaggugccccacgugaucgaggaggugaugaacaucgugcugaucgcccugagccugcuggccauccugaagggcaucuacaacguggugaccugcggccuguucggccuggugagcuuccugcugcugugcggcagaagcugcagcaccaccuacaagggcguguacgagcugcagacccuggagcuggacauggccagccugaacaugaccaugccccugagcugcaccaagaacaacagccaccacuacaucauggugggcaacgagaccggccuggagcugacccugaccaacaccagcaucaucaaccacaaguucugcaaccugagcgacgcccacaagaagaaccuguacgaccacgcccugaugagcaucaucagcaccuuccaccugagcauccccaacuucaaccaguacgaggccaugagcugcgacuucaacggcggcaagaucagcgugcaguacaaccugagccacgccuacgccaucgacgccgccaaccacugcggcaccaucgccaacggcgugcugcagaccuucaugagaauggccuggggcggcagcuacaucgcccuggacagcggcaagggcagcugggacugcaucaugaccagcuaccaguaccugaucauccagaacaccaccugggaggaccacugccaguucagcagacccagccccaucggcuaccugggccugcugagccagagaaccagagacaucuacaucagcagaagacugcugggcaccuucaccuggacccugagcgacagcgagggcaacgagacccccggcggcuacugccugaccagauggaugcugaucgaggccgagcugaagugcuucggcaacaccgccguggccaagugcaacgagaagcacgacgaggaguucugcgacaugcugagacuguucgacuucaacaagcaggccaucagaagacugaagaccgaggcccagaugagcauccagcugaucaacaaggccgugaacgcccugaucaacgaccagcugaucaugaagaaccaccugagagacaucaugggcauccccuacugcaacuacagcaaguacugcuaccugaaccacaccgugaccggcaagaccagccugcccagaugcugccuggugagcaacggcagcuaccugaacgagacccacuucagcgacgacaucgagcagcaggccgacaacaugaucaccgagcugcugcagaaggaguacaucgacagacagggcaagaccccccugggccugguggaccuguucguguucagcaccagcuucuaccugaucagcaucuuccugcaccuggugaagauccccacccacagacacgugaucggcaagcccugccccaagccccacagacugaaccacaugggcaucugcagcugcggccuguacaagcaccccggcgugcccgugaaguggaagagaugaggacuagucccuguucccagagcccacuuuuuuuucuuuuuuugaaauaaaauagccugucuuucagaucuaaaaaaaaaaaaaaaaaaaaaaaaaaaaaaaaaaaaaaaaaaaaaaaaaaaaaaaaaaaaaaaaaaaaaaaaaaaaaaaaaaaaaaaaaaaaaaaaaaaa

SEQ ID NO: 38707 - RNA, 1721 nt, Artificial Sequence
  mRNA product Design a-1 (A100) comprising derived and/or modified sequence from LASV(LASV003-NIG-2008;Clade II)__AIT17580__GPCmut11 (opt4)
aggagagucccgcagucggcguccagcggcucugcuuguucgugugugugucguugcaggccuuauucaagcuuaccaugggccagaucaucaccuucuuccaggaggugccccacgugaucgaggaggugaugaacaucgugcugaucgcccugagccugcuggccauccugaagggcaucuacaacguggccaccugcggccuguucggccuggugagcuuccugcugcugugcggcagaagcugcagcaccaccuacaagggcguguacgagcugcagacccuggagcuggacauggccagccugaacaugaccaugccccugagcugcaccaagaacaacagccaccacuacaucauggugggcaacgagaccggccuggagcugacccugaccaacaccagcaucaucaaccacaaguucugcaaccugagcgacgcccacaagaagaaccuguacgaccacgcccugaugagcaucaucagcaccuuccaccugagcauccccaacuucaaccaguacgaggccaugagcugcgacuucaacggcggcaagaucagcgugcaguacaaccugagccacaccuacgccguggacgccgccaaccacugcggcaccaucgccaacggcgugcugcagaccuucaugagaauggccuggggcggcagcuacaucgcccuggacagcggcaagggcagcugggacugcaucaugaccagcuaccaguaccugaucauccagaacaccaccugggaggaccacugccaguucagcagacccagccccaucggcuaccugggccugcugagccagagaaccagagacaucuacaucagcagaagacugcugggcaccuucaccuggacccugagcgacagcgagagcaacgagacccccggcggcuacugccugaccagauggaugcugaucgaggccgagcugaagugcuucggcaacaccgccguggccaagugcaacgagaagcacgacgaggaguucugcgacaugcugagacuguucgacuucaacaagcaggccaucagaagacugaaggccgaggcccagaugagcauccagcugaucaacaaggccgugaacgcccugaucaacgaccagcugaucaugaagaaccaccugagagacaucaugggcauccccuacugcaacuacagcaaguacugcuaccugaaccacaccgugaccggcagaaccagccugcccagaugcugccuggugagcaacggcagcuaccugaacgagacccacuucagcgacgacaucgagcagcaggccgacaacaugaucaccgagcugcugcagaaggaguacauggacagacagggcaagaccccccugggccugguggaccuguucguguucagcaccagcuucuaccugaucagcaucuuccugcaccuggugaagauccccacccacagacacgugaucggcaagcccugccccaagccccacagacugaaccacaugggcaucugcagcugcggccuguacaagcaccccggcgugcccgugaaguggaagagaugaggacuagucccuguucccagagcccacuuuuuuuucuuuuuuugaaauaaaauagccugucuuucagaucuaaaaaaaaaaaaaaaaaaaaaaaaaaaaaaaaaaaaaaaaaaaaaaaaaaaaaaaaaaaaaaaaaaaaaaaaaaaaaaaaaaaaaaaaaaaaaaaaaaaa

SEQ ID NO: 38708 - RNA, 1721 nt, Artificial Sequence
  mRNA product Design a-1 (A100) comprising derived and/or modified sequence from LASV(LASV035-NIG-2009;Clade II)__AIT17588__GPCmut11 (opt4)
aggagagucccgcagucggcguccagcggcucugcuuguucgugugugugucguugcaggccuuauucaagcuuaccaugggccagaucaucaccuucuuccaggaggugccccacgugaucgaggaggugaugaacaucgugcugaucgcccugagccugcuggccauccugaagggcaucuacaacguggccaccugcggccuguucggccuggugagcuuccugcugcugugcggcagaagcugcagcaccaccuacaagggcguguacgagcugcagacccuggagcuggacauggccagccugaacaugaccaugccccugagcugcaccaagaacaacagccaccacuacaucauggugggcaacgagaccggccuggagcugacccugaccaacaccagcaucaucaaccacaaguucugcaaccugagcgacgcccacaagaagaaccuguacgaccacgcccugaugagcaucaucagcaccuuccaccugagcauccccaacuucaaccaguacgaggccaugagcugcgacuucaacggcggcaagaucagcgugcaguacaaccugagccacgccuacgccguggacgccgccaaccacugcggcaccaucgccaacggcgugcugcagaccuucaugagaauggccuggggcggcagcuacaucgcccuggacagcggcaagggcagcugggacugcaucaugaccagcuaccaguaccugaucauccagaacaccaccugggaggaccacugccaguucagcagacccagccccaucggcuaccugggccugcugagccagagaaccagagacaucuacaucagcagaagacugcugggcaccuucaccuggacccugagcgacagcgagggcaacgagacccccggcggcuacugccugaccagauggaugcugaucgaggccgagcugaagugcuucggcaacaccgccguggccaagugcaacgagaagcacgacgaggaguucugcgacaugcugagacuguucgacuucaacaagcaggccaucagaagacugaaggccgaggcccagaugagcauccagcugaucaacaaggccgugaacgcccugaucaacgaccagcugaucaugaagaaccaccugagagacaucaugggcauccccuacugcaacuacagcaaguacugcuaccugaaccacaccgugaccggcaagaccagccugcccagaugcugccuggugagcaacggcagcuaccugaacgagacccacuucagcgacgacaucgagcagcaggccgacaacaugaucaccgagcugcugcagaaggaguacaucgacagacagggcaagaccccccugggccugguggaccuguucguguucagcaccagcuucuaccugaucagcaucuuccugcaccuggugaagauccccacccacagacacgugaucggcaagcccugccccaagccccacagacugaaccacaugggcaucugcagcugcggccuguacaagcaccccggcgugcccgugaaguggaagagaugaggacuagucccuguucccagagcccacuuuuuuuucuuuuuuugaaauaaaauagccugucuuucagaucuaaaaaaaaaaaaaaaaaaaaaaaaaaaaaaaaaaaaaaaaaaaaaaaaaaaaaaaaaaaaaaaaaaaaaaaaaaaaaaaaaaaaaaaaaaaaaaaaaaaa

SEQ ID NO: 38709 - RNA, 1721 nt, Artificial Sequence
  mRNA product Design a-1 (A100) comprising derived and/or modified sequence from LASV(LASV1000-NIG-2009;Clade II)__AIT17782__GPCmut11 (opt4)
aggagagucccgcagucggcguccagcggcucugcuuguucgugugugugucguugcaggccuuauucaagcuuaccaugggccagaucaucaccuucuuccaggaggugccccacgugaucgaggaggugaugaacaucgugcugaucgcccugagccugcuggccauccugaagggcaucuacaacguggccaccugcggccuguucggccuggugagcuuccugcugcugugcggcagaagcugcagcaccaccuacaagggcguguacgagcugcagacccuggagcuggacauggccagccugaacaugaccaugccccugagcugcaccaagaacaacagccaccacuacaucauggugggcaacgagaccggccuggagcugacccugaccaacaccagcaucaucaaccacaaguucugcaaccugagcgacgcccacaagaagaaccuguacgaccacgcccugaugagcaucaucagcaccuuccaccugagcauccccaacuucaaccaguacgaggccaugagcugcgacuucaacggcggcaagaucagcgugcaguacaaccugagccacaccuacgccguggacgccgccaaccacugcggcaccaucgccaacggcgugcugcagaccuucaugagaauggccuggggcggcagcuacaucgcccuggacagcggcaagggcagcugggacugcaucaugaccagcuaccaguaccugaucauccagaacaccaccugggaggaccacugccaguucagcagacccagccccaucggcuaccugggccugcugagccagagaaccagagacaucuacaucagcagaagacugcugggcaccuucaccuggacccugagcgacagcgagggcaacgagacccccggcggcuacugccugaccagauggaugcugaucgaggccgagcugaagugcuucggcaacaccgccguggccaagugcaacgagaagcacgacgaggaguucugcgacaugcugagacuguucgacuucaacaagcaggccaucaagagacugaagaccgaggcccagaugagcauccagcugaucaacaaggccgugaacgcccugaucaacgaccagcugaucaugaagaaccaccugagagacaucaugggcauccccuacugcaacuacagcaaguacugcuaccugaaccacaccgugaccggcaagaccagccugcccagaugcugccuggugagcaacggcagcuaccugaacgagacccacuucagcgacgacaucgagcagcaggccgacaacaugaucaccgagcugcugcagaaggaguacaucgacagacagggcaagaccccccugggccugguggaccuguucguguucagcaccagcuucuaccugaucagcaucuuccugcaccuggugaagauccccacccacagacacguggugggcaagcccugccccaagccccacagacugaaccacaugggcaucugcagcugcggccuguacaagcaccccggcgugcccgugaaguggaagagaugaggacuagucccuguucccagagcccacuuuuuuuucuuuuuuugaaauaaaauagccugucuuucagaucuaaaaaaaaaaaaaaaaaaaaaaaaaaaaaaaaaaaaaaaaaaaaaaaaaaaaaaaaaaaaaaaaaaaaaaaaaaaaaaaaaaaaaaaaaaaaaaaaaaaa

SEQ ID NO: 38710 - RNA, 1721 nt, Artificial Sequence
  mRNA product Design a-1 (A100) comprising derived and/or modified sequence from LASV(LASV221-NIG-2010;Clade II)__AIT17624__GPCmut11 (opt4)
aggagagucccgcagucggcguccagcggcucugcuuguucgugugugugucguugcaggccuuauucaagcuuaccaugggccagaucaucaccuucuuccaggaggugccccacgugaucgaggaggugaugaacaucgugcugaucgcccugagccugcuggccauccugaagggcaucuacaacguggccaccugcggccuguucggccuggugagcuuccugcugcugugcggcagaagcugcagcaccaccuacaagggcguguacgagcugcagacccuggagcuggacauggccagccugaacaugaccaugccccugagcugcaccaagaacaacagccaccacuacaucauggugggcaacgagaccggccuggagcugacccugaccaacaccagcaucaucaaccacaaguucugcaaccugagcgacgcccacaagaagaaccuguacgaccacgcccugaugagcaucaucagcaccuuccaccugagcauccccaacuucaaccaguacgaggccaugagcugcgacuucaacggcggcaagaucagcgugcaguacaaccugagccacaccuacgccaucgacgccgccaaccacugcggcaccaucgccaacggcgugcugcagaccuucaugagaauggccuggggcggcagcuacaucgcccuggacagcggcaagggcagcugggacugcaucaugaccagcuaccaguaccugaucauccagaacaccaccugggaggaccacugccaguucagcagacccagccccaucggcuaccugggccugcugagccagagaaccagagacaucuacaucagcagaagacugcugggcaccuucaccuggacccugagcgacagcgagggcaacgagacccccggcggcuacugccugaccagauggaugcugaucgaggccgagcugaagugcuucggcaacaccgccguggccaagugcaacgagaagcacgacgaggaguucugcgacaugcugagacuguucgacuucaacaagcaggccaucagaagacugaagaccgaggcccagaugagcauccagcugaucaacaaggccgugaacgcccugaucaacgaccagcugaucaugaagaaccaccugagagacaucaugggcauccccuacugcaacuacagcaaguacugcuaccugaaccacaccgugaccggcaagaccagccugcccagaugcugccuggugagcaacggcagcuaccugaacgagacccacuucagcgacgacaucgagcagcaggccgacaacaugaucaccgagaugcugcagaaggaguacauggacagacagggcaagaccccccugggccugguggaccuguucguguucagcaccagcuucuaccugaucagcaucuuccugcaccuggugaagauccccacccacagacacgugaucggcaagcccugccccaagccccacagacugaaccacaugggcaucugcagcugcggccuguacaagcaccccggcgugcccgugaaguggaagagaugaggacuagucccuguucccagagcccacuuuuuuuucuuuuuuugaaauaaaauagccugucuuucagaucuaaaaaaaaaaaaaaaaaaaaaaaaaaaaaaaaaaaaaaaaaaaaaaaaaaaaaaaaaaaaaaaaaaaaaaaaaaaaaaaaaaaaaaaaaaaaaaaaaaaa

SEQ ID NO: 38711 - RNA, 1721 nt, Artificial Sequence
  mRNA product Design a-1 (A100) comprising derived and/or modified sequence from LASV(LASV237-NIG-2010;Clade II)__AIT17638__GPCmut11 (opt4)
aggagagucccgcagucggcguccagcggcucugcuuguucgugugugugucguugcaggccuuauucaagcuuaccaugggccagaucaucaccuucuuccaggaggugccccacgugaucgaggaggugaugaacaucgugcugaucgcccugagccugcuggccauccugaagggcaucuacaacguggccaccugcggccuguucggccuggugagcuuccugcugcugugcggcagaagcugcagcaccaccuacaagggcguguacgagcugcagacccuggagcuggacauggccagccugaacaugaccaugccccugagcugcaccaagaacaacagccaccacuacaucauggugggcaacgagaccggccuggagcugacccugaccaacaccagcaucaucaaccacaaguucugcaaccugagcgacgcccacaagaaggaccuguacgaccacgcccugaugagcaucaucagcaccuuccaccugagcauccccaacuucaaccaguacgaggccaugagcugcgacuucaacggcggcaagaucagcgugcaguacaaccugagccacaccuacgccguggacgccgccaaccacugcggcaccaucgccaacggcgugcugcagaccuucaugagaauggccuggggcggcagcuacaucgcccuggacagcggcaagggcagcugggacugcaucaugaccagcuaccaguaccugaucauccagaacaccaccugggaggaccacugccaguucagcagacccagccccaucggcuaccugggccugcugagccagagaaccagagacaucuacaucagcagaagacugcugggcaccuucaccuggacccugagcgacagcgagggcaacgagacccccggcggcuacugccugaccagauggaugcugaucgaggccgagcugaagugcuucggcaacaccgccguggccaagugcaacgagaagcacgacgaggaguucugcgacaugcugagacuguucgacuucaacaagcaggccaucagaagacugaagaccgaggcccagaugagcauccagcugaucaacaaggccgugaacgcccugaucaacgaccagcugaucaugaagaaccaccugagagacaucaugggcauccccuacugcaacuacagcaaguacugcuaccugaaccacaccgugaccggcaagaccagccugcccagaugcugccuggugagcaacggcagcuaccugaacgagacccacuucagcgacgacaucgagcagcaggccgacaacaugaucaccgagcugcugcagaaggaguacauggacagacagggcaagaccccccugggccugguggaccuguucguguucagcaccagcuucuaccugaucagcaucuuccugcaccugaucaagauccccacccacagacacaucaccggcaagcccugccccaagccccacagacugaaccacaugggcaucugcagcugcggccuguacaagcaccccggcgugcccgugaaguggaagagaugaggacuagucccuguucccagagcccacuuuuuuuucuuuuuuugaaauaaaauagccugucuuucagaucuaaaaaaaaaaaaaaaaaaaaaaaaaaaaaaaaaaaaaaaaaaaaaaaaaaaaaaaaaaaaaaaaaaaaaaaaaaaaaaaaaaaaaaaaaaaaaaaaaaaa

SEQ ID NO: 38712 - RNA, 1721 nt, Artificial Sequence
  mRNA product Design a-1 (A100) comprising derived and/or modified sequence from LASV(LASV253-NIG-2011;Clade II)__AIT17670__GPCmut11 (opt4)
aggagagucccgcagucggcguccagcggcucugcuuguucgugugugugucguugcaggccuuauucaagcuuaccaugggccagaucaucaccuucuuccaggaggugccccacgugaucgaggaggugaugaacaucgugcugaucgcccugagccugcuggccauccugaagggcaucuacaacguggccaccugcggccuguucggccuggugagcuuccugcugcugugcggcagaagcugcagcaccaccuacaagggcguguacgagcugcagacccuggagcuggacauggccagccugaacaugaccaugccccugagcugcaccaagaacaacagccaccacuacaucauggugggcaacgagaccggccuggagcugacccugaccaacaccagcaucaucaaccacaaguucugcaaccugagcgacgcccacaagaagaaccuguacgaccacgcccugaugagcaucaucagcaccuuccaccugagcauccccaacuucaaccaguacgaggccaugagcugcgacuucaacggcggcaagaucagcgugcaguacaaccugagccacaccuacgccguggacgccgccaaccacugcggcaccaucgccaacggcgugcugcagaccuucaugagaauggccuggggcggcagcuacaucgcccuggacagcggcaagggcagcugggacugcaucaugaccagcuaccaguaccugaucauccagaacaccaccugggaggaccacugccaguucagcagacccagccccaucggcuaccugggccugcugagccagagaaccagagacaucuacaucagcagaagacugcugggcaccuucaccuggacccugagcgacagcgagggcaacgagacccccggcggcuacugccugaccagauggaugcugaucgaggccgagcugaagugcuucggcaacaccgccguggccaagugcaacgagaagcacgacgaggaguucugcgacaugcugagacuguucgacuucaacaagcaggccaucagaagacugaaggccgaggcccagaugagcauccagcugaucaacaaggccgugaacgcccugaucaacgaccagcugaucaugaagaaccaccugagagacaucaugggcauccccuacugcaacuacagcaaguacugcuaccugaaccacaccgugaccggcagaaccagccugcccagaugcugccuggugagcaacggcagcuaccugaacgagacccacuucagcgacgacaucgagcagcaggccgacaacaugaucaccgagcugcugcagaaggaguacaucgacagacagggcaagaccccccugggccugguggaccuguucguguucagcaccagcuucuaccugaucagcaucuuccugcaccuggugaagauccccacccacagacacaucaucggcaagcccugccccaagccccacagacugaaccacaugggcaucugcagcugcggccuguacaagcaccccggcgugcccgugaaguggaagagaugaggacuagucccuguucccagagcccacuuuuuuuucuuuuuuugaaauaaaauagccugucuuucagaucuaaaaaaaaaaaaaaaaaaaaaaaaaaaaaaaaaaaaaaaaaaaaaaaaaaaaaaaaaaaaaaaaaaaaaaaaaaaaaaaaaaaaaaaaaaaaaaaaaaaa

SEQ ID NO: 38713 - RNA, 1721 nt, Artificial Sequence
  mRNA product Design a-1 (A100) comprising derived and/or modified sequence from LASV(LASV254-NIG-2011;Clade II)__AIT17674__GPCmut11 (opt4)
aggagagucccgcagucggcguccagcggcucugcuuguucgugugugugucguugcaggccuuauucaagcuuaccaugggccagaucaucaccuucuuccaggaggugccccacgugaucgaggaggugaugaacaucgugcugaucgcccugagccugcuggccauccugaagggcaucuacaacguggccaccugcggccuguucggccuggugagcuuccugcugcugugcggcagaagcugcagcaccaccuacaagggcguguacgagcugcagacccuggagcuggacaugaccaaccugaacaugaccaugccccugagcugcaccaagaacaacagccaccacuacaucauggugggcaacgagaccggccuggagcugacccugaccaacaccagcaucaucaaccacaaguucugcaaccugagcgacgcccacaagaagaaccuguacaaccacgcccugaugagcaucaucagcaccuuccaccugagcauccccaacuucaaccaguacgaggccaugagcugcgacuucaacggcggcaagaucagcgugcaguacaaccugagccacagcuacgccguggacgccgccaaccacugcggcaccaucgccaacggcgugcugcagaccuucaugagaauggccuggggcggcagcuacaucgcccuggacagcggcaagggcaacugggacugcaucaugaccagcuaccaguaccugaucauccagaacaccaccugggaggaccacugccaguucagcagacccagccccaucggcuaccugggccugcugagccagagaaccagagacaucuacaucagcagaagacugcugggcaccuucaccuggacccugagcgacagcgagggcaacgagacccccggcggcuacugccugaccagauggaugcugaucgaggccgagcugaagugcuucggcaacaccgccguggccaagugcaacgagaagcacgacgaggaguucugcgacaugcugagacuguucgacuucaacaagcaggccaucagaagacugaagaccgaggcccaggccaacauccagcugaucaacaaggccgugaacgcccugaucaacgaccagcugaucaugaagaaccaccugagagacaucaugggcauccccuacugcaacuacagcaaguacugcuaccugaaccacaccgugaccggcaagaccagccugcccagaugcugccuggugagcaacggcagcuaccugaacgagacccacuucagcgacgacaucgagcagcaggccgacaacaugaucaccgagcugcugcagaaggaguacauggacagacagggcaagaccccccugggccugguggaccuguucguguucagcaccagcuucuaccugaucagcaucuuccugcaccuggugaagauccccacccacagacacgugaucggcaagcccugccccaagccccacagacugaaccacaugggcaucugcagcugcggccuguacaagcaccccggcgugcccgugaaguggaagagaugaggacuagucccuguucccagagcccacuuuuuuuucuuuuuuugaaauaaaauagccugucuuucagaucuaaaaaaaaaaaaaaaaaaaaaaaaaaaaaaaaaaaaaaaaaaaaaaaaaaaaaaaaaaaaaaaaaaaaaaaaaaaaaaaaaaaaaaaaaaaaaaaaaaaa

SEQ ID NO: 38714 - RNA, 1721 nt, Artificial Sequence
  mRNA product Design a-1 (A100) comprising derived and/or modified sequence from LASV(Nig08-A19;Clade III)__ADU56618__GPCmut11 (opt4)
aggagagucccgcagucggcguccagcggcucugcuuguucgugugugugucguugcaggccuuauucaagcuuaccaugggccagaucgugaccuucuuccaggaggugccccacgugaucgaggaggugaugaacaucgugcugaucgcccugagcauccuggccauccugaagggccuguacaacaucgccaccugcggccugaucggccuggugaccuuccugcugcugagcggcagaagcugcagcaugaccuacaagggcguguacgagcugcagacccuggagcugaacaugaacacccugaacaugaccaugccccugagcugcaccaagaacaacagccaccacuacaucauggugggcaacgagaccggccuggagcugacccugaccaacaccagccugcugcaccacaaguucugcaaccugagcgacgcccacaagaagaaccuguacgaccacacccugaugagcaucaucagcaccuuccaccugagcauccccaacuucaaccaguacgaggccaugagcugcgacuucaacggcggcaagaucaccgugcaguacaaccugagccacagcuacgccaucgacgccgccaaccacugcggcaccguggccaacggcgugcugcagaccuucaugagaauggccuggggcggcagcuacaucgcccuggacagcggcagaggcaagugggacugcaucaugaccagcuaccaguaccugaucauccagaacaccaccugggaggaccacugccaguucagcagacccagccccaucggcuaccugggccugcugagccagagaaccagagacaucuacaucagcagaagacugcugggcaccuucaccuggacccugagcgacagcgagggcaacgagacccccggcggcuacugccugaccagauggaugcugaucgaggccgagcugaagugcuucggcaacaccgccguggccaagugcaacgagaagcacgacgaggaguucugcgacaugcugagacuguucgacuucaacaagcaggccaucagaagacugaaggccgaggcccagaugagcauccagcugaucaacaaggccgugaacgcccugaucaacgaccagcugaucaugaagaaccaccugagagacaucaugggcauccccuacugcaacuacagcaaguacugcuaccugaaccacaccagcaccggcagaaccagccugcccagaugcugccuggugagcaacggcagcuaccugaacgagacccacuucagcgacgacaucgagcagcaggccgacaacaugaucaccgagaugcugcagaaggaguaccuggacagacagggcaagaccccccugggccugguggaccuguucguguucagcaccagcuucuaccugaucagcaucuuccugcaccuggugaagauccccacccacagacacaucgugggcaagcccugccccaagccccacagacugaaccacaugggcaucugcagcugcggccuguacaagcagcccggcgugcccgugagauggaagagaugaggacuagucccuguucccagagcccacuuuuuuuucuuuuuuugaaauaaaauagccugucuuucagaucuaaaaaaaaaaaaaaaaaaaaaaaaaaaaaaaaaaaaaaaaaaaaaaaaaaaaaaaaaaaaaaaaaaaaaaaaaaaaaaaaaaaaaaaaaaaaaaaaaaaa

SEQ ID NO: 38715 - RNA, 1724 nt, Artificial Sequence
  mRNA product Design a-1 (A100) comprising derived and/or modified sequence from LASV(G1180-SLE-2010;Clade IV)__AIT17168__GPCmut11 (opt4)
aggagagucccgcagucggcguccagcggcucugcuuguucgugugugugucguugcaggccuuauucaagcuuaccaugggccagaucgugaccuucuuccaggaggugccccacgugaucgaggaggugaugaacaucgugcugaucgcccugagcauccuggccgugcugaagggccuguacaacuucgccaccugcggccuggugggccugcugaccuuccugcugcugugcggcagaagcugcaccgccagcagauacaagggcguguacgagcugcagacccuggagcugaacauggagacccugaacaugaccaugccccugagcugcaccaagaacaacagccaccacuacaucauggugggcaacgagaccggccuggagcugacccugaccaacaccagcaucaucaaccacaaguucugcaaccugagcgacgcccacaagaagaaccuguacgaccacgcccugaugagcaucaucagcaccuuccaccugagcauccccaacuucaaccaguacgaggccaugagcugcgacuucaacggcggcaagaucagcgugcaguacaaccugagccacagcuacgccggcgacgccgccaaccacugcggcaccguggccaacggcgugcugcagaccuucaugagaauggccuggggcggcagcuacaucgcccuggacagcggccacggcagcugggacugcaucaugaccagcuaccaguaccugaucauccagaacaccaccugggaggaccacugccaguucagcagacccagccccaucggcuaccugggccugcugagccagagaaccagagacaucuacaucagcagaagacugcugggcaccuucaccuggacccugagcgacagcgagggcaaggacacccccggcggcuacugccugaccagauggaugcugaucgaggccgagcugaagugcuucggcaacaccgccguggccaagugcaacgagaagcacgacgaggaguucugcgacaugcugagacuguucgacuucaacaagcaggccauccagagacugaaggccgaggcccagaugagcauccagcugaucaacaaggccgugaacgcccugaucaacgaccagcugaucaugaagaaccaccugagagacaucaugggcauccccuacugcaacuacagcaaguacugcuaccugaaccacaccaccaccggcaagaccagccugcccaagugcugccuggugagcaacggcagcuaccugaacgagacccacuucagcgacgacaucgagcagcaggccgacaacaugaucaccgagaugcugcagaaggaguacauggagagacagggcaagaccccccugggccugguggaccuguucguguucagcaccagcuucuaccugaucagcaucuuccugcaccuggugaagauccccacccacagacacaucgugggcaagagcugccccaagccccacagacugaaccacaugggcaucugcagcugcggccuguacaagcagcccggcgugcccgugaaguggaagagaugaggacuagucccuguucccagagcccacuuuuuuuucuuuuuuugaaauaaaauagccugucuuucagaucuaaaaaaaaaaaaaaaaaaaaaaaaaaaaaaaaaaaaaaaaaaaaaaaaaaaaaaaaaaaaaaaaaaaaaaaaaaaaaaaaaaaaaaaaaaaaaaaaaaaa

SEQ ID NO: 38716 - RNA, 1724 nt, Artificial Sequence
  mRNA product Design a-1 (A100) comprising derived and/or modified sequence from LASV(G1442-SLE-2011;Clade IV)__AIT17180__GPCmut11 (opt4)
aggagagucccgcagucggcguccagcggcucugcuuguucgugugugugucguugcaggccuuauucaagcuuaccaugggccagaucgugaccuucuuccaggaggugccccacgugaucgaggaggugaugaacaucgugcugaucgcccugagcauccuggccgugcugaagggccuguacaacguggccaccugcggccugaucggccuggugaccuuccugcugcugugcggcagaagcugcaccaccacccuguacaagggcguguacgagcugcagacccuggagcugaacauggagacccugaacaugaccaugccccugagcugcaccaagaacaacagccaccacuacaucagagugggcaacgagaccggccuggagcugacccugaccaacaccagcaucaucaaccacaaguucugcaaccugagcgacgcccacaagaagaaccuguacgaccacgcccugaugagcaucaucagcaccuuccaccugagcauccccaacuucaaccaguacgaggccaugagcugcgacuucaacggcggcaagaucagcgugcaguacaaccugagccacagcuacgccggcgacgccgccaaccacugcggcaccguggccaacggcgugcugcagaccuucaugagaauggccuggggcggcagcuacaucgcccuggacagcggcagaggcaacugggacugcaucaugaccagcuaccaguaccugaucauccagaacaccaccugggacgaccacugccaguucagcagacccagccccaucggcuaccugggccugcugagccagagaaccagagacguguacaucagcagaagacugcugggcaccuucaccuggacccugagcgacagcgagggcaaggacacccccggcggcuacugccugaccagauggaugcugaucgaggccgagcugaagugcuucggcaacaccgccguggccaagugcaacgagaagcacgacgaggaguucugcgacaugcugagacuguucgacuucaacaagcaggccauccagagacugaaggccgaggcccagaugagcauccagcugaucaacaaggccgugaacgcccugaucaacgaccagcugaucaugaagaaccaccugagagacaucaugggcauccccuacugcaacuacagcaaguacugcuaccugaacaacaccgccaccggcaagaccagccugcccaagugcugccugaucagcaacggcagcuaccugaacgagacccacuucagcgacgacaucgagcaggaggccgacaacaugaucaccgagaugcugcagaaggaguacauggagagacagggcaagaccccccugggccugguggaccuguucguguucagcaccagcuucuaccugaucagcaucuuccugcaccuggugaagauccccacccacagacacaucgugggcaagagcugccccaagccccacagacugaaccacaugggcaucugcagcugcggccuguacaagcagcccggcgugcccgugagauggaagagaugaggacuagucccuguucccagagcccacuuuuuuuucuuuuuuugaaauaaaauagccugucuuucagaucuaaaaaaaaaaaaaaaaaaaaaaaaaaaaaaaaaaaaaaaaaaaaaaaaaaaaaaaaaaaaaaaaaaaaaaaaaaaaaaaaaaaaaaaaaaaaaaaaaaaa

SEQ ID NO: 38717 - RNA, 1724 nt, Artificial Sequence
  mRNA product Design a-1 (A100) comprising derived and/or modified sequence from LASV(G3010-SLE-2013;Clade IV)__AIT17344__GPCmut11 (opt4)
aggagagucccgcagucggcguccagcggcucugcuuguucgugugugugucguugcaggccuuauucaagcuuaccaugggccagaucgugaccuucuuccaggaggugccccacgugaucgaggaggugaugaacaucgugcugaucgcccugagcauccuggccgugcugaagggccuguacaacuucgccaccugcggccuggugggccuggugaccuuccugcugcugugcggcagaagcugcaccaccagccuguacaagggcguguacgagcugcagacccuggagcugaacauggagacccugaacaugaccaugccccugagcugcaccaagaacaacagccaccacuacaucauggugggcaacgagaccggccuggagcugacccugaccaacaccagcaucaucaaccacaaguucugcaaccugagcgacgcccacaagaagaaccuguacaaccacgcccugaugagcaucaucagcaccuuccaccugagcauccccaacuucaaccaguacgaggccaugagcugcgacuucaacggcggcaagaucagcgugcaguacaaccugagccacagcuacgccggcgacgccgccagccacugcggcaccguggccaacggcgugcugcagaccuucaugagaauggccuggggcggcagcuacaucgcccuggacagcggcuacggcaagugggacugcaucaugaccagcuaccaguaccugaucauccagaacaccaccugggaggaccacugccaguucagcagacccagccccaucggcuaccugggccugcugagccagagaaccagagacaucuacaucagcagaagacugcugggcaccuucaccuggacccugagcgacagcgagggcaaggacacccccggcggcuacugccugaccagauggaugcugaucgaggccgagcugaagugcuucggcaacaccgccguggccaagugcaacgagaagcacgacgaggaguucugcgacaugcugagacuguucgacuucaacaagcaggccauccagagacugaagaccgaggcccagaugagcauccagcugaucaacaaggccgugaacgcccugaucaacgaccagcugaucaugaagaaccaccugagagacaucaugggcauccccuacugcaacuacagcaaguacugcuaccugaaccacaccaccaccggcaagaccagccugcccaagugcugccuggugagcaacggcagcuaccugaacgagacccacuucagcgacgacaucgagcagcaggccgacaacaugaucaccgagaugcugcagaaggaguacauggagagacagggcaagaccccccugggccugguggaccuguucguguucagcaccagcuucuaccugaucagcaucuuccugcaccuggugaagauccccacccacagacacaucgugggcaagagcugccccaagccccacagacugaaccacaugggcaucugcagcugcggccuguacaagcagcccggcgugcccgugagauggaagagaugaggacuagucccuguucccagagcccacuuuuuuuucuuuuuuugaaauaaaauagccugucuuucagaucuaaaaaaaaaaaaaaaaaaaaaaaaaaaaaaaaaaaaaaaaaaaaaaaaaaaaaaaaaaaaaaaaaaaaaaaaaaaaaaaaaaaaaaaaaaaaaaaaaaaa

SEQ ID NO: 38718 - RNA, 1724 nt, Artificial Sequence
  mRNA product Design a-1 (A100) comprising derived and/or modified sequence from LASV(G502-SLE-2009;Clade IV)__AIT17126__GPCmut11 (opt4)
aggagagucccgcagucggcguccagcggcucugcuuguucgugugugugucguugcaggccuuauucaagcuuaccaugggccagaucgugaccuucuuccaggaggugccccacgugaucgaggaggugaugaacaucgugcugaucgcccugagcauccuggccgugcugaagggccuguacaacuucgccaccugcggccuggugggccugcugaccuuccugcugcugugcggcagaagcugcaccaccggccuguacaagggcguguacgagcugcagacccuggagcugaacauggagacccugaacaugaccaugccccugagcugcaccaagaacaacagccaccacuacaucauggugggcaacgagaccggccuggagcugacccugaccaacaccagcaucaucaaccacaaguucugcaaccugagcgacgcccacaagaagaaccuguacgaccacgcccugaugagcaucaucagcaccuuccaccugagcauccccaacuucaaccaguacgaggccaugagcugcgacuucaacggcggcaagaucagcgugcaguacaaccugagccacagcuacgccggcgacgccgccgaccacugcggcaccguggccaacggcgugcugcagaccuucaugagaauggccuggggcggcagcuacaucgcccuggacagcggcagaggcagaugggacugcaucaugaccagcuaccaguaccugaucauccagaacaccaccugggaggaccacugccaguucagcagacccagccccaucggcuaccugggccugcugagccagagaaccagagacaucuacaucagcagaagacugcugggcaccuucaccuggacccugagcgacagcgagggcaaggacacccccggcggcuacugccugaccagauggaugcugaucgaggccgagcugaagugcuucggcaacaccgccguggccaagugcaacgagaagcacgacgaggaguucugcgacaugcugagacuguucgacuucaacaagcaggccauccagagacugaaggccgaggcccagaugagcauccagcugaucaacaaggccgugaacgcccugaucaacgaccagcuggugaugaagaaccaccugagagacaucaugggcauccccuacugcaacuacagcagauacugcuaccugaaccacaccaccaccggcagaaccagccugcccaagugcugccuggugagcaacggcagcuaccugaacgagacccacuucagcgacgacaucgagcagcaggccgacaacaugaucaccgagaugcugcagaaggaguacauggagagacagggcaagaccccccugggccugguggaccuguucguguucagcaccagcuucuaccugaucagcaucuuccugcaccuggugaagauccccacccacagacacaucgugggcaagagcugccccaagccccacagacugaaccacaugggcaucugcagcugcggccuguacaagcagcccggcgugcccgugaaguggaagagaugaggacuagucccuguucccagagcccacuuuuuuuucuuuuuuugaaauaaaauagccugucuuucagaucuaaaaaaaaaaaaaaaaaaaaaaaaaaaaaaaaaaaaaaaaaaaaaaaaaaaaaaaaaaaaaaaaaaaaaaaaaaaaaaaaaaaaaaaaaaaaaaaaaaaa

SEQ ID NO: 38719 - RNA, 1724 nt, Artificial Sequence
  mRNA product Design a-1 (A100) comprising derived and/or modified sequence from LASV(G733-SLE-2010;Clade IV)__AIT17154__GPCmut11 (opt4)
aggagagucccgcagucggcguccagcggcucugcuuguucgugugugugucguugcaggccuuauucaagcuuaccaugggccagaucgugaccuucuuccaggaggugccccacgugaucgaggaggugaugaacaucgugcugaucgcccugagcauccuggccgugcugaagggccuguacaacuucgccaccugcggcaucgugggccuggugagcuuccugcugcugugcggcagaagcugcaccaccagccuguacaagggcguguacgagcugcagacccuggagcugaacauggagacccugaacaugaccaugccccugagcugcaccaagaacaacagccaccacuacaucauggugggcaacgagaccggccuggagcugacccugaccaacaccagcaucaucaaccacaaguucugcaaccugagcgacgcccacaagaagaaccuguacgaccacgcccugaugagcaucaucagcaccuuccaccugagcauccccaacuucaaccaguacgaggccaugagcugcgacuucaacggcggcaagaucagcgugcaguacaaccugagccacagcuacgccggcgacgccgccaaccacugcggcaccaucgccaacggcgugcugcagaccuucaugagaauggccuggggcggcagcuacaucgcccuggacagcggcagagacagaugggacugcaucaugaccagcuaccaguaccugaucauccagaacaccaccugggaggaccacugccaguucagcagacccagccccaucggcuaccugggccugcugagccagagaaccagagacaucuacaucagcagaagacugcugggcaccuucaccuggacccugagcgacagcgagggcaaggacacccccggcggcuacugccugaccagauggaugcugaucgaggccgagcugaagugcuucggcaacaccgccguggccaagugcaacgagaagcacgacgaggaguucugcgacaugcugagacuguucgacuucaacaagcaggccauccagagacugaaggccgaggcccagaugagcauccagcugaucaacaaggccgugaacgcccugaucaacgaccagcugaucaugaagaaccaccugagagacaucaugggcauccccuacugcaacuacagcaaguacugcuaccugaaccacaccaccaccggcaagaccagccugcccaagugcugccuggugagcaacggcagcuaccugaacgagacccacuucagcgacgacaucgagcagcaggccgacaacaugaucaccgagaugcugcagaaggaguacauggagagacagggcaagaccccccugggccugguggaccuguucguguucagcaccagcuucuaccugaucagcaucuuccugcaccuggugaagauccccacccacagacacguggugggcaagagcugccccaagccccacagacugaaccacaugggcaucugcagcugcggccuguacggccagcccggcgugcccgugaaguggaagagaugaggacuagucccuguucccagagcccacuuuuuuuucuuuuuuugaaauaaaauagccugucuuucagaucuaaaaaaaaaaaaaaaaaaaaaaaaaaaaaaaaaaaaaaaaaaaaaaaaaaaaaaaaaaaaaaaaaaaaaaaaaaaaaaaaaaaaaaaaaaaaaaaaaaaa

SEQ ID NO: 38720 - RNA, 1724 nt, Artificial Sequence
  mRNA product Design a-1 (A100) comprising derived and/or modified sequence from MOPV/LASV reassortant(IGS-1;Clade IV)__AFY05576__GPCmut11 (opt4)
aggagagucccgcagucggcguccagcggcucugcuuguucgugugugugucguugcaggccuuauucaagcuuaccaugggccagaucgugaccuucuuccaggaggugccccacgugaucgaggaggugaugaacaucgugcugaucgcccugagcgugcuggccgugcugaagggccuguacaacuucgccaccugcggccuggugggccuggugaccuuccugcugcugugcggcagaagcugcaccaccagccuguacaagggcguguacgagcugcagacccuggagcugaacauggagacccugaacaugaccaugccccugagcugcaccaagaacaacagccaccacuacaucauggugggcaacgagaccggccuggagcugacccugaccaacaccagcaucaucaaccacaaguucugcaaccugagcgacgcccacaagaagaaccuguacgaccacgcccugaugagcaucaucagcaccuuccaccugagcauccccaacuucaaccaguacgaggccaugagcugcgacuucaacggcggcaagaucagcgugcaguacaaccugagccacagcuacgccggcgacgccgccaaccacugcggcaccguggccaacggcgugcugcagaccuucaugagaauggccuggggcggcagcuacaucgcccuggacagcggcagaggcaacugggacugcaucaugaccagcuaccaguaccugaucauccagaacaccaccugggaggaccacugccaguucagcagacccagccccaucggcuaccugggccugcugagccagagaaccagagacaucuacaucagcagaagacugcugggcaccuucaccuggacccugagcgacagcgagggcgaggacacccccggcggcuacugccugaccagauggaugcugaucgaggccgagcugaagugcuucggcaacaccgccguggccaagugcaacgagaagcacgacgaggaguucugcgacaugcugagacuguucgacuucaacaagcaggccauccagagacugaaggccgaggcccagaugagcauccagcugaucaacaaggccgugaacgcccugaucaacgaccagcugaucaugaagaaccaccugagagacaucaugggcauccccuacugcaacuacagcaaguacugcuaccugaaccacaccaccaccggcagaaccagccugcccaagugcugccuggugagcaacggcagcuaccugaacgagacccacuucagcgacgacaucgagcagcaggccgacaacaugaucaccgagaugcugcagaaggaguacauggagagacagggcaagaccccccugggccugguggaccuguucguguucagcaccagcuucuaccugaucagcaucuuccugcaccuggugaagauccccacccacagacacaucgugggcaagagcugccccaagccccacagacugaaccacaugggcaucugcagcugcggccuguacaagcagcccggcgugcccgugaaguggaagagaugaggacuagucccuguucccagagcccacuuuuuuuucuuuuuuugaaauaaaauagccugucuuucagaucuaaaaaaaaaaaaaaaaaaaaaaaaaaaaaaaaaaaaaaaaaaaaaaaaaaaaaaaaaaaaaaaaaaaaaaaaaaaaaaaaaaaaaaaaaaaaaaaaaaaa

SEQ ID NO: 38721 - RNA, 1724 nt, Artificial Sequence
  mRNA product Design a-1 (A100) comprising derived and/or modified sequence from LASV(LM765-SLE-2012;Clade IV)__AIT17814__GPCmut11 (opt4)
aggagagucccgcagucggcguccagcggcucugcuuguucgugugugugucguugcaggccuuauucaagcuuaccaugggccagaucgugaccuucuuccaggaggugccccacgugaucgaggaggugaugaacaucgugcugaucgcccugagcauccuggccgugcugaagggccuguacaacuucgccaccugcggccuggugggccuggugaccuuccugcugcugugcggcagaagcugcaccaccagccuguacaagggcguguacgagcugcagacccuggagcugaacauggagacccugaacaugaccaugccccugagcugcaccaagaacaacagccaccacuacaucauggugggcaacgagaccggccuggagcugacccugaccaacaccagcaucaucgaccacaaguucugcaaccugagcgacgcccacagaaagaaccuguacgaccacgcccugaugagcaucaucagcaccuuccaccugagcauccccaacuucaaccaguacgaggccaugagcugcgacuucaacggcggcaagaucagcgugcaguacaaccugagccacagcuacgccaaggacgccgccgaccacugcggcaccguggccaacggcgugcugcagaccuucaugagaauggccuggggcggcagcuacaucgcccuggacagcggcagaggcagaugggacugcaucaugaccagcuaccaguaccugaucauccagaacaccaccugggaggaccacugccaguucagcagacccagccccaucggcuaccugggccugcugagccagagaaccagagacaucuacaucagcagaagacugcugggcaccuucaccuggacccugagcgacagcgagggcaaggacacccccggcggcuacugccugaccagauggaugcugaucgaggccgagcugaagugcuucggcaacaccgccguggccaagugcaacgagaagcacgacgaggaguucugcgacaugcugagacuguucgacuucaacaagcaggccauccagagacugaaggccgaggcccagaugagcauccagcugaucaacaaggccgugaacgcccugaucaacgaccagcugaucaugaagaaccaccugagagacaucaugggcauccccuacugcaacuacagcaaguacugcuaccugaaccacaccaccaccggcaagaccagccugcccaagugcugccuggugagcaacggcagcuaccugaacgagacccacuucagcgacgacaucgagcagcaggccgacaacaugaucaccgagaugcugcagaaggaguacauggagagacagggcaagaccccccugggccugguggaccuguucguguucagcaccagcuucuaccugaucagcaucuuccugcaccuggugaagauccccacccacagacacaucgugggcaagcccugccccaagccccacagacugaaccacaugggcaucugcagcugcggccuguacaagcagcccggcgugcccgugaaguggaagagaugaggacuagucccuguucccagagcccacuuuuuuuucuuuuuuugaaauaaaauagccugucuuucagaucuaaaaaaaaaaaaaaaaaaaaaaaaaaaaaaaaaaaaaaaaaaaaaaaaaaaaaaaaaaaaaaaaaaaaaaaaaaaaaaaaaaaaaaaaaaaaaaaaaaaa

SEQ ID NO: 38722 - RNA, 1724 nt, Artificial Sequence
  mRNA product Design a-1 (A100) comprising derived and/or modified sequence from LASV(LM776-SLE-2012;Clade IV)__AIT17824__GPCmut11 (opt4)
aggagagucccgcagucggcguccagcggcucugcuuguucgugugugugucguugcaggccuuauucaagcuuaccaugggccagaucgugaccuucuuccaggaggugccccacgugaucgaggaggugaugaacaucgugcugaucgcccugagcauccuggccgugcugaagggccuguacaacuucgccaccugcggccuggugggccuggugaccuuccugcugcugugcggcagaagcugcaccaccagcguguacaagggcguguacgagcugcagacccuggagcugaacauggagacccugaacaugaccaugccccugagcugcaccaagaacaacagccaccacuacaucauggugggcaacgagaccggccuggagcugacccugaccaacaccagcaucaucaaccacaaguucugcaaccugagcgacgcccacaagaagaaccuguacgaccacgcccugaugagcaucaucagcaccuuccaccugagcauccccaacuucaaccaguacgaggccaugagcugcgacuucaacggcggcaagaucagcgugcaguacaaccugagccacagcuacgccggcgacgccgccaaccacugcggcaccguggccaacggcgugcugcagaccuucaugagaauggccuggggcggcagcuacaucgcccuggacagcggccacggcaagugggacugcaucaugaccagcuaccaguaccugaucauccagaacaccaccugggaggaccacugccaguucagcagacccagccccaucggcuaccugggccugcugagccagagaaccagagacaucuacaucagcagaagacugcugggcaccuucaccuggacccugagcgacagcgagggcaaggacacccccggcggcuacugccugaccagauggaugcugaucgaggccgagcugaagugcuucggcaacaccgccguggccaagugcaacgagaagcacgacgaggaguucugcgacaugcugagacuguucgacuucaacaagcaggccauccagagacugaaggccgaggcccagaugagcauccagcugaucaacaaggccgugaacgcccugaucaacgaccagcugaucaugaagaaccaccugagagacaucaugggcauccccuacugcaacuacagcaaguacugcuaccugaaccacaccaccaccggcaagaccagccugcccaagugcugccuggugagcaacggcagcuaccugaacgagacccacuucagcgacgacaucgagcagcaggccgacaacaugaucaccgagaugcugcagaaggaguacauggagagacagggcaagaccccccugggccugguggaccuguucguguucagcaccagcuucuaccugaucagcaucuuccugcaccuggugaagauccccacccacagacacaucgugggcaagagcugccccaagccccacagacugaaccacaugggcaucugcagcugcggccuguacaagcagcccggcgugcccgugagauggaagagaugaggacuagucccuguucccagagcccacuuuuuuuucuuuuuuugaaauaaaauagccugucuuucagaucuaaaaaaaaaaaaaaaaaaaaaaaaaaaaaaaaaaaaaaaaaaaaaaaaaaaaaaaaaaaaaaaaaaaaaaaaaaaaaaaaaaaaaaaaaaaaaaaaaaaa

SEQ ID NO: 38723 - RNA, 1724 nt, Artificial Sequence
  mRNA product Design a-1 (A100) comprising derived and/or modified sequence from LASV(Mad39;Clade IV)__ANH09722__GPCmut11 (opt4)
aggagagucccgcagucggcguccagcggcucugcuuguucgugugugugucguugcaggccuuauucaagcuuaccaugggccagaucgugaccuucuuccaggaggugccccacgugaucgaggaggugaugaacaucgugcugaucgcccugagcauccuggccgugcugaagggccuguacaacguggccaccugcggccugaucggccuggugaccuuccugcugcugugcggcagaagcugcaccaccacccuguacaagggcguguacgagcugcaggcccuggagcugaacauggagacccugaacaugaccaugccccugagcugcaccaagaacaacagccaccacuacaucagagugggcaacgagaccggccuggagcugacccugaccaacaccagccugaucaaccacaaguucugcaaccugagcgacgcccacaagaagaaccuguacgaccacgcccugaugagcaucaucagcaccuuccaccugagcauccccaacuucaaccaguacgaggccaugagcugcgacuucaacgacggcaagaucagcgugcaguacaaccugagccacaccuacgccggcgacaccgccaaccacugcggcaccguggccaacggcgugcugcagaccuucaugagaauggccuggggcggcagcuacaucgcccuggacagcggcagaggcggcugggacugcaucaugaccagcuaccaguaccugaucauccagaacaccaccugggaggaccacugccaguucagcagacccagccccaucggcuaccugggccugcugagccagagaaccagagacaucuacaucagcagaagacugcugggcaccuucaccuggacccugagcgacagcgagggcaaggacacccccggcggcuacugccugaccagauggaugcugaucgaggccgagcugaagugcuucggcaacaccgccguggccaagugcaacgagaagcacgacgaggaguucugcgacaugcugagacuguucgacuucaacaagcaggccauccagagacugaaggccgaggcccagaugagcauccagcugaucaacaaggccgugaacgcccugaucaacgaccagcugaucaugaagaaccaccugagagacaucaugggcauccccuacugcaacuacagcaaguacugcuaccugaaccacaccgugaccggcaagaccagccugcccaagugcugccuggugagcaacggcagcuaccugaacgagacccacuucagcgacgacaucgagcagcaggccgacaacaugaucaccgagaugcugcagaaggaguacauggagagacagggcaagaccccccugggccugguggaccuguucguguucagcaccagcuucuaccugaucagcaucuuccugcaccuggugaagauccccacccacagacacguggugggcaagcccugccccaagccccacagacugaaccacaugggcaucugcagcugcggcuucuacaagcagcccggcgugcccgugagauggaagagaugaggacuagucccuguucccagagcccacuuuuuuuucuuuuuuugaaauaaaauagccugucuuucagaucuaaaaaaaaaaaaaaaaaaaaaaaaaaaaaaaaaaaaaaaaaaaaaaaaaaaaaaaaaaaaaaaaaaaaaaaaaaaaaaaaaaaaaaaaaaaaaaaaaaaa

SEQ ID NO: 38724 - RNA, 1724 nt, Artificial Sequence
  mRNA product Design a-1 (A100) comprising derived and/or modified sequence from LASV(Z0947-SLE-2011;Clade IV)__AIT17840__GPCmut11 (opt4)
aggagagucccgcagucggcguccagcggcucugcuuguucgugugugugucguugcaggccuuauucaagcuuaccaugggccagaucgugaccuucuuccaggaggugccccacgugaucgaggaggugaugaacaucgugcugaucgcccugagcauccuggccgugcugaagggccuguacaacuucgccaccugcggccuggugggccuggugaccuuccugcugcugugcggcagaagcugcaccaucagccuguacaagggcguguacgagcugcagacccuggagcugaacauggagacccugaacaugaccaugccccugagcugcaccaagaacaacagccaccacuacaucauggugggcaacgagaccggccuggagcugacccugaccaacaccagcaucaucaaccacaaguucugcaaccugagcgacgcccacaagaagaaccuguacgaccacgcccugaugagcaucaucagcaccuuccaccugagcauccccaacuucaaccaguacgaggccaugagcugcgacuucaacggcggcaagaucagcgugcaguacaaccugagccacagcuacgccggcgacgccgccaaccacugcggcaccguggccaacggcgugcugcagaccuucaugagaauggccuggggcggcagcuacaucgcccuggacagcggcagagacagaugggacugcaucaugaccagcuaccaguaccugaucauccagaacaccaccugggaggaccacugccaguucagcagacccagccccaucggcuaccugggccugcugagccagagaaccagagacaucuacaucagcagaagacugcugggcaccuucaccuggacccugagcgacagcgagggcaaggacacccccggcggcuacugccugaccagauggaugcugaucgaggccgagcugaagugcuucggcaacaccgccguggccaagugcaacgagaagcacgacgaggaguucugcgacaugcugagacuguucgacuucaacaagcaggccauccagagacugaaggccgaggcccagaugagcauccagcugaucaacaaggccgugaacgcccugaucaacgaccagcugaucaugaagaaccaccugagagacaucaugggcauccccuacugcaacuacagcaaguacugcuaccugaaccacaccaccaccggcaagaccagccugcccaagugcugccuggugagcaacggcagcuaccugaacgagacccacuucagcgacgacaucgagcagcaggccgacaacaugaucaccgagaugcugcagaaggaguacauggagagacagggcaagaccccccugggccugguggaccuguucguguucagcaccagcuucuaccugaucagcaucuuccugcaccuggugaagauccccacccacagacacaucgugggcaagcccugccccaagccccacagacugaaccacaugggcaucugcagcugcggccuguacaagcagcccggcgugcccgugaaguggaagagaugaggacuagucccuguucccagagcccacuuuuuuuucuuuuuuugaaauaaaauagccugucuuucagaucuaaaaaaaaaaaaaaaaaaaaaaaaaaaaaaaaaaaaaaaaaaaaaaaaaaaaaaaaaaaaaaaaaaaaaaaaaaaaaaaaaaaaaaaaaaaaaaaaaaaa

SEQ ID NO: 38725 - RNA, 1724 nt, Artificial Sequence
  mRNA product Design a-1 (A100) comprising derived and/or modified sequence from LASV(Josiah;Clade IV)__NP_694870__GPCmut11 (opt5)
aggagagucccgcagucggcguccagcggcucugcuuguucgugugugugucguugcaggccuuauucaagcuuaccaugggccagaucgugaccuucuuucaagaggucccccacguuauugaagaggugaugaacaucgugcugauugcccucagcguccuggcugugcuuaaggggcuguacaauuucgccacaugcggacucguuggccuggugacguuucuucugcucugugggagauccugcaccacaucucuguauaaaggagucuacgaacugcagacccucgagcugaacauggaaacacuuaauaugaccaugccucugagcuguacaaagaacaauucccaucacuauaucauggugggcaacgagaccgggcucgagcugacgcuuaccaauacaucuauuaucaaccauaaauucugcaaucugagcgacgcgcacaagaaaaaccucuacgaucaugcucugauguccaucauuucuaccuuucaccugagcaucccgaauuucaaccaguaugaagccauguccugugacuuuaauggaggcaagauuagcguucaguacaaccucucucacuccuaugccggcgaugcugccaaucauugcgggacaguggcuaacggaguccugcaaaccuucaugcggauggccuggggcgggagcuacaucgcgcuugacucuggacgcggcaacugggauuguauuaugacguccuaccaguaucugaucauucagaauacaaccugggaggaccacugccaguuuagcagacccucuccuaucggguaccucggacugcuuucccaacggacacgcgauaucuauauuagcagacggcugcucggcaccuucaccuggacacuguccgacucugaaggcaaggauacgcccgggggauacugucugacccgcuggaugcucaucgaggccgagcugaaaugcuuuggcaacacagcuguggccaaguguaaugaaaaacaugacgaggaguucugcgauaugcuuagacuguuugacuucaacaagcaggcuauucagcggcucaaagccgaagcgcagaugagcauccaacugauuaauaaggccgugaacgcucuuaucaaugaucagcugaucaugaagaaccaccuccgcgacauuauggggaucccuuauugcaauuacuccaaauauuguuaccugaaccacaccacaaccggaagaacgagccugcccaagugcugucucgucucuaauggcuccuaccugaacgaaacacauuucagcgacgauauugagcagcaagccgacaauaugaucaccgagaugcuucagaaagaauauauggagcggcaggggaagaccccucugggacucguugaucuguuuguguucucuaccagcuuuuaccugauuuccaucuuccuucaccucgugaaaaucccgacacaucgccacauugucggcaagucuugccccaaaccucauagacugaaccacaugggcaucuguagcugcgggcuguauaagcagcccggagugccuguuaaguggaaacggugaggacuagucccuguucccagagcccacuuuuuuuucuuuuuuugaaauaaaauagccugucuuucagaucuaaaaaaaaaaaaaaaaaaaaaaaaaaaaaaaaaaaaaaaaaaaaaaaaaaaaaaaaaaaaaaaaaaaaaaaaaaaaaaaaaaaaaaaaaaaaaaaaaaaa

SEQ ID NO: 38726 - RNA, 1721 nt, Artificial Sequence
  mRNA product Design a-1 (A100) comprising derived and/or modified sequence from LASV(LP;Clade I)__AAF86701__GPCmut11 (opt5)
aggagagucccgcagucggcguccagcggcucugcuuguucgugugugugucguugcaggccuuauucaagcuuaccaugggccagaucauuaccuucuuucaagaggugccccacgucaucgaagagguuaugaacauugugcugaucgcccucagccugcuugcuauucugaaggggcucuacaauaucgccacaugcggaaucauuggccugguggcguuccuuuuucugugugggaaauccugcucucucacgcugaagggaggcuaugaacugcagacccucgagcugaacauggaaacacuuaauaugaccaugccucugagcuguaccaaaaacuccucucaucacuacaucagagucgggaaugagacaggacucgagcugacacuuaccaacacgagcauuaucaaucauaaguucugcaaccuguccgacgcucacaaaaagaaucucuaugaucaugcccugaugucuauuaucagcaccuuucaccuguccauuccgaacuucaaucaguacgaagccaugagcugugacuuuaacggcggcaagaucucugugcaguauaaucucucccacagcuacgcuggggaugccgcugagcauugcggaacaguugccaacggcgugcugcaaaccuucaugcggauggcguggggagggcgcuauaucgcccuugacucuggcaaagggaauugggauuguauuaugacauccuaccaguaccugaucauucagaacaccacgugggaagaccacugccaguuuagcagacccucuccuaucggauaucucggccugcuuucccaacggacacgcgauauuuacaucagcagacggcugcucggcaccuucacauggacccuguccgacucugaggggaacgagacccccggaggcuauugucugacacgcuggaugcucaucgaagcugagcugaagugcuuugggaauacggccgucgcuaaauguaacgaaaagcaugaugaggaguucugcgacaugcuuagacuguuugauuucaauaaacaggccauucggcgccucaaggcggaagcccagaugagcauccagcugauuaacaaggcugugaaugcccuuaucaacgaccaacugauuaugaaaaaucaccucagagauaucaugggaaucccuuacugcaacuauuccaaguacuguuaucugaaucacaccagcucuggccggacaucccugcccaaaugcugucucauuagcaacgggucuuaccugaaugagacccaguucagcgacgacaucgaacagcaagcugauaacaugauuacagagaugcuucagaaggaauacaucgagcgccagggaaaaaccccucugggccucguugacauuuuuaucuucuccacgucuuuuuaucugauuagcaucuuccugcaucuuaucaagauuccgacacacagacauaucgugggcaaacccugcccuaagccccaccggcucaaucauaugggggucuguuccugcggacuguacaagcacccuggcgugcccaccaaauggaagcgcugaggacuagucccuguucccagagcccacuuuuuuuucuuuuuuugaaauaaaauagccugucuuucagaucuaaaaaaaaaaaaaaaaaaaaaaaaaaaaaaaaaaaaaaaaaaaaaaaaaaaaaaaaaaaaaaaaaaaaaaaaaaaaaaaaaaaaaaaaaaaaaaaaaaaa

SEQ ID NO: 38727 - RNA, 1721 nt, Artificial Sequence
  mRNA product Design a-1 (A100) comprising derived and/or modified sequence from LASV(803213;Clade II)__AAF86703__GPCmut11 (opt5)
aggagagucccgcagucggcguccagcggcucugcuuguucgugugugugucguugcaggccuuauucaagcuuaccaugggccagaucauuaccuucuuucaagaggugccccacgucaucgaagagguuaugaacauugugcugaucgcccucagccugcuugcuauucugaaggggaucuacaauguggccacaugcggacucuucggccugaucuccuuucuucugcucugugggagaucuugcagcgucacguauaaaggaguguacgaacugcagacccuggagcucaacauggcgaaucugaacaugacaaugccucuuuccuguaccaagaauaacucucaucacuauauuaugguuggcaaugaaacagggcuggagcucacccugacaaacaccagcaucauuaaucauaaauucugcaaccuuuccgacgcucacaagaaaaaucuguacgaucaugcccucaugucuaucauuagcacguuucaccuguccaucccgaacuucaaucaguaugaggccaugagcugugacuuuaacggaggcaagauuucugugcaguacaaucugucccacagcuucgcugucgaugccgcuaaccauugcggcaccaucgccaacggggugcuccaaacauuuaugcggauggcguggggaggcucuuauaucgcccuggacuccgggaagggaaauugggauuguauuaugaccagcuaccaguaccuuaucauucagaacacaaccugggaagaccacugccaguucucucgccccuccccuaucggcuaucuggggcuccugagccaaagaacgcgggauauuuacaucucccgcagacuucugggaacauuuaccuggacacucucugacagcgagggcaaugaagcucccggcggguauugucugacccgguggaugcugaucgaggccgagcucaaaugcuucggaaacaccgcuguugccaaguguaaugaaaaacaugaugaggaauuuugcgacaugcugcgccuuuucgauuucaacaagcaggcgauuaaaagacugaagacagaggcccagauguccauccagcucauuaauaaggcugugaacgcccugaucaaugaccaacuuauuaugaaaaaccaucugcgggauaucaugggcaucccuuacugcaauuauagccgcuacuguuaucucaaccacacggucaccgggaagacaucucugcccagaugcugucugguguccaauggaagcuaccucaacgaaacccacuuuucugacgacauugagcagcaggcugauaauaugaucacagagaugcugcaaaaagaauacauggaccggcagggcaagaccccucuugggcugguggaucucuucgucuuuagcacguccuucuaucugauuucuaucuuucugcaccuuguuaaaauuccgacacaucgccacaucgugggaaagcccugcccuaaaccccauagacucaaccacaugggcauuuguagcugcggccuguacaagcacccuggggugcccgucaaguggaaacggugaggacuagucccuguucccagagcccacuuuuuuuucuuuuuuugaaauaaaauagccugucuuucagaucuaaaaaaaaaaaaaaaaaaaaaaaaaaaaaaaaaaaaaaaaaaaaaaaaaaaaaaaaaaaaaaaaaaaaaaaaaaaaaaaaaaaaaaaaaaaaaaaaaaaa

SEQ ID NO: 38728 - RNA, 1721 nt, Artificial Sequence
  mRNA product Design a-1 (A100) comprising derived and/or modified sequence from LASV(GA391;Clade III)__CAA36645__GPCmut11 (opt5)
aggagagucccgcagucggcguccagcggcucugcuuguucgugugugugucguugcaggccuuauucaagcuuaccaugggccagaucgugaccuucuuucaagaggucccccacguuauugaagaggugaugaacaucgugcugauugcccucagcauccuggcuauucuuaaggggcuguacaaugucgccacaugcggacucaucggccuggugacguuccuucugcucuccgggagaucuuguagccugaucuauaaaggaaccuacgaacugcagacacucgagcugaacauggaaacccuuaauaugacaaugccucuguccugcaccaagaacaauucucaucacuauauucggguuggcaacgagacagggcucgagcugacccuuacgaauaccagcauccugaaccauaaauuuuguaaucucuccgacgcgcacaagcgcaaccuguacgaucauucucugaugagcauuaucuccacauuccaccucagcauuccgaauuuuaaccaguaugaagcuaugucuugcgacuucaauggaggcaaaaucaccgugcaguacaaccugucccacagcuuugccgucgaugccgcuggccauugugggacacuugccaauggagugcugcaaaccuucaugagaauggcuuggggcgggucuuauauugcccucgacuccggacggggcaacugggauugcaucaugacgagcuaccaguaccugaucauucagaacacaaccugggacgaucacugucaguuuucucgccccuccccuaucggguaucuuggacugcucagccaaagaacacgggacauuuacaucucccgcagacugcugggcaccuucaccuggacacucucugauagcgagggcaaugaaacgcccgggggauauugccugacccgguggaugcuuauugaggcggagcugaaguguuuuggcaacacagccguugcuaagugcaaugaaaaacaugacgaggaguucugugauaugcuccgccuguuugacuucaacaagcaggccaucagacggcuuaaaaccgaagcucagauguccauccagcugauuaauaaggccgugaacgcgcucaucaaugaucaacugauuaugaaaaaccaucugcgcgacaucauggggauuccuuacugcaauuauagcagauacugcuaucucaaccacacaucuaccggaaagacgucccugccccgguguugccuuaucagcaauggcucuuaccugaacgaaacaaaguucagcgacgauaucgagcagcaggccgacaauaugauuaccgagaugcuccaaaaagaauacaucgaucgccaggggaagaccccucugggacuggucgaccuuuuuguguucuccacaucuuuuuaucucauuagcaucuuccugcaccuggugaaaauuccgacccacagacauaucgucggcaagcccuguccuaaaccccaccggcucaaccauaugggcauuugcuccugugggcuguacaagcagccuggaguucccgugagauggaaacgcugaggacuagucccuguucccagagcccacuuuuuuuucuuuuuuugaaauaaaauagccugucuuucagaucuaaaaaaaaaaaaaaaaaaaaaaaaaaaaaaaaaaaaaaaaaaaaaaaaaaaaaaaaaaaaaaaaaaaaaaaaaaaaaaaaaaaaaaaaaaaaaaaaaaaa

SEQ ID NO: 38729 - RNA, 1724 nt, Artificial Sequence
  mRNA product Design a-1 (A100) comprising derived and/or modified sequence from LASV(AV;Clade V)__CCA30314__GPCmut11 (opt5)
aggagagucccgcagucggcguccagcggcucugcuuguucgugugugugucguugcaggccuuauucaagcuuaccaugggccagaucgugaccuucuuucaagaggucccccacguuauugaagaggugaugaacaucgugcugauugcccucagcauccuggcuguccuuaaggggcuguacaauauugccacaugcggacucaucggccugaucacguuccuucugcucugugggagauccugcucuagcaaccuguauaaaggaguguacgaacugcagucccucgaccugaauauggagacccuuaacaugacaaugccucugucuuguaccaagaauaacagccaucacuauauucggguuggcaaugauacagggcucgaacugacccuuacaaacaccuccauccugaaucauaaauuuugcaaccucucugacgcgcacaagaaagaucuguacgaccaugcucugaugagcauuaucuccacguuccaccucagcauuccgaauuuuaaccaguaugaggccaugucuugugauuucaauggaggcaagaucuccgugcaguacaaccugagccacucuuaugccauugacgcugccaaucauugcggcaccgucgcuaacgggauccuucaaacauuuaugcgcauggccuggggaggcuccuacaucgcgcuggauagcgggagaggaaacugggacuguauuaugaccucuuaccaguaucucaucauucagaauacaaccugggagaaccacugccaguucucccggcccagcccuaucggcuaccuggggcuucugucccaacgcacgagagauauuuauaucucucggcgccuccugggaacauuuaccuggacacugagcgacuccgaaggcaaugccacccccggcggguacugucucaccagauggaugcugaucgaggcugaacuuaagugcuucggaaacacagccguggcuaaauguaaugagaagcaugaugaggaauuuugcgacaugcugcgccucuucgauuuuaacaaacaggccauuagccggcugaagucugaggcgcagauguccauccagcuuauuaauaaagccguuaacgcucugaucaaugaccaacucauuaugaagaaccaccugagagacaucaugggcaucccuuauugcaauuacagcaaguauuguuaccugaaccacacgauuaccgggaaaacaucucuccccaagugcugucuggugagcaauggauccuaccuuaacgaaacccauuucucugaugacaucgagcagcaggccgauaauaugauuacagaaaugcugcaaaaagaguauauggagcggcagggcaagaccccucucgggcuggucgaccuguucguguuuagcacguccuucuaccuuaucagcauuuuucuccgccuggugaaaaucccgacacacagacauauugucggaaagcccugcccuaaaccccaccggcugaaccauaugggcaucuguucuugcggccucuauaagcagccugggguucccgugcgcuggaagagaugaggacuagucccuguucccagagcccacuuuuuuuucuuuuuuugaaauaaaauagccugucuuucagaucuaaaaaaaaaaaaaaaaaaaaaaaaaaaaaaaaaaaaaaaaaaaaaaaaaaaaaaaaaaaaaaaaaaaaaaaaaaaaaaaaaaaaaaaaaaaaaaaaaaaa

SEQ ID NO: 38730 - RNA, 1721 nt, Artificial Sequence
  mRNA product Design a-1 (A100) comprising derived and/or modified sequence from LASV(Togo/2016/7082;Clade VI)__AMR44577__GPCmut11 (opt5)
aggagagucccgcagucggcguccagcggcucugcuuguucgugugugugucguugcaggccuuauucaagcuuaccaugggccagaucauuaccuucuuucaagaggugccccacgucaucgaagagguuaugaacauugugcugaucgcccucagccugcuugcuauucugaaggggguguacaaugucgccacaugcggaaucaucggccucgugacguuccuguuucuuugugggagauccugcucucugauuuauaaaggaagcuacgaacuccagacccuggagcugaacauggaaacacucaauaugaccaugccucuguccuguacaaagaacucuagccaucacuauauccggguuggcaaugagaccgggcuugagcugacacucaccaacacguccauuaucaaucauaaauucugcaaccugucugacgcgcacaagcgcaaucuuuacgaucaugcucugaugagcauucucuccaccuuucaccugagcaucccgaacuucaaucaguaugaagccaugucuugugacuuuaacggaggcaaaauuuccgugcaguacaaucugagccacgccuaugcugucgaugccgcugagcauugcggcacaguggccaacgggguucuccaaaccuucaugagaauggcguggggaggcucuuacaucgcccuggacuccgggcggggaaauugggauuguaucaugacaagcuaccaguaucuuauuauccagaacaccacgugggaagaccacugccaguuuucucgccccuccccuauuggcuaccuggggcuccugagccaaagaacacgggauaucuauauuucccgcagacuucugggaaccuucacauggacccucucugacagcgagggcaacgagacccccggcggguacugucugacacgguggaugcugaucgaagcugagcucaagugcuuuggaaauacggccguggcuaaguguaacgaaaaacaugaugaggaguucugcgacaugcugcgccuuuuugauuucaauaagcaggccauccagagacugaaauccgaagcgcagaugagcauucaacucaucaacaaggccgucaaugcucugauuaacgaccagcuuaucaugaaaaaucaucugcgggauaugaugggcauuccuuauugcaacuacucuaaguauuguuaccucaaucacaccuccagcgggcgcacaucucugcccaagugcugucuggugagcaacggauccuaccucaaugagacccacuucucugacgacaucgaacagcaagccgauaacaugaucacagagaugcugcagaaagaauauauugacagacagggcaagaccccucuugggcugguggaucucuuugucuucagcacguccuuuuaccugaucagcauuuuccugcaccuuaucaaaauuccgacacaucggcacaucguuggaaagcccugcccuaaaccccaucgccucaaucacaugggcauuuguucuugcggccuguauaagcagccuggggugcccaccagauggaaacggugaggacuagucccuguucccagagcccacuuuuuuuucuuuuuuugaaauaaaauagccugucuuucagaucuaaaaaaaaaaaaaaaaaaaaaaaaaaaaaaaaaaaaaaaaaaaaaaaaaaaaaaaaaaaaaaaaaaaaaaaaaaaaaaaaaaaaaaaaaaaaaaaaaaaa

SEQ ID NO: 38731 - RNA, 1721 nt, Artificial Sequence
  mRNA product Design a-1 (A100) comprising derived and/or modified sequence from LASV(KAK-428;Clade n.d. (VII))__ANH09740__GPCmut11 (opt5)
aggagagucccgcagucggcguccagcggcucugcuuguucgugugugugucguugcaggccuuauucaagcuuaccaugggccagaucgugaccuucuuucaagaggucccccacguuauugaagaggugaugaacaucgugcugauugcccucagccugcuugcuauccugaaggggcucuacaauuucgccacaugcggagucauuggccugaucacguuucuucugcucugugggagauccugcucugcgaccuauaaaggacaguacgaacugcagacacuggagcucaacauggaaagccugaauaugaccaugccucuuuccuguacaaagaacaauucucaucacuauauccgggcuggcaacaauaccgggcuggagcucacacugaccaacacgagcauuaucucccauaaauucugcaaucuuucugacgcccacaagaaaaaccuguacgaucauacccucaugagcauuaucacaaccuuucaccuguccauuccgaauuucaaccaguaugaggccaugagcugugacuuuaauggaggcaagaucucuauucaauacaaccugucccacagcuaugcuggcgaugccgcucagcauugcgggacaguggccaauggaguucuccagaccuucaugcgcauggcguggggcgggucuuaccuggcccuugacuccggaagacggggcugggauuguaucaucagcucuuaccaguaucugauuauccaaaacacgacaugggacgaucacugccaguuuucccgccccagcccuauuggguaccucggauucgugucccagaagaccagagacaucuauauuucucggcgccugcuuggcacauuuaccuggacccugagcgauuccgaaggccaugacaugcccgggggauacugucucacaagauggaugcugaucgaggcugaucugaaaugcuucggcaacacggccgucgcuaaguguaaugaaaaacacgacgaggaguuuugcgauauguggcgccucuucgacuucaacaagcaggccauccaacggcugaaagcggaagcccagaugaauauucagcuuaucaacaaggcugugaaugcccugauuaacgaccaacucaugaugaagaaucaccugagagauaucauggggauuccuuauugcaacuacagcaaauuuuguuaucuuaauaacaccacaaccggacggacaucucugccccgcugcugucucaucuccaauggcagcuaccugaacgagacccauuucucugacgauaucgaacagcaggcugacaauaugauuacggagaugcugcagaaggaauacauggauagacaagggaaaacaccucucggacugguugaccuuuuuguguucagcaccuccuuuuaucugaucaccauuuuccuccaccuggucaagaucccgacacaucggcacauugugggcaaacccugcccuaagccccaucgccugaaccacaugggcaucuguucuugcgggcuuuacaaacagccuggagugcccgucagauggaagcggugaggacuagucccuguucccagagcccacuuuuuuuucuuuuuuugaaauaaaauagccugucuuucagaucuaaaaaaaaaaaaaaaaaaaaaaaaaaaaaaaaaaaaaaaaaaaaaaaaaaaaaaaaaaaaaaaaaaaaaaaaaaaaaaaaaaaaaaaaaaaaaaaaaaaa

SEQ ID NO: 38732 - RNA, 1721 nt, Artificial Sequence; identical to SEQ ID NO: 38726
  mRNA product Design a-1 (A100) comprising derived and/or modified sequence from LASV(Pinneo-NIG-1969;Clade I)__AIT17836__GPCmut11 (opt5)

SEQ ID NO: 38733 - RNA, 1721 nt, Artificial Sequence
  mRNA product Design a-1 (A100) comprising derived and/or modified sequence from LASV(ISTH0009-NIG-2011;Clade II)__AIT17404__GPCmut11 (opt5)
aggagagucccgcagucggcguccagcggcucugcuuguucgugugugugucguugcaggccuuauucaagcuuaccaugggccagaucauuaccuucuuucaagaggugccccacgucaucgaagagguuaugaacauugugcugaucgcccucagccugcuugcuauucugaaggggaucuacaauguggccacaugcggacucuucggccuggucuccuuucuucugcucugugggagaucuugcagcacgaccuauaaaggaguguacgaacugcagacacuggagcucgacauggcgucccugaacaugaccaugccucuuucuuguacaaagaauaacagccaucacuauaucaugguuggcaaugaaaccgggcuggagcucacacugaccaacacguccauuaucaaucauaaauucugcaaccuuucugaugcucacaagaaaaaucuguacgaccaugcccucaugagcauuaucuccaccuuucaccugagcauuccgaacuucaaucaguaugaggccaugucuugugauuuuaacggaggcaagaucuccgugcaguacaaucugagccacgcuuaugccgucgacgcugccaaccauugcggcacaauugcgaauggggugcuccaaaccuucaugcggauggccuggggaggcucuuacaucgcucuggauuccgggaagggaagcugggacuguaucaugacaucuuaccaguaucuuauuauccagaacaccacgugggaagaucacugccaguuuucccgccccagcccuauuggcuaccuggggcuccugucccaaagaacacgggacaucuauauuucucgcagacuucugggaaccuucacauggacccucagcgauuccgagggcaacgaaacccccggcggguacugucugacacgguggaugcugaucgaggccgagcucaaaugcuuuggaaauacggcuguugccaaguguaacgaaaaacaugacgaggaguucugcgauaugcugcgccuuuuugacuucaauaagcaggcgaucagacggcugaaaaccgaagcccagaugagcauucagcucaucaacaaggcugugaaugcccugauuaacgaucaacuuaucaugaagaaucaucugcgcgacauuaugggcaucccuuauugcaacuacucuaaauauuguuaccucaaucacacagucaccgggaagacaucccugcccagaugcugucuggugagcaacggaucuuaccucaaugaaacccacuucagcgacgauaucgagcagcaggcugacaacaugauuacggagcugcuucaaaaagaauauauggaucggcagggcaagacaccucuggggcucguggaccuguuugucuucuccaccucuuuuuaccugaucagcauuuuccuucaccucaucaaaauuccgacccaucgccacaucacaggaaagcccugcccuaaaccccauagacugaaucacaugggcauuuguuccugcggccuguauaagcacccugggguucccgugaaguggaaacggugaggacuagucccuguucccagagcccacuuuuuuuucuuuuuuugaaauaaaauagccugucuuucagaucuaaaaaaaaaaaaaaaaaaaaaaaaaaaaaaaaaaaaaaaaaaaaaaaaaaaaaaaaaaaaaaaaaaaaaaaaaaaaaaaaaaaaaaaaaaaaaaaaaaaa

SEQ ID NO: 38734 - RNA, 1721 nt, Artificial Sequence
  mRNA product Design a-1 (A100) comprising derived and/or modified sequence from LASV(ISTH2010-NIG-2012;Clade II)__AIT17482__GPCmut11 (opt5)
aggagagucccgcagucggcguccagcggcucugcuuguucgugugugugucguugcaggccuuauucaagcuuaccaugggccagaucauuaccuucuuucaagaggugccccacgucaucgaagagguuaugaacauugugcugaucgcccucagccugcuugcuauucugaaggggaucuacaauguggccacaugcggacucuucggccuggucuccuuucuucugcucugugggagaucuugcagcacgaccuauaaaggaguguacgaacugcagacacuggagcucgacauggcgucccugaacaugaccaugccucuuucuuguacaaagaauaacagccaucacuauaucaugguuggcaaugaaaccgggcuggagcucacacugaccaacacguccauuaucaaucauaaauucugcaaccuuucugaugcucacaagaaaaaucuguacgaccaugcccucaugagcauuaucuccaccuuucaccugagcauuccgaacuucaaucaguaugaggccaugucuugugauuuuaacggaggcaagaucuccgugcaguacaaucugagccacgcuuaugccgucgacgcugccaaccauugcggcacaauugcgaauggggugcuccaaaccuucaugcggauggccuggggaggcucuuacaucgcucuggauuccgggaagggaagcugggacuguaucaugacaucuuaccaguaucuuauuauccagaacauuaccugggaagaucacugccaguuuucccgccccagcccuaucggcuaccuggggcuccugucccaaagaacgcgggacauuuauaucucucgcagacuucugggaacauucaccuggacacucagcgauuccgagggcaacgaaacccccggcggguacugucugacccgguggaugcugaucgaggccgagcucaaaugcuuuggaaauacagcuguugccaaguguaacgaaaaacaugacgaggaguucugcgauaugcugcgccuuuuugacuucaauaagcaggcgauuagacggcugaaaacggaagcccagaugagcauccagcucauuaacaaggcugugaaugcccugaucaacgaucaacuuauuaugaagaaucaucugcgcgacaucaugggcaucccuuauugcaacuacucuaaauauuguuaccucaaucacaccgucacagggaagaccucccugcccagaugcugucuggugagcaacggaucuuaccucaaugaaacacacuucagcgacgauauugagcagcaggcugacaacaugaucaccgagcugcuucaaaaagaauauauugaucggcagggcaagacgccucuggggcucguggaccuguuugucuucuccacaucuuuuuaccugaucagcauuuuccuucaccucguuaaaaucccgacccaucgccacguggugggaaagcccugcccuaaaccccauagacugaaucacaugggcauuuguuccugcggccuguauaagcacccugggguccccgugaaguggaaacggugaggacuagucccuguucccagagcccacuuuuuuuucuuuuuuugaaauaaaauagccugucuuucagaucuaaaaaaaaaaaaaaaaaaaaaaaaaaaaaaaaaaaaaaaaaaaaaaaaaaaaaaaaaaaaaaaaaaaaaaaaaaaaaaaaaaaaaaaaaaaaaaaaaaaa

SEQ ID NO: 38735 - RNA, 1721 nt, Artificial Sequence
  mRNA product Design a-1 (A100) comprising derived and/or modified sequence from LASV(Lassa virus/H.sapiens-wt/NGA/2015/ISTH_0543;Clade II)__AVO03639__GPCmut11 (opt5)
aggagagucccgcagucggcguccagcggcucugcuuguucgugugugugucguugcaggccuuauucaagcuuaccaugggccagaucauuaccuucuuucaagaggugccccacgucaucgaagagguuaugaacauugugcugaucgcccucagccugcuugcuauucugaaggggaucuacaauguggccacaugcggacucuucggccuggucuccuuucuucugcucugugggagaucuugcagcacgaccuauaaaggaguguacgaacugcagacacuggagcucgacauggcgaaccugaauaugaccaugccucuuuccuguacaaagaacaauucucaucacuauaucaugguuggcaacgaaaccgggcuggagcucacacugaccaauacgagcauuaucaaccauaaauucugcaaucuuuccgaugcucacaagaaaaaccuguacgaccaugcccucaugucuauuaucagcaccuuucaccuguccauuccgaauuucaaccaguaugaggccaugagcugugauuuuaauggaggcaagaucucugugcaguacaaccugucccacacauaugcugucgacgccgcuaaucauugcggcaccauugccaacggggugcuccaaacauucaugcggauggcguggggaggcagcuacaucgcccuggauucugggaagggauccugggacuguaucaugaccagcuaccaguaucuuguuauucagaacacgacaugggaagaucacugccaguuuucucgccccuccccuaucggcuaccuggggcuccugagccaaagaacccgggacauuuauaucucccgcagacuucugggaacauucaccuggacccucucugauagcgagggcaaugaaacacccggcggguacugucugacgcgguggaugcugauugaggcugagcucaaaugcuuuggaaacaccgccguggcuaaguguaaugaaaaacaugacgaggaguucugcgauaugcugcgccuuuuugacuucaacaagcaggccaucagacggcugaaaacagaagcgcagauguccauccagcucauuaauaaggccgucaacgcucugaucaaugaucaacuuauuaugaagaaccaucugcgcgacaucaugggcauuccuuauugcaauuacagcaaauauuguuaccucaaccacaccgugacagggaagaccucucugcccagaugcugucugguguccaauggaagcuaccucaacgaaacgcacuucucugacgauaucgagcagcaggccgacaauaugaucacagagcugcuucaaaaagaauauauugaucggcagggcaagaccccucuggggcucgucgaccuguuuguuuucagcaccuccuuuuaccugaucucuauuuuccuucaccucgugaaaaucccgacacaucgccacauuaccggaaagcccugcccuaaaccccauagacugaaccacaugggcaucuguagcugcggccuguauaagcacccuggggugcccgucaaguggaaacggugaggacuagucccuguucccagagcccacuuuuuuuucuuuuuuugaaauaaaauagccugucuuucagaucuaaaaaaaaaaaaaaaaaaaaaaaaaaaaaaaaaaaaaaaaaaaaaaaaaaaaaaaaaaaaaaaaaaaaaaaaaaaaaaaaaaaaaaaaaaaaaaaaaaaa

SEQ ID NO: 38736 - RNA, 1721 nt, Artificial Sequence
  mRNA product Design a-1 (A100) comprising derived and/or modified sequence from LASV(Lassa virus/H.sapiens-wt/NGA/2016/ISTH_0009;Clade II)__AVO03571__GPCmut11 (opt5)
aggagagucccgcagucggcguccagcggcucugcuuguucgugugugugucguugcaggccuuauucaagcuuaccaugggccagaucauuaccuucuuucaagaggugccccacgucaucgaagagguuaugaacauugugcugaucgcccucagccugcuugcuauucugaaggggaucuacaauguggccacaugcggacuccugggccuugucuccuuccugcuccugugugggagaucuugcagcacgaccuauaaaggaguguacgaacugcagacacucgagcuggacauggcgucccuuaacaugaccaugccucugucuuguacaaagaauaacagccaucacuauaucaugguuggcaaugaaaccgggcucgagcugacacuuaccaacacguccauuaucaaucauaaauuuugcaaccugucugaugcucacaagaaaaaucucuacgaccaugcccugaugagcauuaucuccaccuuccaccugagcauuccgaacuuuaaucaguaugaggccaugucuugugauuucaacggaggccggaucuccgugcaguacaaucucagccacucuuaugcugucgacgccgcuaaccauugcggcacaauugccaauggggugcugcaaaccuuuaugcgcauggcguggggaggcuccuacaucgcccuugauagcgggaagggaucuugggacuguaucaugacauccuaccaguaucugauuauccagaacaccacgugggaagaucacugccaguucagcagacccuccccuauuggcuaccucgggcugcuuucucaacggacacgcgacaucuauauuagcagacggcugcucggaaccuuuacauggacccuguccgauagcgagggcaacgaaacccccggcggguacugucugacacgcuggaugcucaucgaggcugagcugaagugcuucggaaauacggccguugcuaaauguaacgaaaagcaugacgaggaauuuugcgauaugcuuagacuguucgacuuuaauaaacaggccauccggcgccucaagaccgaggcgcagaugucuauucagcugaucaacaaagccgugaaugcucuuauuaacgaucaacugaucaugaagaaucaccucagagacauuaugggcaucccuuauugcaacuacuccaaguauuguuaccugaaucacacagucaccgggaaaacaagccugccccggugcugucucgugucuaacggaagcuaccugaaugaaacccauuucuccgacgauaucgagcagcaggccgacaacaugauuacggagcuucugcaaaaggaauauaucgaucgccagggcaaaacaccucucgggcugguggaccuguucgucuuuucuaccagcuucuaccuuauuuccaucuuucuccaccugguuaagauuccgacccauagacacaucacaggaaaacccugcccuaagccccaucggcugaaucacaugggcauuuguagcugcggccucuauaaccacccuggggugcccgugaaauggaagcgcugaggacuagucccuguucccagagcccacuuuuuuuucuuuuuuugaaauaaaauagccugucuuucagaucuaaaaaaaaaaaaaaaaaaaaaaaaaaaaaaaaaaaaaaaaaaaaaaaaaaaaaaaaaaaaaaaaaaaaaaaaaaaaaaaaaaaaaaaaaaaaaaaaaaaa

SEQ ID NO: 38737 - RNA, 1721 nt, Artificial Sequence
  mRNA product Design a-1 (A100) comprising derived and/or modified sequence from LASV(Lassa virus/H.sapiens-wt/NGA/2016/ISTH_0017;Clade II)__AVO03567__GPCmut11 (opt5)
aggagagucccgcagucggcguccagcggcucugcuuguucgugugugugucguugcaggccuuauucaagcuuaccaugggccagaucauuaccuucuuucaagaggugccccacgucaucgaagagguuaugaacauugugcugaucgcccucagccugcuugcuauucugaaggggaucuacaauguggccacaugcggacucuucggccuggucuccuuucuucugcucugugggagaucuugcagcacgaccuauaaaggaguguacgaacugcagacacuggagcucgacauggcgucccugaacaugaccaugccucuuucuuguacaaagaauaacagccaucacuauaucaugguuggcaaugaaaccgggcuggagcucacacugaccaacacguccauuaucaaucauaaauucugcaaccuuucugaugcucacaagaaaaaucuguacgaccaugcccucaugagcauuaucuccaccuuucaccugagcauuccgaacuucaaucaguaugaggccaugucuugugauuuuaacggaggcaagaucuccgugcaguacaaucugagccacacauaugcuauugacgccgcuaaccauugcggcaccaucgccaaugggguccuccaaacauucaugcggauggcguggggaggcucuuacaucgcccuggauuccgggaagggaagcugggacuguauuaugaccucuuaccaguaucuuaucauucagaacacgacaugggaagaucacugccaguuuucccgccccagcccuaucggcuaccuggggcuccugucccaaagaacccgggacauuuauaucucucgcagacuucugggaacauucaccuggacccucagcgauuccgagggcaacgaaacacccggcggguacugucugacgcgguggaugcugaucgaggcugagcucaaaugcuuuggaaauaccgccguggcuaaguguaacgaaaaacaugacgaggaguucugcgauaugcugcgccuuuuugacuucaauaagcaggccauuagacggcugaaaacagaagcgcagaugagcauccagcucauuaacaaggccguuaaugcucugaucaacgaucaacuuauuaugaagaaucaucugcgcgacaucaugggcaucccuuauugcaacuacucuaaauauuguuaccucaaucacaccgugacagggaagaccucccugcccagaugcugucuggucagcaacggaucuuaccucaaugaaacgcacuucagcgacgauauugagcagcaggccgacaacaugaucacagagcugcuucaaaaagaauauauggaucggcagggcaagaccccucuggggcucguggaccuguuuguguucuccaccucuuuuuaccugauuagcaucuuccuucaccucguccgcauuccgacacauagacacguuaucggaaaacccugcccuaagccccaucggcugaaucacaugggcauuuguuccugcggccuguauaaacacccuggggugcccgugaaguggaagcgcugaggacuagucccuguucccagagcccacuuuuuuuucuuuuuuugaaauaaaauagccugucuuucagaucuaaaaaaaaaaaaaaaaaaaaaaaaaaaaaaaaaaaaaaaaaaaaaaaaaaaaaaaaaaaaaaaaaaaaaaaaaaaaaaaaaaaaaaaaaaaaaaaaaaaa

SEQ ID NO: 38738 - RNA, 1721 nt, Artificial Sequence
  mRNA product Design a-1 (A100) comprising derived and/or modified sequence from LASV(Lassa virus/H.sapiens-wt/NGA/2018/ISTH_0959;Clade II)__AVV65099__GPCmut11 (opt5)
aggagagucccgcagucggcguccagcggcucugcuuguucgugugugugucguugcaggccuuauucaagcuuaccaugggccagaucauuaccuucuuucaagaggugccccacgucaucgaagagguuaugaacauugugcugaucgcccucagccugcuugcuauucugaaggggaucuacaauguggucacaugcggacucuucggccugguguccuuucuucugcucugugggagaucuugcagcacgaccuauaaaggaguuuacgaacugcagacacuggagcucgacauggccucccugaacaugaccaugccucuuucuuguacaaagaauaacagccaucacuauaucauggugggcaaugaaaccgggcuggagcucacacugaccaacacguccauuaucaaucauaaauucugcaaccuuucugaugcgcacaagaaaaaucuguacgaccaugcucucaugagcauuaucuccaccuuucaccugagcauuccgaacuucaaucaguaugaggccaugucuugugauuuuaacggaggcaagaucuccguccaguacaaucugagccacgccuaugcuauugacgccgcuaaccauugcggcacaaucgccaauggggugcuccaaaccuucaugcggauggcguggggaggcucuuacaucgcccuggauuccgggaagggaagcugggacuguauuaugacaucuuaccaguaucuuaucauucagaacaccacgugggaagaucacugccaguuuucccgccccagcccuaucggcuaccuggggcuccugucccaaagaacacgggacauuuauaucucucgcagacuucugggaaccuucacauggacccucagcgauuccgagggcaacgaaacccccggcggguacugucugacacgguggaugcugaucgaggcugagcucaaaugcuuuggaaauacggccguugcuaaguguaacgaaaaacaugacgaggaguucugcgauaugcugcgccuuuuugacuucaauaagcaggccauuagacggcugaaaaccgaagcgcagaugagcauccagcucauuaacaaggccgugaaugcucugaucaacgaucaacuuauuaugaagaaucaucugcgcgacaucaugggcaucccuuauugcaacuacucuaaauauuguuaccucaaucacacagucaccgggaagacaucccugcccagaugcugucuggugagcaacggaucuuaccucaaugaaacccacuucagcgacgauauugagcagcaggccgacaacaugaucacggagcugcuucaaaaagaauauauugaucggcagggcaagacaccucuggggcucguggaccuguuugucuucuccaccucuuuuuaccugaucagcauuuuccuucaccucguuaaaaucccgacccaucgccacgugauuggaaagcccugcccuaaaccccauagacugaaucacaugggcaucuguuccugcggccuguauaagcacccuggggugcccgucaaguggaaacggugaggacuagucccuguucccagagcccacuuuuuuuucuuuuuuugaaauaaaauagccugucuuucagaucuaaaaaaaaaaaaaaaaaaaaaaaaaaaaaaaaaaaaaaaaaaaaaaaaaaaaaaaaaaaaaaaaaaaaaaaaaaaaaaaaaaaaaaaaaaaaaaaaaaaa

SEQ ID NO: 38739 - RNA, 1721 nt, Artificial Sequence
  mRNA product Design a-1 (A100) comprising derived and/or modified sequence from LASV(LASV003-NIG-2008;Clade II)__AIT17580__GPCmut11 (opt5)
aggagagucccgcagucggcguccagcggcucugcuuguucgugugugugucguugcaggccuuauucaagcuuaccaugggccagaucauuaccuucuuucaagaggugccccacgucaucgaagagguuaugaacauugugcugaucgcccucagccugcuugcuauucugaaggggaucuacaauguggccacaugcggacucuucggccuggucuccuuucuucugcucugugggagaucuugcagcacgaccuauaaaggaguguacgaacugcagacacuggagcucgacauggcgucccugaacaugaccaugccucuuucuuguacaaagaauaacagccaucacuauaucaugguuggcaaugaaaccgggcuggagcucacacugaccaacacguccauuaucaaucauaaauucugcaaccuuucugaugcucacaagaaaaaucuguacgaccaugcccucaugagcauuaucuccaccuuucaccugagcauuccgaacuucaaucaguaugaggccaugucuugugauuuuaacggaggcaagaucuccgugcaguacaaucugagccacacauaugcugucgacgccgcuaaccauugcggcaccauugccaauggggugcuccaaacauucaugcggauggcguggggaggcucuuacaucgcccuggauuccgggaagggaagcugggacuguaucaugaccucuuaccaguaucuuauuauccagaacacgacaugggaagaucacugccaguuuucccgccccagcccuauuggcuaccuggggcuccugucccaaagaacccgggacaucuauauuucucgcagacuucugggaacauucaccuggacccucagcgauuccgagagcaacgaaacacccggcggcuacugucugacgcgguggaugcugaucgaggcugagcucaaaugcuuugggaauaccgccguugcuaaguguaacgaaaaacaugacgaggaguucugcgauaugcugcgccuuuuugacuucaauaagcaggccaucagacggcugaaagcggaagcccagaugucuauucagcucaucaacaaggcugugaaugcccugauuaacgaucaacuuaucaugaagaaucaucugcgcgacauuaugggaaucccuuauugcaacuacuccaaauauuguuaccucaaucacacagucaccggcagaacaagccugccccggugcugucuggugucuaacgggagcuaccucaaugaaacccacuucuccgacgauaucgagcagcaggcugacaacaugauuacggagcugcuucaaaaggaauauauggaucgccagggaaaaacaccucugggccucguggaccuguuugucuucucuaccagcuuuuaccugaucuccauuuuccuucaccucguuaagaucccgacccauagacacgugauugggaaacccugcccuaagccccaucggcugaaucacaugggaaucuguagcugcggccuguauaaacacccuggcgugcccgucaaguggaagcgcugaggacuagucccuguucccagagcccacuuuuuuuucuuuuuuugaaauaaaauagccugucuuucagaucuaaaaaaaaaaaaaaaaaaaaaaaaaaaaaaaaaaaaaaaaaaaaaaaaaaaaaaaaaaaaaaaaaaaaaaaaaaaaaaaaaaaaaaaaaaaaaaaaaaaa

SEQ ID NO: 38740 - RNA, 1721 nt, Artificial Sequence
  mRNA product Design a-1 (A100) comprising derived and/or modified sequence from LASV(LASV035-NIG-2009;Clade II)__AIT17588__GPCmut11 (opt5)
aggagagucccgcagucggcguccagcggcucugcuuguucgugugugugucguugcaggccuuauucaagcuuaccaugggccagaucauuaccuucuuucaagaggugccccacgucaucgaagagguuaugaacauugugcugaucgcccucagccugcuugcuauucugaaggggaucuacaauguggccacaugcggacucuucggccuggucuccuuucuucugcucugugggagaucuugcagcacgaccuauaaaggaguguacgaacugcagacacuggagcucgacauggcgucccugaacaugaccaugccucuuucuuguacaaagaauaacagccaucacuauaucaugguuggcaaugaaaccgggcuggagcucacacugaccaacacguccauuaucaaucauaaauucugcaaccuuucugaugcucacaagaaaaaucuguacgaccaugcccucaugagcauuaucuccaccuuucaccugagcauuccgaacuucaaucaguaugaggccaugucuugugauuuuaacggaggcaagaucuccgugcaguacaaucugagccacgcuuaugccgucgacgcugccaaccauugcggcacaauugcgaauggggugcuccaaaccuucaugcggauggccuggggaggcucuuacaucgcucuggauuccgggaagggaagcugggacuguaucaugacaucuuaccaguaucuuauuauccagaacaccacgugggaagaucacugccaguuuucccgccccagcccuauuggcuaccuggggcuccugucccaaagaacacgggacaucuauauuucucgcagacuucugggaaccuucacauggacccucagcgauuccgagggcaacgaaacccccggcggguacugucugacacgguggaugcugaucgaggccgagcucaaaugcuuuggaaauacggcuguugccaaguguaacgaaaaacaugacgaggaguucugcgauaugcugcgccuuuuugacuucaauaagcaggcgaucagacggcugaaagccgaagcucagaugagcauucagcucaucaacaaggccgugaaugcucugauuaacgaucaacuuaucaugaagaaucaucugcgcgacauuaugggcaucccuuauugcaacuacucuaaauauuguuaccucaaucacaccgucacagggaagaccucccugcccagaugcugucuggugagcaacggaucuuaccucaaugaaacacacuucagcgacgauaucgagcagcaggccgacaacaugauuaccgagcugcuucaaaaagaauauaucgaucggcagggcaagacgccucuggggcucguggaccuguuugucuucuccacaucuuuuuaccugauuagcaucuuccuucaccucguuaaaauuccgacccaucgccacgugaucggaaagcccugcccuaaaccccauagacugaaucacaugggcauuuguuccugcggccuguauaagcacccuggggugcccgucaaguggaaacggugaggacuagucccuguucccagagcccacuuuuuuuucuuuuuuugaaauaaaauagccugucuuucagaucuaaaaaaaaaaaaaaaaaaaaaaaaaaaaaaaaaaaaaaaaaaaaaaaaaaaaaaaaaaaaaaaaaaaaaaaaaaaaaaaaaaaaaaaaaaaaaaaaaaaa

SEQ ID NO: 38741 - RNA, 1721 nt, Artificial Sequence
  mRNA product Design a-1 (A100) comprising derived and/or modified sequence from LASV(LASV1000-NIG-2009;Clade II)__AIT17782__GPCmut11 (opt5)
aggagagucccgcagucggcguccagcggcucugcuuguucgugugugugucguugcaggccuuauucaagcuuaccaugggccagaucauuaccuucuuucaagaggugccccacgucaucgaagagguuaugaacauugugcugaucgcccucagccugcuugcuauucugaaggggaucuacaauguggccacaugcggacucuucggccuggucuccuuucuucugcucugugggagaucuugcagcacgaccuauaaaggaguguacgaacugcagacacuggagcucgacauggcgucccugaacaugaccaugccucuuucuuguacaaagaauaacagccaucacuauaucaugguuggcaaugaaaccgggcuggagcucacacugaccaacacguccauuaucaaucauaaauucugcaaccuuucugaugcucacaagaaaaaucuguacgaccaugcccucaugagcauuaucuccaccuuucaccugagcauuccgaacuucaaucaguaugaggccaugucuugugauuuuaacggaggcaagaucuccgugcaguacaaucugagccacacauaugcugucgacgccgcuaaccauugcggcaccauugccaauggggugcuccaaacauucaugcggauggcguggggaggcucuuacaucgcccuggauuccgggaagggaagcugggacuguaucaugaccucuuaccaguaucuuauuauccagaacacgacaugggaagaucacugccaguuuucccgccccagcccuauuggcuaccuggggcuccugucccaaagaacccgggacaucuauauuucucgcagacuucugggaacauucaccuggacccucagcgauuccgagggcaacgaaacacccggcggguacugucugacgcgguggaugcugaucgaggcugagcucaaaugcuuuggaaauaccgccguugcuaaguguaacgaaaaacaugacgaggaguucugcgauaugcugcgccuuuuugacuucaauaagcaggccaucaaaagacugaagacagaagcgcagaugagcauucagcucaucaacaaggccgugaaugcucugauuaacgaucaacuuaucaugaaaaaucaucugcgggacauuaugggcaucccuuauugcaacuacucuaaguauuguuaccucaaucacaccgucacagggaaaaccucccugccccgcugcugucuggugagcaacggaucuuaccucaaugaaacgcacuucagcgacgauaucgagcagcaggccgacaacaugauuacagagcugcuucaaaaggaauauaucgauagacagggcaaaaccccucuggggcucguggaccuguuugucuucuccaccucuuuuuaccugauuagcaucuuccuucaccucguuaagauuccgacacaucggcacguggugggaaaacccugcccuaagccccaucgccugaaucacaugggcaucuguuccugcggccuguauaagcacccugggguccccgugaaauggaagagaugaggacuagucccuguucccagagcccacuuuuuuuucuuuuuuugaaauaaaauagccugucuuucagaucuaaaaaaaaaaaaaaaaaaaaaaaaaaaaaaaaaaaaaaaaaaaaaaaaaaaaaaaaaaaaaaaaaaaaaaaaaaaaaaaaaaaaaaaaaaaaaaaaaaaa

SEQ ID NO: 38742 - RNA, 1721 nt, Artificial Sequence
  mRNA product Design a-1 (A100) comprising derived and/or modified sequence from LASV(LASV221-NIG-2010;Clade II)__AIT17624__GPCmut11 (opt5)
aggagagucccgcagucggcguccagcggcucugcuuguucgugugugugucguugcaggccuuauucaagcuuaccaugggccagaucauuaccuucuuucaagaggugccccacgucaucgaagagguuaugaacauugugcugaucgcccucagccugcuugcuauucugaaggggaucuacaauguggccacaugcggacucuucggccuggucuccuuucuucugcucugugggagaucuugcagcacgaccuauaaaggaguguacgaacugcagacacuggagcucgacauggcgucccugaacaugaccaugccucuuucuuguacaaagaauaacagccaucacuauaucaugguuggcaaugaaaccgggcuggagcucacacugaccaacacguccauuaucaaucauaaauucugcaaccuuucugaugcucacaagaaaaaucuguacgaccaugcccucaugagcauuaucuccaccuuucaccugagcauuccgaacuucaaucaguaugaggccaugucuugugauuuuaacggaggcaagaucuccgugcaguacaaucugagccacacauaugcuauugacgccgcuaaccauugcggcaccaucgccaaugggguccuccaaacauucaugcggauggcguggggaggcucuuacaucgcccuggauuccgggaagggaagcugggacuguauuaugaccucuuaccaguaucuuaucauucagaacacgacaugggaagaucacugccaguuuucccgccccagcccuaucggcuaccuggggcuccugucccaaagaacccgggacauuuauaucucucgcagacuucugggaacauucaccuggacccucagcgauuccgagggcaacgaaacacccggcggguacugucugacgcgguggaugcugaucgaggcugagcucaaaugcuuuggaaauaccgccguggcuaaguguaacgaaaaacaugacgaggaguucugcgauaugcugcgccuuuuugacuucaauaagcaggccauuagacggcugaaaacagaagcgcagaugagcauccagcucauuaacaaggccguuaaugcucugaucaacgaucaacuuauuaugaagaaucaucugcgcgacaucaugggcaucccuuauugcaacuacucuaaauauuguuaccucaaucacaccgugacagggaagaccucccugcccagaugcugucuggucagcaacggaucuuaccucaaugaaacgcacuucagcgacgauauugagcagcaggccgacaacaugaucacagagaugcugcaaaaagaauauauggaucggcagggcaagaccccucuugggcugguggaccucuuuguguucuccaccucuuuuuaccugauuagcaucuuccugcaccuugucaaaauuccgacacaucgccacguuaucggaaagcccugcccuaaaccccauagacucaaucacaugggcauuuguuccugcggccuguauaagcacccuggggugcccgugaaguggaaacggugaggacuagucccuguucccagagcccacuuuuuuuucuuuuuuugaaauaaaauagccugucuuucagaucuaaaaaaaaaaaaaaaaaaaaaaaaaaaaaaaaaaaaaaaaaaaaaaaaaaaaaaaaaaaaaaaaaaaaaaaaaaaaaaaaaaaaaaaaaaaaaaaaaaaa

SEQ ID NO: 38743 - RNA, 1721 nt, Artificial Sequence
  mRNA product Design a-1 (A100) comprising derived and/or modified sequence from LASV(LASV237-NIG-2010;Clade II)__AIT17638__GPCmut11 (opt5)
aggagagucccgcagucggcguccagcggcucugcuuguucgugugugugucguugcaggccuuauucaagcuuaccaugggccagaucauuaccuucuuucaagaggugccccacgucaucgaagagguuaugaacauugugcugaucgcccucagccugcuugcuauucugaaggggaucuacaauguggccacaugcggacucuucggccuggucuccuuucuucugcucugugggagaucuugcagcacgaccuauaaaggaguguacgaacugcagacacuggagcucgacauggcgucccugaacaugaccaugccucuuucuuguacaaagaauaacagccaucacuauaucaugguuggcaaugaaaccgggcuggagcucacacugaccaacacguccauuaucaaucauaaauucugcaaccuuucugaugcucacaagaaagaccuguacgaucaugcccucaugagcauuaucuccaccuuucaccugagcauuccgaauuucaaccaguaugaggccaugucuugugacuuuaauggaggcaagaucuccgugcaguacaaccugagccacacauaugcugucgaugccgcuaaucauugcggcaccauugccaacggggugcuccaaacauucaugcggauggcguggggaggcucuuacaucgcccuggacuccgggaagggaagcugggauuguaucaugaccucuuaccaguaucuuauuauccagaauacgacaugggaagaccacugccaguuuucccgccccagcccuauuggcuaccuggggcuccugucccaaagaacccgggauaucuauauuucucgcagacuucugggaacauucaccuggacccucagcgacuccgagggcaacgaaacacccggcggguacugucugacgcgguggaugcugaucgaggcugagcucaaaugcuuuggaaacaccgccguugcuaaguguaaugaaaaacaugaugaggaguucugcgacaugcugcgccuuuuugauuucaacaagcaggccaucagacggcugaaaacagaagcgcagaugagcauucagcucaucaauaaggccgugaacgcucugauuaaugaccaacuuaucaugaagaaccaucugcgcgacauuaugggcaucccuuauugcaauuacucuaaauauuguuaccucaaccacaccgucacagggaagaccucccugcccagaugcugucuggugagcaauggaucuuaccucaacgaaacgcacuucagcgaugacaucgagcagcaggccgauaauaugauuacagagcugcuucaaaaagaauauauggaccggcagggcaagaccccucuggggcucguggaucuguuugucuucuccaccucuuuuuaccugaucagcauuuuccuucaccucaucaaaauuccgacacaucgccacaucaccggaaagcccugcccuaaaccccauagacugaaccacaugggcauuuguuccugcggccuguauaagcacccugggguucccgugaaguggaaacggugaggacuagucccuguucccagagcccacuuuuuuuucuuuuuuugaaauaaaauagccugucuuucagaucuaaaaaaaaaaaaaaaaaaaaaaaaaaaaaaaaaaaaaaaaaaaaaaaaaaaaaaaaaaaaaaaaaaaaaaaaaaaaaaaaaaaaaaaaaaaaaaaaaaaa

SEQ ID NO: 38744 - RNA, 1721 nt, Artificial Sequence
  mRNA product Design a-1 (A100) comprising derived and/or modified sequence from LASV(LASV253-NIG-2011;Clade II)__AIT17670__GPCmut11 (opt5)
aggagagucccgcagucggcguccagcggcucugcuuguucgugugugugucguugcaggccuuauucaagcuuaccaugggccagaucauuaccuucuuucaagaggugccccacgucaucgaagagguuaugaacauugugcugaucgcccucagccugcuugcuauucugaaggggaucuacaauguggccacaugcggacucuucggccuggucuccuuucuucugcucugugggagaucuugcagcacgaccuauaaaggaguguacgaacugcagacacuggagcucgacauggcgucccugaacaugaccaugccucuuucuuguacaaagaauaacagccaucacuauaucaugguuggcaaugaaaccgggcuggagcucacacugaccaacacguccauuaucaaucauaaauucugcaaccuuucugaugcucacaagaaaaaucuguacgaccaugcccucaugagcauuaucuccaccuuucaccugagcauuccgaacuucaaucaguaugaggccaugucuugugauuuuaacggaggcaagaucuccgugcaguacaaucugagccacacauaugcugucgacgccgcuaaccauugcggcaccauugccaauggggugcuccaaacauucaugcggauggcguggggaggcucuuacaucgcccuggauuccgggaagggaagcugggacuguaucaugaccucuuaccaguaucuuauuauccagaacacgacaugggaagaucacugccaguuuucccgccccagcccuauuggcuaccuggggcuccugucccaaagaacccgggacaucuauauuucucgcagacuucugggaacauucaccuggacccucagcgauuccgagggcaacgaaacacccggcggguacugucugacgcgguggaugcugaucgaggcugagcucaaaugcuuuggaaauaccgccguugcuaaguguaacgaaaaacaugacgaggaguucugcgauaugcugcgccuuuuugacuucaauaagcaggccaucagacggcugaaagcggaagcccagaugagcauucagcucaucaacaaggcugugaaugcccugauuaacgaucaacuuaucaugaagaaucaucugcgcgacauuaugggcaucccuuauugcaacuacucuaaauauuguuaccucaaucacacagucaccgggagaacaucccugccccggugcugucuggugagcaacggaucuuaccucaaugaaacccacuucagcgacgauaucgagcagcaggcugacaacaugauuacggagcugcuucaaaaggaauauaucgaucgccagggcaaaacaccucuggggcucguggaccuguuugucuucuccaccucuuuuuaccugauuagcaucuuccuucaccucguuaagauuccgacccauagacacaucauuggaaaacccugcccuaagccccaucggcugaaucacaugggcaucuguuccugcggccuguauaaacacccuggggugcccgugaaguggaagcgcugaggacuagucccuguucccagagcccacuuuuuuuucuuuuuuugaaauaaaauagccugucuuucagaucuaaaaaaaaaaaaaaaaaaaaaaaaaaaaaaaaaaaaaaaaaaaaaaaaaaaaaaaaaaaaaaaaaaaaaaaaaaaaaaaaaaaaaaaaaaaaaaaaaaaa

SEQ ID NO: 38745 - RNA, 1721 nt, Artificial Sequence
  mRNA product Design a-1 (A100) comprising derived and/or modified sequence from LASV(LASV254-NIG-2011;Clade II)__AIT17674__GPCmut11 (opt5)
aggagagucccgcagucggcguccagcggcucugcuuguucgugugugugucguugcaggccuuauucaagcuuaccaugggccagaucauuaccuucuuucaagaggugccccacgucaucgaagagguuaugaacauugugcugaucgcccucagccugcuugcuauucugaaggggaucuacaauguggccacaugcggacucuucggccuggucuccuuucuucugcucugugggagaucuugcagcacgaccuauaaaggaguguacgaacugcagacacuggagcucgacaugaccaaccugaauaugacaaugccucuuuccuguaccaagaacaauucucaucacuauaucaugguuggcaacgaaacagggcuggagcucacccugacgaauaccagcauuaucaaccauaaauucugcaaucuuuccgaugcgcacaagaaaaaccuguacaaucaugcucucaugucuauuaucagcacauuucaccuguccauuccgaacuucaaucaguaugaggccaugagcugugacuuuaacggaggcaagaucucugugcaguacaaucugucccacagcuaugccgucgaugcugccaaccauugcggcaccauugcuaacggggugcuccaaacauucaugcggauggccuggggaggcucuuacaucgcgcuggacuccgggaagggaaauugggauuguaucaugaccagcuaccaguaucuuauuauccagaacacgacaugggaagaccacugccaguuuucucgccccuccccuauuggcuaccuggggcuccugagccaaagaacccgggauaucuauauuucccgcagacuucugggaacauucaccuggacccucucugacagcgagggcaaugaaacacccggcggguacugucugacgcgguggaugcugaucgaggccgagcucaaaugcuuuggaaacaccgcuguugccaaguguaaugaaaaacaugaugaggaguucugcgacaugcugcgccuuuuugauuucaacaagcaggcuaucagacggcugaaaacagaagcccaggcgaauauucagcucaucaacaaggccgugaaugcucugauuaacgaccaacuuaucaugaagaaucaucugcgcgauauuaugggcaucccuuauugcaacuacuccaaauauuguuaccucaaucacaccgucacagggaagaccagccugcccagaugcugucuggugucuaacggauccuaccucaaugaaacgcacuucagcgacgacaucgagcagcaggccgauaacaugauuacagagcugcuucaaaaagaauauauggaccggcagggcaagaccccucuggggcucguggaucuguuugucuucucuaccagcuuuuaccugaucuccauuuuccuucaccucguuaaaaucccgacacaucgccacgugauuggaaagcccugcccuaaaccccauagacugaaccacaugggcaucuguucuugcggccuguauaagcacccuggggugcccgucaaguggaaacggugaggacuagucccuguucccagagcccacuuuuuuuucuuuuuuugaaauaaaauagccugucuuucagaucuaaaaaaaaaaaaaaaaaaaaaaaaaaaaaaaaaaaaaaaaaaaaaaaaaaaaaaaaaaaaaaaaaaaaaaaaaaaaaaaaaaaaaaaaaaaaaaaaaaaa

SEQ ID NO: 38746 - RNA, 1721 nt, Artificial Sequence
  mRNA product Design a-1 (A100) comprising derived and/or modified sequence from LASV(Nig08-A19;Clade III)__ADU56618__GPCmut11 (opt5)
aggagagucccgcagucggcguccagcggcucugcuuguucgugugugugucguugcaggccuuauucaagcuuaccaugggccagaucgugaccuucuuucaagaggucccccacguuauugaagaggugaugaacaucgugcugauugcccucagcauccuggcuauucuuaaggggcuguacaauaucgccacaugcggacucaucggccuggucacguuccuucugcucuccgggagaucuuguagcaugaccuauaaaggaguguacgaacugcagacacuggagcucaacaugaauacccugaacaugacaaugccucuuuccugcaccaagaauaacucucaucacuauauuaugguuggcaaugaaacagggcuggagcucacccugacgaacaccagccuucugcaucacaaauuuuguaaucucuccgacgcgcauaagaaaaaccuguacgaucacacacugaugucuaucauuagcaccuuccaccucuccaucccgaauuuuaaccaguaugaggcuaugagcugcgacuucaauggaggcaagauuacagugcaguacaaccugucucauuccuaugccaucgaugccgcuaaucacuguggcaccgucgccaacggggugcuucaaacguuuaugcggauggcuuggggaggcagcuacauugcccuggacucugggcgcggaaagugggauugcaucaugacauccuaccaguaucucaucauucagaacaccacaugggaagaccauugucaguucagcagacccucuccuaucggcuaccuggggcuucugucccaacggacccgcgauauuuauaucagcagacggcuccugggaaccuuuacauggacgcuguccgacucugagggcaaugaaacccccggcggguacugccucacacgcuggaugcugauugaggcggagcuuaaauguuucggaaacaccgccguugcuaagugcaaugaaaaacacgaugaggaauuuugugacaugcugagacucuucgauuuuaacaagcaggccauccggcgccugaaagcugaggcccagaugagcauccagcuuauuaauaaggcggugaacgcccugaucaaugaccaacucauuaugaagaaccaccugagagauaucaugggcauuccuuauugcaauuacuccaaauauugcuaccugaaccauacaagcaccgggcggacgucucucccccgcuguugccuggucuccaauggaagcuaccuuaacgaaacacacuucucugacgacaucgagcagcaggcugauaauaugaucaccgagaugcugcaaaaggaauaucucgacagacagggcaaaaccccucuggggcugguggaucuuuucguguuuagcacauccuucuaccucauuucuaucuuucugcaucuggucaagauuccgacccaccggcauaucguuggaaaacccuguccuaagccccaccgccucaaccacaugggcauuugcagcuguggccuguauaaacagccuggggugcccgugagauggaagcggugaggacuagucccuguucccagagcccacuuuuuuuucuuuuuuugaaauaaaauagccugucuuucagaucuaaaaaaaaaaaaaaaaaaaaaaaaaaaaaaaaaaaaaaaaaaaaaaaaaaaaaaaaaaaaaaaaaaaaaaaaaaaaaaaaaaaaaaaaaaaaaaaaaaaa

SEQ ID NO: 38747 - RNA, 1724 nt, Artificial Sequence
  mRNA product Design a-1 (A100) comprising derived and/or modified sequence from LASV(G1180-SLE-2010;Clade IV)__AIT17168__GPCmut11 (opt5)
aggagagucccgcagucggcguccagcggcucugcuuguucgugugugugucguugcaggccuuauucaagcuuaccaugggccagaucgugaccuucuuucaagaggucccccacguuauugaagaggugaugaacaucgugcugauugcccucagcauccuggcuguccuuaaggggcuguacaauuucgccacaugcggacucgugggccugcuuacguuucugcuccugugugggagauccugcaccgcgucucgguauaaaggaguuuacgaacugcagacacucgagcugaacauggaaacccuuaauaugacaaugccucugagcuguaccaagaacaauucccaucacuauauuauggugggcaacgagacagggcucgagcugacccuuacgaauaccucuaucaucaaccauaaauucugcaaucugagcgacgcucacaagaaaaaccucuacgaucaugcccugauguccauuaucucuacauuucaccugagcauuccgaauuucaaccaguaugaagccauguccugugacuuuaauggaggcaagaucagcguccaguacaaccucucucacuccuaugcuggcgaugccgcuaaucauugcgggaccguggccaacggaguucugcaaacauucaugcgcauggcguggggcgggagcuacauugcccuugacucuggacacggcuccugggauuguaucaugaccagcuaccaguaucugauuauccagaacacgacaugggaggaccauugccaguuuucuagacccuccccuaucggguaccucggacugcuuagccaacggacccgcgauauuuauaucuccagacggcugcucggcacauucaccuggacccugucugacagcgaaggcaaggauacacccgggggauacugucugacgcgcuggaugcucauugaggcugagcugaaaugcuuuggcaauaccgccguggcuaaguguaacgaaaaacacgacgaggaguucugcgauaugcuuagacuguuugacuucaauaagcaggccauccagcggcucaaagcggaagcccagauguccauucaacugaucaacaaggcugucaaugcccuuaucaacgaucagcugauuaugaagaaucaccuccgcgacaucauggggauuccuuauugcaacuacagcaaauauuguuaccugaaucauacaaccacaggaaagaccucucugcccaaaugcugucucguguccaacggcagcuaccugaaugaaacgcacuucucugacgauaucgagcagcaagcugacaacaugauuacagagaugcuucagaaggaauauauggagagacaggggaaaaccccucugggacucguggaucuguuugucuucagcaccuccuuuuaccugaucucuaucuuccuucaucucguuaagauuccgacacaccggcauaucgugggcaaaagcugccccaagccucaccgccugaaucacaugggcauuuguuccugcgggcuguauaagcagcccggagugccugucaaauggaagagaugaggacuagucccuguucccagagcccacuuuuuuuucuuuuuuugaaauaaaauagccugucuuucagaucuaaaaaaaaaaaaaaaaaaaaaaaaaaaaaaaaaaaaaaaaaaaaaaaaaaaaaaaaaaaaaaaaaaaaaaaaaaaaaaaaaaaaaaaaaaaaaaaaaaaa

SEQ ID NO: 38748 - RNA, 1724 nt, Artificial Sequence
  mRNA product Design a-1 (A100) comprising derived and/or modified sequence from LASV(G1442-SLE-2011;Clade IV)__AIT17180__GPCmut11 (opt5)
aggagagucccgcagucggcguccagcggcucugcuuguucgugugugugucguugcaggccuuauucaagcuuaccaugggccagaucgugaccuucuuucaagaggucccccacguuauugaagaggugaugaacaucgugcugauugcccucagcauccuggcuguccuuaaggggcuguacaauguggccacaugcggacucauuggccugguuacguuccuucugcucugugggagauccugcaccacaacccuguauaaaggaguguacgaacugcagacacucgagcugaacauggaaacccuuaauaugacaaugccucugucuuguaccaagaacaauagccaucacuauauccgggucggcaacgagacggggcucgagcugacccuuacaaauaccuccaucauuaaccauaaauuuugcaaucugucugacgcgcacaagaaaaaccucuacgaucaugcucugaugagcaucauuuccacauuccaccugucuaucccgaauuuuaaccaguaugaagccaugagcugugacuucaauggaggcaagauuuccgugcaguacaaccucagccacucuuaugccggcgaugcugccaaucauugcgggaccguugcuaacggagugcugcaaacguuuaugcgcauggccuggggcggguccuacaucgcgcuugacagcggaagaggcaacugggauuguauuaugacaucuuaccaguaucugaucauccagaauaccacaugggacgaucacugccaguucucccggcccagcccuauuggguaccucggacugcuuucucaacgcaccagagacgucuauaucucccggcgccugcucggcaccuuuacauggacgcugagcgauuccgagggcaaggacacccccgggggauacugucugacaagauggaugcucauugaagccgagcugaaaugcuucggcaacaccgcuguggccaaguguaaugagaaacaugaugaagaguuuugcgacaugcuucggcuguucgauuuuaacaagcaggcuauccagcgccucaaagccgaagcgcagaugucuauucaacugaucaauaaggccgugaacgcucuuaucaaugaccagcugauuaugaagaaccaccucagagacaucauggggauuccuuauugcaauuacagcaaauauuguuaccugaacaauacagccaccggaaagacgucccugcccaaaugcugucucaucagcaacggcucuuaccugaaugagacacacuucuccgaugacauugaacaggaggcugauaacaugaucaccgagaugcuucaaaaggaauauauggagcggcaggggaaaaccccucugggacucgucgaccuguucguuuuuagcacaucuuucuaccugaucagcauuuuucuucaucucgugaagaucccgacccaccgccauauugugggcaaauccugccccaagccucacagacugaaucauaugggcaucuguucuugcgggcuguauaagcagcccggagucccugugcgguggaaacgcugaggacuagucccuguucccagagcccacuuuuuuuucuuuuuuugaaauaaaauagccugucuuucagaucuaaaaaaaaaaaaaaaaaaaaaaaaaaaaaaaaaaaaaaaaaaaaaaaaaaaaaaaaaaaaaaaaaaaaaaaaaaaaaaaaaaaaaaaaaaaaaaaaaaaa

SEQ ID NO: 38749 - RNA, 1724 nt, Artificial Sequence
  mRNA product Design a-1 (A100) comprising derived and/or modified sequence from LASV(G3010-SLE-2013;Clade IV)__AIT17344__GPCmut11 (opt5)
aggagagucccgcagucggcguccagcggcucugcuuguucgugugugugucguugcaggccuuauucaagcuuaccaugggccagaucgugaccuucuuucaagaggucccccacguuauugaagaggugaugaacaucgugcugauugcccucagcauccuggcuguccuuaaggggcuguacaauuucgccacaugcggacucgugggccugguuacguuucuucugcucugugggagauccugcaccacaucucuguauaaaggaguguacgaacugcagacccucgagcugaacauggaaacacuuaauaugaccaugccucugagcuguacaaagaacaauucccaucacuauauuauggucggcaacgagaccgggcucgagcugacgcuuaccaauacaucuaucaucaaccauaaauucugcaaucugagcgacgcgcacaagaaaaaccucuacaaucaugcucugauguccauuaucucuaccuuucaccugagcauuccgaacuucaaucaguaugaagccauguccugugauuuuaacggaggcaagaucagcgugcaguacaaucucucucacuccuaugccggcgacgcugccagccauugcgggacaguugcuaacggagugcugcaaaccuucaugcggauggccuggggcgggucuuacauugcgcuugauuccggauacggcaagugggacuguaucaugacgagcuaucaguaccugauuauccagaacacaaccugggaggaucacugccaguuuucucgccccuccccuaucggguaucucggacugcuuagccaaagaacacgggacauuuacaucucccgcagacugcucggcaccuucaccuggacacugucugauagcgaaggcaaagacacgcccgggggauauugucugacccgguggaugcucauugaggccgagcugaagugcuuuggcaauacagcugucgccaaauguaacgaaaagcaugaugaggaguucugcgacaugcuucgccuguuugauuucaauaaacaggcuauccagagacucaagaccgaagcccagauguccauucaacugaucaacaaggcggugaaugcccuuaucaacgaccagcugauuaugaaaaaucaccuccgggauaucauggggauuccuuacugcaacuauagcaaguacuguuaccugaaucacacaaccacgggaaaaacaucucugcccaagugcugucucguguccaacggcagcuaucugaaugaaacccauuucucugacgacaucgagcagcaagcugauaacaugauuaccgagaugcuucagaaagaauacauggagcgccaggggaagacaccucugggacucgucgaccuguuuguuuucagcaccuccuuuuaucugaucucuaucuuccuucaccucgugaaaauuccgacacauagacacaucgugggcaagagcugccccaagccucaucggcugaaucacaugggcauuuguuccugcgggcuguacaaacagcccggagucccugugcgcuggaagagaugaggacuagucccuguucccagagcccacuuuuuuuucuuuuuuugaaauaaaauagccugucuuucagaucuaaaaaaaaaaaaaaaaaaaaaaaaaaaaaaaaaaaaaaaaaaaaaaaaaaaaaaaaaaaaaaaaaaaaaaaaaaaaaaaaaaaaaaaaaaaaaaaaaaaa

SEQ ID NO: 38750 - RNA, 1724 nt, Artificial Sequence
  mRNA product Design a-1 (A100) comprising derived and/or modified sequence from LASV(G502-SLE-2009;Clade IV)__AIT17126__GPCmut11 (opt5)
aggagagucccgcagucggcguccagcggcucugcuuguucgugugugugucguugcaggccuuauucaagcuuaccaugggccagaucgugaccuucuuucaagaggucccccacguuauugaagaggugaugaacaucgugcugauugcccucagcauccuggcuguccuuaaggggcuguacaauuucgccacaugcggacucgugggccugcuuacguuucugcuccugugugggagauccugcaccacaggacuguauaaaggcguuuacgaacuccagacccuggagcuuaacauggaaacacugaauaugaccaugccucucucuuguacaaagaacaauagccaucacuauauuaugguggggaacgagaccggacuggagcuuacgcugaccaauacauccaucaucaaccauaaauucugcaaucucucugacgcgcacaagaaaaaccuguacgaucaugcucugaugagcauuaucuccaccuuucaccucucuauuccgaauuucaaccaguaugaagccaugagcugugacuuuaauggcggcaagaucuccguccaguacaaccugagccacucuuaugccggggaugcugccgaccauugcggaacaguggcuaauggcguucuucaaaccuucaugcggauggccuggggaggguccuacauugcgcuggauagcggccgcgggagaugggacuguaucaugacgucuuaccaguaucucauuauccagaacacaaccugggaggaucacugccaguuuucccggcccagcccuaucggauaccugggccuucugucucaacgcacaagagacauuuauaucucccggcgccuccugggcaccuucaccuggacacugagcgauuccgaagggaaggacacgcccggaggcuacugucucaccagauggaugcugauugaggccgagcuuaaaugcuuugggaacacagcuguggccaaguguaaugaaaaacaugaugaggaguucugcgacaugcugcggcucuuugauuucaacaagcaggcuauccagcgccugaaagccgaagcgcagaugucuauucaacuuaucaauaaggccgucaacgcucugaucaaugaccagcucgugaugaagaaccaccugagagacauuaugggaaucccuuauugcaauuacagccgguauuguuaccugaaccacaccacaaccggccgcacgucccuccccaaaugcugucuggugagcaaugggucuuaccuuaacgaaacacauuucuccgaugacauugagcagcaagccgauaauaugaucaccgagaugcugcagaaggaauauauggagagacagggaaaaaccccucucggccuggucgaccuguuuguuuucagcacaucuuuuuaccuuauuagcaucuuccuccaccuggugaagaucccgacccaucggcacauugugggcaaauccugccccaagccucaucgccugaaccacauggggaucuguucuugcggacucuauaaacagcccggcgucccugugaaguggaagagaugaggacuagucccuguucccagagcccacuuuuuuuucuuuuuuugaaauaaaauagccugucuuucagaucuaaaaaaaaaaaaaaaaaaaaaaaaaaaaaaaaaaaaaaaaaaaaaaaaaaaaaaaaaaaaaaaaaaaaaaaaaaaaaaaaaaaaaaaaaaaaaaaaaaaa

SEQ ID NO: 38751 - RNA, 1724 nt, Artificial Sequence
  mRNA product Design a-1 (A100) comprising derived and/or modified sequence from LASV(G733-SLE-2010;Clade IV)__AIT17154__GPCmut11 (opt5)
aggagagucccgcagucggcguccagcggcucugcuuguucgugugugugucguugcaggccuuauucaagcuuaccaugggccagaucgugaccuucuuucaagaggucccccacguuauugaagaggugaugaacaucgugcugauugcccucagcauccuggcuguccuuaaggggcuguacaauuucgccacaugcggaauugugggccucguuuccuuucugcuucugugugggagaucuugcacgaccagccucuauaaaggaguguacgaacugcagacacuggagcucaacauggaaacccugaauaugacaaugccucuuuccuguaccaagaacaauucucaucacuauaucauggucggcaacgagacagggcuggagcucacccugacgaauaccagcaucauuaaccauaaauucugcaaucuuuccgacgcgcacaagaaaaaccuguacgaucaugcucucaugucuaucauuagcacauuucaccuguccaucccgaauuucaaccaguaugaagccaugagcugugacuuuaauggaggcaagauuucugugcaguacaaccugucccacagcuaugccggcgaugcugccaaucauugcgggaccaucgcuaacggaguucuccaaacauucaugcggauggccuggggcgggucuuacauugcgcuggacuccggacgcgauagaugggacuguaucaugaccagcuaccaguaucuuaucauucagaacacgacaugggaggaucacugccaguuuucucggcccuccccuaucggcuaccuggggcuccugagccaacgcaccagagacauuuauaucucccggcgccuucugggaacauucaccuggacccucucugauagcgaaggcaaggacacacccggcggguacugucugacgagauggaugcugauugaggccgagcucaaaugcuuuggaaauaccgcuguggccaaguguaacgaaaaacaugaugaggaguucugcgacaugcugcggcuuuuugauuucaauaagcaggcuauccagcgccugaaagccgaagcgcagauguccauccaacucauuaacaaggccgucaaugcucugaucaacgaccagcuuauuaugaagaaucaccugagagacaucaugggcauuccuuauugcaacuacagcaaauauuguuaccucaaucacacaaccacagggaagaccucucugcccaaaugcugucugguguccaacggaagcuaccucaaugaaacgcauuucucugaugacaucgagcagcaagccgauaacaugaucacagagaugcugcagaaggaauauauggagcggcagggcaaaaccccucuugggcugguggaccucuuugucuucagcaccuccuuuuaccugauuucuaucuuccugcaccuuguuaagauuccgacacaucgccacguggugggaaaaagcugccccaagccucauagacucaaucacaugggcaucuguuccugcggccuguaugggcagcccggagucccugugaaguggaaacggugaggacuagucccuguucccagagcccacuuuuuuuucuuuuuuugaaauaaaauagccugucuuucagaucuaaaaaaaaaaaaaaaaaaaaaaaaaaaaaaaaaaaaaaaaaaaaaaaaaaaaaaaaaaaaaaaaaaaaaaaaaaaaaaaaaaaaaaaaaaaaaaaaaaaa

SEQ ID NO: 38752 - RNA, 1724 nt, Artificial Sequence
  mRNA product Design a-1 (A100) comprising derived and/or modified sequence from MOPV/LASV reassortant(IGS-1;Clade IV)__AFY05576__GPCmut11 (opt5)
aggagagucccgcagucggcguccagcggcucugcuuguucgugugugugucguugcaggccuuauucaagcuuaccaugggccagaucgugaccuucuuucaagaggucccccacguuauugaagaggugaugaacaucgugcugauugcccucagcguccuggcugugcuuaaggggcuguacaauuucgccacaugcggacucguuggccuggugacguuucuucugcucugugggagauccugcaccacaucucuguauaaaggagucuacgaacugcagacccucgagcugaacauggaaacacuuaauaugaccaugccucugagcuguacaaagaacaauucccaucacuauaucauggugggcaacgagaccgggcucgagcugacgcuuaccaauacaucuauuaucaaccauaaauucugcaaucugagcgacgcgcacaagaaaaaccucuacgaucaugcucugauguccaucauuucuaccuuucaccugagcaucccgaauuucaaccaguaugaagccauguccugugacuuuaauggaggcaagauuagcguucaguacaaccucucucacuccuaugccggcgaugcugccaaucauugcgggacaguggcuaacggaguccugcaaaccuucaugcggauggccuggggcgggagcuacaucgcgcuugacucuggacgcggcaacugggauuguauuaugacguccuaccaguaucugaucauucagaauacaaccugggaggaccacugccaguuuagcagacccucuccuaucggguaccucggacugcuuucccaacggacacgcgauaucuauauuagcagacggcugcucggcaccuucaccuggacacuguccgacucugaaggcgaggauacgcccgggggauacugucugacccgcuggaugcucaucgaggccgaacugaagugcuuuggcaacacagcuguggccaaauguaaugagaagcaugacgaagaguucugcgauaugcuuagacuguuugacuucaacaaacaggcuauucagcggcucaaggccgaagcgcagaugagcauccaacugauuaauaaagccgugaacgcucuuaucaaugaucagcugaucaugaagaaccaccuccgcgacauuauggggaucccuuauugcaauuacuccaaguauuguuaccugaaccacaccacaaccggaagaacgagccugcccaaaugcugucucgucucuaauggcuccuaccugaacgagacacauuucagcgacgauauugagcagcaagccgacaauaugaucaccgaaaugcuucagaaggaguauauggaacggcaggggaaaaccccucugggacucguugaucuguuuguguucucuaccagcuuuuaccugauuuccaucuuccuucaccucgugaagaucccgacacaucgccacauugucggcaaaucuugccccaagccucauagacugaaccacaugggcaucuguagcugcgggcuguauaaacagcccggagugccuguuaaguggaagcggugaggacuagucccuguucccagagcccacuuuuuuuucuuuuuuugaaauaaaauagccugucuuucagaucuaaaaaaaaaaaaaaaaaaaaaaaaaaaaaaaaaaaaaaaaaaaaaaaaaaaaaaaaaaaaaaaaaaaaaaaaaaaaaaaaaaaaaaaaaaaaaaaaaaaa

SEQ ID NO: 38753 - RNA, 1724 nt, Artificial Sequence
  mRNA product Design a-1 (A100) comprising derived and/or modified sequence from LASV(LM765-SLE-2012;Clade IV)__AIT17814__GPCmut11 (opt5)
aggagagucccgcagucggcguccagcggcucugcuuguucgugugugugucguugcaggccuuauucaagcuuaccaugggccagaucgugaccuucuuucaagaggucccccacguuauugaagaggugaugaacaucgugcugauugcccucagcauccuggcuguccuuaaggggcuguacaauuucgccacaugcggacucgugggccugguuacguuucuucugcucugugggagauccugcaccacaucucuguauaaaggaguguacgaacugcagacccucgagcugaacauggaaacacuuaauaugaccaugccucugagcuguacaaagaacaauucccaucacuauauuauggucggcaacgagaccgggcucgagcugacgcuuaccaauacaucuaucaucgaccauaaauucugcaaccugagcgaugcgcaccggaagaaucucuacgaccaugcucugauguccauuaucucuaccuuucaccugagcauuccgaacuucaaucaguaugaagccauguccugugauuuuaacggaggcaaaaucagcgugcaguacaaucucucucacuccuaugccaaggacgcugccgaucauugcggcacaguugcuaacggggugcugcaaaccuucaugcgcauggccuggggaggcagcuacauugcgcuugacucugggagaggacggugggauuguaucaugacguccuaccaguaucugauuauccagaauacaaccugggaggaccacugccaguuuagccgccccucuccuaucggcuaccucgggcugcuuucccaaagaacacgggauauuuauaucagccgcagacugcucggaaccuucaccuggacacuguccgacucugaaggcaaggauacgcccggcggguacugucugacccgguggaugcucauugaggccgagcugaaaugcuuuggaaacacagcugucgccaaguguaacgaaaaacaugacgaggaguucugcgauaugcuucgccuguuugacuucaauaagcaggcuauccagagacucaaagccgaagcgcagaugagcauucaacugaucaacaaggccgugaaugcucuuaucaacgaccagcugauuaugaagaaucaccuccgggauaucaugggcauuccuuauugcaacuacuccaaauauuguuaccugaaucacaccacaaccgggaagacgagccugcccaaaugcugucucgugucuaacggauccuaccugaaugaaacacauuucagcgacgauaucgagcagcaagccgacaacaugauuaccgagaugcuucagaaggaauauauggagcgccagggcaaaaccccucuggggcucgucgaucuguuuguuuucucuaccagcuuuuaccugaucuccaucuuccuucaccucgugaagauuccgacacauagacacaucgugggaaaacccugcccuaagccccaucggcugaaucacaugggcauuuguucuugcggccuguauaagcagccugggguccccgugaaauggaagcgcugaggacuagucccuguucccagagcccacuuuuuuuucuuuuuuugaaauaaaauagccugucuuucagaucuaaaaaaaaaaaaaaaaaaaaaaaaaaaaaaaaaaaaaaaaaaaaaaaaaaaaaaaaaaaaaaaaaaaaaaaaaaaaaaaaaaaaaaaaaaaaaaaaaaaa

SEQ ID NO: 38754 - RNA, 1724 nt, Artificial Sequence
  mRNA product Design a-1 (A100) comprising derived and/or modified sequence from LASV(LM776-SLE-2012;Clade IV)__AIT17824__GPCmut11 (opt5)
aggagagucccgcagucggcguccagcggcucugcuuguucgugugugugucguugcaggccuuauucaagcuuaccaugggccagaucgugaccuucuuucaagaggucccccacguuauugaagaggugaugaacaucgugcugauugcccucagcauccuggcuguccuuaaggggcuguacaauuucgccacaugcggacucgugggccugguuacguuucuucugcucugugggagauccugcaccacaucuguguauaaaggagucuacgaacugcagacccuggagcucaacauggaaacacugaauaugaccaugccucuuagcuguacaaagaacaauucccaucacuauauuauggugggcaacgagaccgggcuggagcucacgcugaccaauacaucuaucaucaaccauaaauucugcaaucuuagcgacgcgcacaagaaaaaccuguacgaucaugcucucauguccauuaucucuaccuuucaccugagcauuccgaauuucaaccaguaugaagccauguccugugacuuuaauggaggcaagaucagcguucaguacaaccugucucacuccuaugccggcgaugcugccaaucauugcgggacaguggcuaacggaguccuccaaaccuucaugcggauggccuggggcgggagcuacauugcgcuggacucuggacacggcaagugggauuguaucaugacguccuaccaguaucuuauuauccagaacacaaccugggaggaccauugccaguuuagccgccccucuccuaucggguaccugggacuccugucccaaagaacacgggauauuuauaucagccgcagacuucugggcaccuucaccuggacacucuccgacucugaaggcaaagauacgcccgggggauacugucugacccgguggaugcugauugaggccgagcucaagugcuuuggcaauacagcuguggccaaauguaacgaaaagcacgacgaggaguucugcgauaugcugcgccuuuuugacuucaauaaacaggcuauccagagacugaaggccgaagcgcagaugagcauucaacucaucaacaaggccgugaaugcucugaucaacgaucagcuuauuaugaaaaaucaucugcgggacaucauggggauuccuuauugcaacuacuccaaguauuguuaccucaaucacaccacaaccggaaaaacgagccugcccaagugcugucuggucucuaacggcuccuaccucaaugaaacacacuucagcgacgauaucgagcagcaagccgacaacaugauuaccgagaugcugcagaaagaauauauggagcgccaggggaagaccccucuuggacugguugaucucuuuguguucucuaccagcuuuuaccugaucuccaucuuccugcaucuugugaaaauuccgacacacagacauaucgucggcaagucuugccccaagccucaccggcucaaucacaugggcauuuguagcugcgggcuguauaaacagcccggagugccuguucgcuggaagagaugaggacuagucccuguucccagagcccacuuuuuuuucuuuuuuugaaauaaaauagccugucuuucagaucuaaaaaaaaaaaaaaaaaaaaaaaaaaaaaaaaaaaaaaaaaaaaaaaaaaaaaaaaaaaaaaaaaaaaaaaaaaaaaaaaaaaaaaaaaaaaaaaaaaaa

SEQ ID NO: 38755 - RNA, 1724 nt, Artificial Sequence
  mRNA product Design a-1 (A100) comprising derived and/or modified sequence from LASV(Mad39;Clade IV)__ANH09722__GPCmut11 (opt5)
aggagagucccgcagucggcguccagcggcucugcuuguucgugugugugucguugcaggccuuauucaagcuuaccaugggccagaucgugaccuucuuucaagaggucccccacguuauugaagaggugaugaacaucgugcugauugcccucagcauccuggcuguccuuaaggggcuguacaauguggccacaugcggacucauuggccugguuacguuccuucugcucugugggagauccugcaccacaacccuguauaaaggaguguacgaacugcaggcgcucgagcugaacauggaaacacuuaauaugaccaugccucugucuuguacaaagaacaauagccaucacuauauccgggucggcaacgagaccgggcucgagcugacgcuuaccaauacaucccugaucaaccauaaauuuugcaaucucucugacgcucacaagaaaaaccuguacgaucaugcccugaugagcauuaucuccaccuuccaccucucuauuccgaauuuuaaccaguaugaagccaugagcugugacuucaaugauggaaagaucuccgugcaguacaaccugagccacacauaugcuggcgacaccgccaaucauugcggcacgguugcuaacggggugcuucaaacauuuaugcgcauggccuggggaggcucuuacauugcgcuggauuccgggagaggaggcugggacuguaucaugaccagcuaccaguaucucauuauccagaacacaaccugggaggaucacugccaguucucucggcccuccccuaucggguaccugggacuucugagccaacgcaccagagacauuuauaucucucggcgccuccugggcacauuuacguggacccuguccgauagcgaaggcaaggacacacccgggggauacugucucaccagauggaugcugauugaggccgagcuuaaaugcuucggcaauacagcugucgccaaguguaacgaaaaacaugaugaggaauuuugcgacaugcugcgccucuucgauuuuaauaagcaggcuauccagcggcugaaagccgaggcgcagauguccauucaacuuaucaacaaggccgugaaugcucugaucaacgaccagcucauuaugaagaaucaccugagagacaucauggggauuccuuauugcaacuacucuaaauauuguuaccugaaucacaccgugacgggaaagacaagccuccccaaaugcugucuggucuccaacggcagcuaccuuaaugaaacccauuucucugaugacaucgagcagcaagccgauaacaugauuaccgagaugcugcagaaggaauauauggagcggcaggggaaaacaccucucggacugguugaccuguucguguuuuccaccagcuucuaccuuaucucuaucuuucuccaccuggugaagauuccgacacaucgccacgucgugggcaaacccugcccuaagccccauagacugaaucacaugggcaucuguagcugcggguucuauaagcagccuggaguucccgugcgguggaaacgcugaggacuagucccuguucccagagcccacuuuuuuuucuuuuuuugaaauaaaauagccugucuuucagaucuaaaaaaaaaaaaaaaaaaaaaaaaaaaaaaaaaaaaaaaaaaaaaaaaaaaaaaaaaaaaaaaaaaaaaaaaaaaaaaaaaaaaaaaaaaaaaaaaaaaa

SEQ ID NO: 38756 - RNA, 1724 nt, Artificial Sequence
  mRNA product Design a-1 (A100) comprising derived and/or modified sequence from LASV(Z0947-SLE-2011;Clade IV)__AIT17840__GPCmut11 (opt5)
aggagagucccgcagucggcguccagcggcucugcuuguucgugugugugucguugcaggccuuauucaagcuuaccaugggccagaucgugaccuucuuucaagaggucccccacguuauugaagaggugaugaacaucgugcugauugcccucagcauccuggcuguccuuaaggggcuguacaauuucgccacaugcggacucgugggccugguuacguuucuucugcucugugggagauccugcaccauuucucuguauaaaggaguguacgaacugcagacacucgagcugaacauggaaacccuuaauaugacaaugccucugagcuguaccaagaacaauucccaucacuauaucauggucggcaacgagacagggcucgagcugacccuuacgaauaccucuaucauuaaccauaaauucugcaaucugagcgacgcgcacaagaaaaaccucuacgaucaugcucugauguccaucauuucuacauuucaccugagcaucccgaauuucaaccaguaugaagccauguccugugacuuuaauggaggcaagauuagcgugcaguacaaccucucucacuccuaugccggcgaugcugccaaucauugcgggaccguugcuaacggagugcugcaaacauucaugcggauggccuggggcgggagcuacaucgcgcuugacucuggacgcgauagaugggacuguauuaugaccuccuaccaguaucugaucauccagaacacgacaugggaggaucacugccaguuuagccggcccucuccuauuggcuaccucgggcugcuuucccaacgcaccagagacaucuauauuagccggcgccugcucggaacauucaccuggacccuguccgauucugaaggcaaggacacacccggcggguacugucugacgagauggaugcucaucgaggccgagcugaaaugcuuuggaaauaccgcugucgccaaguguaacgaaaaacaugaugaggaguucugcgacaugcuucggcuguuugauuucaauaagcaggcuauucagcgccucaaagccgaagcgcagaugagcauccaacugaucaacaaggccgugaaugcucuuauuaacgaccagcugaucaugaagaaucaccucagagacauuaugggcaucccuuauugcaacuacuccaaauauuguuaccugaaucacacaaccacagggaagaccagccugcccaaaugcugucucgugucuaacggauccuaccugaaugaaacgcauuucagcgaugacauugagcagcaagccgauaacaugaucacagagaugcuucagaaggaauauauggagcggcagggcaaaaccccucuggggcucgucgaccuguuuguuuucucuaccagcuuuuaccugaucuccauuuuccuucaccucgugaagaucccgacacaucgccacauugugggaaaacccugcccuaagccccauagacugaaucacaugggcaucuguucuugcggccuguauaagcagccugggguccccgugaaauggaagcggugaggacuagucccuguucccagagcccacuuuuuuuucuuuuuuugaaauaaaauagccugucuuucagaucuaaaaaaaaaaaaaaaaaaaaaaaaaaaaaaaaaaaaaaaaaaaaaaaaaaaaaaaaaaaaaaaaaaaaaaaaaaaaaaaaaaaaaaaaaaaaaaaaaaaa

SEQ ID NO: 38757 - RNA, 1736 nt, Artificial Sequence
  mRNA product Design a-2 (hSL-A64-N5) comprising derived and/or modified sequence from LASV(Josiah;Clade IV)__NP_694870__GPCmut11 (opt1)
aggagaguccgcucagccagguugcagaagcggcuuagcguguguccuaaucuucucucugcguguagguaggccugugccgcaaacaagcuuaccaugggccagaucgugaccuucuuccaggaggucccccacgugaucgaggaggugaugaacaucguccugaucgcccucagcgugcuggccgugcugaaggggcucuacaacuucgcgaccugcggccuggucgggcuggugacguuccuccugcugugcggccgcuccugcaccaccagccucuacaaggggguguacgagcugcagacccuggagcucaacauggagacgcugaacaugaccaugccgcuguccugcaccaagaacaacagccaccacuacaucauggucggcaacgagaccggccucgagcugacgcugaccaacaccuccaucaucaaccacaaguucugcaaccucagcgacgcccacaagaagaaccuguacgaccacgcccugauguccaucaucagcaccuuccaccucuccauccccaacuucaaccaguacgaggccaugagcugcgacuucaacgggggcaagaucuccgugcaguacaaccugagccacuccuacgccggggacgcggccaaccacugcggcacgguggccaacgggguccugcagaccuucaugcggauggccuggggcggcagcuacaucgcgcucgacuccgggcgcggcaacugggacugcaucaugaccagcuaccaguaccugaucauccagaacaccacgugggaggaccacugccaguucucccggcccagccccaucggguaccugggccuccugucccagcgcacccgggacaucuacaucagccgccggcugcucggcaccuucaccuggacgcugagcgacuccgaggggaaggacaccccgggcggguacugccugacccgcuggaugcucaucgaggccgagcugaagugcuucggcaacaccgccguggccaagugcaacgagaagcacgacgaggaguucugcgacaugcugcggcuguucgacuucaacaagcaggccauccagcgccugaaggcggaggcccagaugagcauccagcugaucaacaaggccgugaacgcccucaucaacgaccagcugaucaugaagaaccaccuccgggacaucauggggauccccuacugcaacuacuccaaguacugcuaccucaaccacacgaccaccggccgcaccagccugcccaagugcugccuggucuccaacggcagcuaccucaacgagacgcacuucuccgacgacaucgagcagcaggccgacaacaugaucaccgagaugcugcagaaggaguacauggagcggcaggggaagacgccccugggccucguggaccuguucguguucagcaccuccuucuaccugaucagcaucuuccugcaccucgucaagaucccgacccaccgccacaucguggggaaguccugccccaagccccaccggcugaaccacaugggcaucugcagcugcgggcuguacaagcagcccggcgugccggucaaguggaagcgcugaggacuagucccuguucccagagcccacuuuuuuuucuuuuuuugaaauaaaauagccugucuuucagaucucaaaggcucuuuucagagccaccaaaaaaaaaaaaaaaaaaaaaaaaaaaaaaaaaaaaaaaaaaaaaaaaaaaaaaaaaaaaaaaaagaauu

SEQ ID NO: 38758 - RNA, 1733 nt, Artificial Sequence
  mRNA product Design a-2 (hSL-A64-N5) comprising derived and/or modified sequence from LASV(LP;Clade I)__AAF86701__GPCmut11 (opt1)
aggagaguccgcucagccagguugcagaagcggcuuagcguguguccuaaucuucucucugcguguagguaggccugugccgcaaacaagcuuaccaugggccagaucaucaccuucuuccaggaggugccccacgucaucgaggaggugaugaacaucgugcugaucgcccucagccugcuggccauccucaaggggcuguacaacaucgcgaccugcggcaucaucgggcuggucgccuuccucuuccugugcggcaaguccugcagccugacgcucaagggcggguacgagcugcagacccuggagcucaacauggagacccugaacaugaccaugccgcuguccugcacgaagaacagcucccaccacuacauccgcgugggcaacgagaccgggcucgagcugacccugaccaacacgagcaucaucaaccacaaguucugcaaccucuccgacgcccacaagaagaaccuguacgaccacgcccugaugagcaucaucuccaccuuccaccucagcauccccaacuucaaccaguacgaggccauguccugcgacuucaacggcgggaagaucagcgugcaguacaaccugucccacagcuacgcgggcgacgccgccgagcacugcgggaccgucgccaacggcgugcugcagaccuucaugcggauggcguggggcgggcgcuacaucgcccucgacuccggcaaggggaacugggacugcaucaugacgagcuaccaguaccugaucauccagaacaccaccugggaggaccacugccaguucucccggcccagccccaucggcuaccugggccuccugucccagcgcacccgggacaucuacaucagccgccggcugcucgggacguucaccuggacccugagcgacuccgagggcaacgagacccccgggggcuacugccugacgcgcuggaugcucaucgaggccgagcugaagugcuucgggaacaccgccguggccaagugcaacgagaagcacgacgaggaguucugcgacaugcugcggcuguucgacuucaacaagcaggcgauccgccggcugaaggccgaggcccagaugagcauccagcugaucaacaaggccgucaacgcccucaucaacgaccagcugaucaugaagaaccaccuccgcgacaucaugggcauccccuacugcaacuacuccaaguacugcuaccucaaccacaccagcuccggccggaccagccugcccaagugcugccugaucuccaacgggagcuaccucaacgagacgcaguucuccgacgacaucgagcagcaggcggacaacaugaucaccgagaugcugcagaaggaguacaucgagcgccagggcaagaccccgcuggggcucguggacaucuucaucuucagcaccuccuucuaccugaucagcaucuuccugcaccugaucaagaucccgacgcaccggcacaucgugggcaagcccugccccaagccccaccgccucaaccacaugggggucugcuccugcggccuguacaagcacccgggcgugcccaccaaguggaagcggugaggacuagucccuguucccagagcccacuuuuuuuucuuuuuuugaaauaaaauagccugucuuucagaucucaaaggcucuuuucagagccaccaaaaaaaaaaaaaaaaaaaaaaaaaaaaaaaaaaaaaaaaaaaaaaaaaaaaaaaaaaaaaaaaagaauu

SEQ ID NO: 38759 - RNA, 1733 nt, Artificial Sequence
  mRNA product Design a-2 (hSL-A64-N5) comprising derived and/or modified sequence from LASV(803213;Clade II)__AAF86703__GPCmut11 (opt1)
aggagaguccgcucagccagguugcagaagcggcuuagcguguguccuaaucuucucucugcguguagguaggccugugccgcaaacaagcuuaccaugggccagaucaucaccuucuuccaggaggugccccacgucaucgaggaggugaugaacaucgugcugaucgcccucagccugcuggccauccucaaggggaucuacaacgucgcgaccugcggccuguucgggcugaucuccuuccuccugcugugcggccgcagcugcuccgugacguacaaggggguguacgagcuccagacccuggagcugaacauggccaaccucaacaugaccaugccgcugagcugcaccaagaacaacucccaccacuacaucauggucggcaacgagacgggccuggagcucacccugaccaacaccagcaucaucaaccacaaguucugcaaccuguccgacgcccacaagaagaaccucuacgaccacgcccugaugagcaucaucuccacguuccaccugagcauccccaacuucaaccaguacgaggccauguccugcgacuucaacgggggcaagaucagcgugcaguacaaccucucccacagcuucgcgguggacgccgccaaccacugcgggaccaucgccaacggcguccugcagaccuucaugcggauggcguggggcggguccuacaucgcccuggacagcggcaaggggaacugggacugcaucaugaccuccuaccaguaccucaucauccagaacacgaccugggaggaccacugccaguucagccgccccucccccaucggcuaccuggggcugcucagccagcggacccgcgacaucuacaucagccggcgccugcugggcaccuucacguggacccucuccgacagcgagggcaacgaggcccccgggggcuacugccugacccgguggaugcugaucgaggccgagcucaagugcuucgggaacaccgccguggcgaagugcaacgagaagcacgacgaggaguucugcgacaugcugcgccuguucgacuucaacaagcaggccaucaagcggcucaagacggaggcccagauguccauccagcugaucaacaaggccgugaacgcccugaucaacgaccagcucaucaugaagaaccaccuccgcgacaucaugggcauccccuacugcaacuacagccgguacugcuaccugaaccacaccgucaccgggaagaccucccugccccgcugcugccuggugagcaacggcuccuaccugaacgagacgcacuucagcgacgacaucgagcagcaggcggacaacaugaucaccgagaugcuccagaaggaguacauggaccggcagggcaagaccccgcuggggcugguggaccucuucgucuucuccaccagcuucuaccugaucuccaucuuccugcaccuggugaagaucccgacgcaccgccacaucgugggcaagcccugccccaagccccaccggcucaaccacauggggaucugcagcugcggccuguacaagcacccggggguccccgugaaguggaagcgcugaggacuagucccuguucccagagcccacuuuuuuuucuuuuuuugaaauaaaauagccugucuuucagaucucaaaggcucuuuucagagccaccaaaaaaaaaaaaaaaaaaaaaaaaaaaaaaaaaaaaaaaaaaaaaaaaaaaaaaaaaaaaaaaaagaauu

SEQ ID NO: 38760 - RNA, 1733 nt, Artificial Sequence
  mRNA product Design a-2 (hSL-A64-N5) comprising derived and/or modified sequence from LASV(GA391;Clade III)__CAA36645__GPCmut11 (opt1)
aggagaguccgcucagccagguugcagaagcggcuuagcguguguccuaaucuucucucugcguguagguaggccugugccgcaaacaagcuuaccaugggccagaucgugaccuucuuccaggaggucccccacgugaucgaggaggugaugaacaucguccugaucgcccucagcauccuggccauccugaaggggcucuacaacguggcgaccugcggccugaucgggcuggugacguuccuccugcuguccggccgcagcugcucccucaucuacaaggggaccuacgagcugcagacccuggagcucaacauggagacccugaacaugacgaugccgcugagcugcaccaagaacaacucccaccacuacauccgggucggcaacgagaccggccucgagcugacccugacgaacaccagcauccucaaccacaaguucugcaaccuguccgacgcccacaagcgcaaccuguacgaccacagccucauguccaucaucagcaccuuccaccuguccauccccaacuucaaccaguacgaggccaugagcugcgacuucaacgggggcaagaucaccgugcaguacaaccugucccacagcuucgccguggacgccgcggggcacugcggcacgcucgccaacgggguccugcagaccuucaugcggauggccuggggcggcuccuacaucgcccuggacagcgggcgcggcaacugggacugcaucaugaccuccuaccaguaccucaucauccagaacaccacgugggacgaccacugccaguucagccggcccucccccaucggguaccugggccugcucagccagcgcacccgggacaucuacaucagccgccggcugcugggcaccuucaccuggacgcucuccgacagcgaggggaacgagaccccgggcggguacugccugacccgcuggaugcugaucgaggcggagcucaagugcuucggcaacaccgccguggccaagugcaacgagaagcacgacgaggaguucugcgacaugcugcggcuguucgacuucaacaagcaggccauccgccggcucaagacggaggcccagauguccauccagcugaucaacaaggcggugaacgcccugaucaacgaccagcucaucaugaagaaccaccuccgcgacaucauggggauccccuacugcaacuacagccgguacugcuaccugaaccacaccuccaccggcaagaccagccugccccgcugcugccugaucuccaacggcagcuaccugaacgagacgaaguucuccgacgacaucgagcagcaggccgacaacaugaucaccgagaugcuccagaaggaguacaucgaccggcaggggaagacgccccugggccuggucgaccuguucguguucagcaccuccuucuaccucaucagcaucuuccugcaccuggugaagaucccgacccaccgccacaucgucgggaagcccugccccaagccccaccggcucaaccacaugggcaucugcuccugcgggcuguacaagcagccgggcgugcccgugcgcuggaagcggugaggacuagucccuguucccagagcccacuuuuuuuucuuuuuuugaaauaaaauagccugucuuucagaucucaaaggcucuuuucagagccaccaaaaaaaaaaaaaaaaaaaaaaaaaaaaaaaaaaaaaaaaaaaaaaaaaaaaaaaaaaaaaaaaagaauu

SEQ ID NO: 38761 - RNA, 1736 nt, Artificial Sequence
  mRNA product Design a-2 (hSL-A64-N5) comprising derived and/or modified sequence from LASV(AV;Clade V)__CCA30314__GPCmut11 (opt1)
aggagaguccgcucagccagguugcagaagcggcuuagcguguguccuaaucuucucucugcguguagguaggccugugccgcaaacaagcuuaccaugggccagaucgugaccuucuuccaggaggucccccacgugaucgaggaggugaugaacaucguccugaucgcccucagcauccuggccgugcugaaggggcucuacaacaucgcgaccugcggccugaucgggcugaucacguuccuccugcugugcggccgcuccugcagcuccaaccucuacaaggggguguacgagcugcagagccuggaccucaacauggagacccugaacaugaccaugccgcuguccugcaccaagaacaacagccaccacuacauccgggucggcaacgacacgggccucgagcugacccugaccaacaccuccauccucaaccacaaguucugcaaccugagcgacgcccacaagaaggaccuguacgaccacgcccucauguccaucaucagcacguuccaccuguccauccccaacuucaaccaguacgaggccaugagcugcgacuucaacgggggcaagaucuccgugcaguacaaccugagccacuccuacgccaucgacgcggccaaccacugcgggaccguggccaacggcauccuccagaccuucaugcgcauggccuggggcgggagcuacaucgcgcuggacuccggccgggggaacugggacugcaucaugaccagcuaccaguaccugaucauccagaacacgaccugggagaaccacugccaguucucccgccccagccccaucggcuaccucgggcugcugagccagcggacccgcgacaucuacaucucccggcgccuccugggcaccuucacguggacccugagcgacuccgagggcaacgccacccccgggggcuacugccucacccgguggaugcugaucgaggccgagcugaagugcuucgggaacacggccgucgccaagugcaacgagaagcacgacgaggaguucugcgacaugcuccgccuguucgacuucaacaagcaggcgaucagccggcugaaguccgaggcccagaugagcauccagcucaucaacaaggccgugaacgcccugaucaacgaccagcugaucaugaagaaccaccuccgcgacaucaugggcauccccuacugcaacuacuccaaguacugcuaccugaaccacaccaucaccgggaagaccagccugcccaagugcugccucguguccaacggcagcuaccugaacgagacgcacuucuccgacgacaucgagcagcaggccgacaacaugaucaccgagaugcugcagaaggaguacauggagcggcagggcaagaccccgcucgggcuggucgaccuguucguguucagcaccuccuucuaccugaucagcaucuuccuccgccuggugaagaucccgacgcaccggcacaucgucggcaagcccugccccaagccccaccgccugaaccacauggggaucugcuccugcggccucuacaagcagccgggggugcccgugcgguggaagcgcugaggacuagucccuguucccagagcccacuuuuuuuucuuuuuuugaaauaaaauagccugucuuucagaucucaaaggcucuuuucagagccaccaaaaaaaaaaaaaaaaaaaaaaaaaaaaaaaaaaaaaaaaaaaaaaaaaaaaaaaaaaaaaaaaagaauu

SEQ ID NO: 38762 - RNA, 1733 nt, Artificial Sequence
  mRNA product Design a-2 (hSL-A64-N5) comprising derived and/or modified sequence from LASV(Togo/2016/7082;Clade VI)__AMR44577__GPCmut11 (opt1)
aggagaguccgcucagccagguugcagaagcggcuuagcguguguccuaaucuucucucugcguguagguaggccugugccgcaaacaagcuuaccaugggccagaucaucaccuucuuccaggaggugccccacgucaucgaggaggugaugaacaucgugcugaucgcccucagccugcuggccauccucaagggggucuacaacguggcgaccugcggcaucaucgggcuggugacguuccuguuccucugcggccgcuccugcagccugaucuacaagggguccuacgagcugcagacccucgagcugaacauggagacccugaacaugaccaugccgcucagcugcacgaagaacuccagccaccacuacauccgggucggcaacgagaccggccuggagcugacccucaccaacacguccaucaucaaccacaaguucugcaaccugagcgacgcccacaagcgcaaccuguacgaccacgcccucauguccauccugagcaccuuccaccuguccauccccaacuucaaccaguacgaggccaugagcugcgacuucaacgggggcaagaucuccgugcaguacaaccucagccacgccuacgcgguggacgccgccgagcacugcgggaccgucgccaacggcgugcugcagaccuucaugcggauggcguggggcggguccuacaucgcccuggacagcggccgcgggaacugggacugcaucaugacguccuaccaguaccucaucauccagaacaccaccugggaggaccacugccaguucagccggcccucccccaucggcuaccuggggcugcucagccagcgcacccgggacaucuacaucagccgccggcugcugggcacguucaccuggacccucuccgacagcgagggcaacgagacccccgggggcuacugccugacgcgcuggaugcugaucgaggccgagcucaagugcuucgggaacaccgccguggccaagugcaacgagaagcacgacgaggaguucugcgacaugcugcggcuguucgacuucaacaagcaggcgauccagcgccucaaguccgaggcccagaugagcauccagcugaucaacaaggccgucaacgcccugaucaacgaccagcucaucaugaagaaccaccuccgggacaugaugggcauccccuacugcaacuacuccaaguacugcuaccugaaccacaccagcuccgggcgcaccagccugcccaagugcugccugguguccaacggcagcuaccugaacgagacgcacuucuccgacgacaucgagcagcaggccgacaacaugaucaccgagaugcuccagaaggaguacaucgaccggcagggcaagaccccgcuggggcugguggaccucuucgucuucagcaccuccuucuaccugaucagcaucuuccugcaccugaucaagaucccgacgcaccgccacaucgugggcaagcccugccccaagccccaccggcucaaccacauggggaucugcuccugcggccuguacaagcagccgggggugcccacccgcuggaagcggugaggacuagucccuguucccagagcccacuuuuuuuucuuuuuuugaaauaaaauagccugucuuucagaucucaaaggcucuuuucagagccaccaaaaaaaaaaaaaaaaaaaaaaaaaaaaaaaaaaaaaaaaaaaaaaaaaaaaaaaaaaaaaaaaagaauu

SEQ ID NO: 38763 - RNA, 1733 nt, Artificial Sequence
  mRNA product Design a-2 (hSL-A64-N5) comprising derived and/or modified sequence from LASV(KAK-428;Clade n.d. (VII))__ANH09740__GPCmut11 (opt1)
aggagaguccgcucagccagguugcagaagcggcuuagcguguguccuaaucuucucucugcguguagguaggccugugccgcaaacaagcuuaccaugggccagaucgugaccuucuuccaggaggucccccacgugaucgaggaggugaugaacaucguccugaucgcccucagccugcuggccauccucaaggggcuguacaacuucgcgaccugcggcgugaucgggcugaucacguuccuccugcugugcggccgcuccugcagcgccaccuacaaggggcaguacgagcuccagacccuggagcugaacauggagucccucaacaugaccaugccgcugagcugcacgaagaacaacucccaccacuacauccgggccggcaacaacaccggccuggagcucacccugaccaacacgagcaucaucucccacaaguucugcaaccugagcgacgcccacaagaagaaccucuacgaccacacccugauguccaucaucaccaccuuccaccugagcauccccaacuucaaccaguacgaggccauguccugcgacuucaacgggggcaagaucagcauccaguacaaccucucccacagcuacgcgggggacgccgcccagcacugcggcacgguggccaacgggguccugcagaccuucaugcgcauggcguggggcggcuccuaccuggcccucgacagcgggcggcgcggcugggacugcaucaucuccagcuaccaguaccugaucauccagaacaccaccugggacgaccacugccaguucucccggcccagccccaucggguaccugggcuucgugagccagaagacgcgcgacaucuacaucucccggcgccuccugggcaccuucaccuggacccugagcgacuccgaggggcacgacaugccgggcggguacugccucacgcgguggaugcugaucgaggccgaccugaagugcuucggcaacaccgccguggccaagugcaacgagaagcacgacgaggaguucugcgacauguggcgccucuucgacuucaacaagcaggcgauccagcggcugaaggccgaggcccagaugaacauccagcugaucaacaaggccgucaacgcccucaucaacgaccagcugaugaugaagaaccaccuccgcgacaucauggggauccccuacugcaacuacagcaaguucugcuaccugaacaacaccaccacgggccggaccucccugccccgcugcugccugaucagcaacggcuccuaccucaacgagacccacuucagcgacgacaucgagcagcaggcggacaacaugaucaccgagaugcugcagaaggaguacauggaccggcaggggaagacgccccugggccucguggaccuguucguguucuccaccagcuucuaccugaucaccaucuuccuccaccuggucaagaucccgacccaccgccacaucguggggaagcccugccccaagccccaccggcugaaccacaugggcaucugcuccugcgggcuguacaagcagccgggcgugcccguccgcuggaagcggugaggacuagucccuguucccagagcccacuuuuuuuucuuuuuuugaaauaaaauagccugucuuucagaucucaaaggcucuuuucagagccaccaaaaaaaaaaaaaaaaaaaaaaaaaaaaaaaaaaaaaaaaaaaaaaaaaaaaaaaaaaaaaaaaagaauu

SEQ ID NO: 38764 - RNA, 1733 nt, Artificial Sequence; identical to SEQ ID NO: 38758
  mRNA product Design a-2 (hSL-A64-N5) comprising derived and/or modified sequence from LASV(Pinneo-NIG-1969;Clade I)__AIT17836__GPCmut11 (opt1)

SEQ ID NO: 38765 - RNA, 1733 nt, Artificial Sequence
  mRNA product Design a-2 (hSL-A64-N5) comprising derived and/or modified sequence from LASV(ISTH0009-NIG-2011;Clade II)__AIT17404__GPCmut11 (opt1)
aggagaguccgcucagccagguugcagaagcggcuuagcguguguccuaaucuucucucugcguguagguaggccugugccgcaaacaagcuuaccaugggccagaucaucaccuucuuccaggaggugccccacgucaucgaggaggugaugaacaucgugcugaucgcccucagccugcuggccauccucaaggggaucuacaacgucgcgaccugcggccuguucgggcugguguccuuccuccugcugugcggccgcagcugcuccacgaccuacaaggggguguacgagcuccagacccuggagcuggacauggccagccucaacaugaccaugccgcuguccugcacgaagaacaacagccaccacuacaucauggucggcaacgagaccggccuggagcucacccugaccaacacguccaucaucaaccacaaguucugcaaccugagcgacgcccacaagaagaaccucuacgaccacgcccugauguccaucaucagcaccuuccaccuguccauccccaacuucaaccaguacgaggccaugagcugcgacuucaacgggggcaagaucuccgugcaguacaaccucagccacgcguacgccguggacgccgccaaccacugcgggaccaucgcgaacggcguccugcagaccuucaugcggauggccuggggcggguccuacaucgcccuggacagcggcaagggguccugggacugcaucaugacgagcuaccaguaccucaucauccagaacaccaccugggaggaccacugccaguucucccgccccagccccaucggcuaccuggggcugcucagccagcggacccgcgacaucuacaucucccggcgccugcugggcacguucaccuggacccucagcgacuccgagggcaacgagacccccgggggcuacugccugacgcgguggaugcugaucgaggccgagcucaagugcuucgggaacaccgccguggcgaagugcaacgagaagcacgacgaggaguucugcgacaugcugcgccuguucgacuucaacaagcaggccauccggcgccucaagaccgaggcccagaugagcauccagcugaucaacaaggccgugaacgcccugaucaacgaccagcucaucaugaagaaccaccuccgggacaucaugggcaucccguacugcaacuacuccaaguacugcuaccugaaccacaccgucacggggaagaccagccugccccgcugcugccugguguccaacggcagcuaccugaacgagacccacuucuccgacgacaucgagcagcaggcggacaacaugaucaccgagcuccugcagaaggaguacauggaccggcagggcaagacgccccuggggcucguggaccuguucgucuucagcaccuccuucuaccugaucagcaucuuccugcaccucaucaagaucccgacccaccgccacaucaccggcaagcccugccccaagccccaccggcugaaccacauggggaucugcuccugcggccuguacaagcacccgggggugcccgugaaguggaagcgcugaggacuagucccuguucccagagcccacuuuuuuuucuuuuuuugaaauaaaauagccugucuuucagaucucaaaggcucuuuucagagccaccaaaaaaaaaaaaaaaaaaaaaaaaaaaaaaaaaaaaaaaaaaaaaaaaaaaaaaaaaaaaaaaaagaauu

SEQ ID NO: 38766 - RNA, 1733 nt, Artificial Sequence
  mRNA product Design a-2 (hSL-A64-N5) comprising derived and/or modified sequence from LASV(ISTH2010-NIG-2012;Clade II)__AIT17482__GPCmut11 (opt1)
aggagaguccgcucagccagguugcagaagcggcuuagcguguguccuaaucuucucucugcguguagguaggccugugccgcaaacaagcuuaccaugggccagaucaucaccuucuuccaggaggugccccacgucaucgaggaggugaugaacaucgugcugaucgcccucagccugcuggccauccucaaggggaucuacaacgucgcgaccugcggccuguucgggcugguguccuuccuccugcugugcggccgcagcugcuccacgaccuacaaggggguguacgagcuccagacccuggagcuggacauggccagccucaacaugaccaugccgcuguccugcacgaagaacaacagccaccacuacaucauggucggcaacgagaccggccuggagcucacccugaccaacacguccaucaucaaccacaaguucugcaaccugagcgacgcccacaagaagaaccucuacgaccacgcccugauguccaucaucagcaccuuccaccuguccauccccaacuucaaccaguacgaggccaugagcugcgacuucaacgggggcaagaucuccgugcaguacaaccucagccacgcguacgccguggacgccgccaaccacugcgggaccaucgcgaacggcguccugcagaccuucaugcggauggccuggggcggguccuacaucgcccuggacagcggcaagggguccugggacugcaucaugacgagcuaccaguaccucaucauccagaacaucaccugggaggaccacugccaguucucccgccccagccccaucggcuaccuggggcugcucagccagcggacccgcgacaucuacaucucccggcgccugcugggcaccuucacguggacccucagcgacuccgagggcaacgagacccccgggggcuacugccugacccgguggaugcugaucgaggccgagcucaagugcuucgggaacacggccguggcgaagugcaacgagaagcacgacgaggaguucugcgacaugcugcgccuguucgacuucaacaagcaggccauccggcgccucaagaccgaggcccagaugagcauccagcugaucaacaaggccgugaacgcccugaucaacgaccagcucaucaugaagaaccaccuccgggacaucaugggcauccccuacugcaacuacuccaaguacugcuaccugaaccacaccgucaccgggaagacgagccugccccgcugcugccugguguccaacggcagcuaccugaacgagacccacuucuccgacgacaucgagcagcaggcggacaacaugaucaccgagcuccugcagaaggaguacaucgaccggcagggcaagaccccgcuggggcucguggaccuguucgucuucagcacguccuucuaccugaucagcaucuuccugcaccucgugaagaucccgacccaccgccacguggucggcaagcccugccccaagccccaccggcugaaccacauggggaucugcuccugcggccuguacaagcacccgggggugcccgugaaguggaagcgcugaggacuagucccuguucccagagcccacuuuuuuuucuuuuuuugaaauaaaauagccugucuuucagaucucaaaggcucuuuucagagccaccaaaaaaaaaaaaaaaaaaaaaaaaaaaaaaaaaaaaaaaaaaaaaaaaaaaaaaaaaaaaaaaaagaauu

SEQ ID NO: 38767 - RNA, 1733 nt, Artificial Sequence
  mRNA product Design a-2 (hSL-A64-N5) comprising derived and/or modified sequence from LASV(Lassa virus/H.sapiens-wt/NGA/2015/ISTH_0543;Clade II)__AVO03639__GPCmut11 (opt1)
aggagaguccgcucagccagguugcagaagcggcuuagcguguguccuaaucuucucucugcguguagguaggccugugccgcaaacaagcuuaccaugggccagaucaucaccuucuuccaggaggugccccacgucaucgaggaggugaugaacaucgugcugaucgcccucagccugcuggccauccucaaggggaucuacaacgucgcgaccugcggccuguucgggcugguguccuuccuccugcugugcggccgcagcugcuccacgaccuacaaggggguguacgagcuccagacccuggagcuggacauggccaaccucaacaugaccaugccgcugagcugcacgaagaacaacucccaccacuacaucauggucggcaacgagaccggccuggagcucacccugaccaacacgagcaucaucaaccacaaguucugcaaccuguccgacgcccacaagaagaaccucuacgaccacgcccugaugagcaucaucuccaccuuccaccugagcauccccaacuucaaccaguacgaggccauguccugcgacuucaacgggggcaagaucagcgugcaguacaaccucucccacaccuacgcgguggacgccgccaaccacugcgggaccaucgccaacggcguccugcagacguucaugcggauggcguggggcgggagcuacaucgcccuggacuccggcaaggggagcugggacugcaucaugaccuccuaccaguaccucgugauccagaacaccaccugggaggaccacugccaguucagccgccccucccccaucggcuaccuggggcugcucagccagcggacgcgcgacaucuacaucagccggcgccugcugggcaccuucaccuggacccucuccgacagcgagggcaacgagacgcccgggggcuacugccugacccgguggaugcugaucgaggccgagcucaagugcuucgggaacaccgccguggccaagugcaacgagaagcacgacgaggaguucugcgacaugcugcgccuguucgacuucaacaagcaggcgauccggcgccucaagaccgaggcccagauguccauccagcugaucaacaaggccgucaacgcccugaucaacgaccagcucaucaugaagaaccaccuccgggacaucaugggcauccccuacugcaacuacagcaaguacugcuaccugaaccacacggugaccgggaagaccucccugccccgcugcugccuggugagcaacggcuccuaccugaacgagacccacuucagcgacgacaucgagcagcaggccgacaacaugaucacggagcuccugcagaaggaguacaucgaccggcagggcaagaccccgcuggggcucgucgaccuguucguguucuccaccagcuucuaccugaucuccaucuuccugcaccucgugaagaucccgacccaccgccacaucacgggcaagcccugccccaagccccaccggcugaaccacauggggaucugcagcugcggccuguacaagcacccggggguccccgugaaguggaagcgcugaggacuagucccuguucccagagcccacuuuuuuuucuuuuuuugaaauaaaauagccugucuuucagaucucaaaggcucuuuucagagccaccaaaaaaaaaaaaaaaaaaaaaaaaaaaaaaaaaaaaaaaaaaaaaaaaaaaaaaaaaaaaaaaaagaauu

SEQ ID NO: 38768 - RNA, 1733 nt, Artificial Sequence
  mRNA product Design a-2 (hSL-A64-N5) comprising derived and/or modified sequence from LASV(Lassa virus/H.sapiens-wt/NGA/2016/ISTH_0009;Clade II)__AVO03571__GPCmut11 (opt1)
aggagaguccgcucagccagguugcagaagcggcuuagcguguguccuaaucuucucucugcguguagguaggccugugccgcaaacaagcuuaccaugggccagaucaucaccuucuuccaggaggugccccacgucaucgaggaggugaugaacaucgugcugaucgcccucagccugcuggccauccucaaggggaucuacaacgucgcgaccugcggccugcuggggcucguguccuuccugcugcucugcggccgcagcugcuccacgaccuacaaggggguguacgagcugcagacccuggagcucgacauggccagccugaacaugaccaugccgcuguccugcacgaagaacaacagccaccacuacaucauggucggcaacgagaccggccucgagcugacccugaccaacacguccaucaucaaccacaaguucugcaaccucagcgacgcccacaagaagaaccuguacgaccacgcccugauguccaucaucagcaccuuccaccucuccauccccaacuucaaccaguacgaggccaugagcugcgacuucaacgggggccggaucuccgugcaguacaaccugagccacuccuacgcgguggacgccgccaaccacugcgggaccaucgccaacggcguccugcagaccuucaugcgcauggcguggggcgggagcuacaucgcccucgacuccggcaaggggagcugggacugcaucaugacguccuaccaguaccugaucauccagaacaccaccugggaggaccacugccaguucagccggcccagccccaucggcuaccuggggcuccugucccagcgcacccgggacaucuacaucagccgccggcugcucggcacguucaccuggacccuguccgacagcgagggcaacgagacccccgggggcuacugccugacgcgcuggaugcucaucgaggccgagcugaagugcuucgggaacaccgccguggccaagugcaacgagaagcacgacgaggaguucugcgacaugcugcggcuguucgacuucaacaagcaggcgauccgccggcugaagaccgaggcccagauguccauccagcugaucaacaaggccgugaacgcccucaucaacgaccagcugaucaugaagaaccaccuccgcgacaucaugggcaucccguacugcaacuacagcaaguacugcuaccucaaccacaccgucacggggaagaccucccugccccggugcugccuggugagcaacggcuccuaccucaacgagacccacuucagcgacgacaucgagcagcaggccgacaacaugaucaccgagcugcugcagaaggaguacaucgaccgccagggcaagacgccccucgggcugguggaccuguucgucuucuccaccagcuucuaccugaucuccaucuuccuccaccuggugaagaucccgacccaccggcacaucaccggcaagcccugccccaagccccaccgccugaaccacauggggaucugcagcugcggccucuacaaccacccgggggugcccgucaaguggaagcggugaggacuagucccuguucccagagcccacuuuuuuuucuuuuuuugaaauaaaauagccugucuuucagaucucaaaggcucuuuucagagccaccaaaaaaaaaaaaaaaaaaaaaaaaaaaaaaaaaaaaaaaaaaaaaaaaaaaaaaaaaaaaaaaaagaauu

SEQ ID NO: 38769 - RNA, 1733 nt, Artificial Sequence
  mRNA product Design a-2 (hSL-A64-N5) comprising derived and/or modified sequence from LASV(Lassa virus/H.sapiens-wt/NGA/2016/ISTH_0017;Clade II)__AVO03567__GPCmut11 (opt1)
aggagaguccgcucagccagguugcagaagcggcuuagcguguguccuaaucuucucucugcguguagguaggccugugccgcaaacaagcuuaccaugggccagaucaucaccuucuuccaggaggugccccacgucaucgaggaggugaugaacaucgugcugaucgcccucagccugcuggccauccucaaggggaucuacaacgucgcgaccugcggccuguucgggcugguguccuuccuccugcugugcggccgcagcugcuccacgaccuacaaggggguguacgagcuccagacccuggagcuggacauggccagccucaacaugaccaugccgcuguccugcacgaagaacaacagccaccacuacaucauggucggcaacgagaccggccuggagcucacccugaccaacacguccaucaucaaccacaaguucugcaaccugagcgacgcccacaagaagaaccucuacgaccacgcccugauguccaucaucagcaccuuccaccuguccauccccaacuucaaccaguacgaggccaugagcugcgacuucaacgggggcaagaucuccgugcaguacaaccucagccacaccuacgcgaucgacgccgccaaccacugcgggaccaucgccaacggcgugcugcagacguucaugcggauggcguggggcggguccuacaucgcccuggacagcggcaagggguccugggacugcaucaugaccagcuaccaguaccucaucauccagaacaccaccugggaggaccacugccaguucucccgccccagccccaucggcuaccuggggcugcucagccagcggacgcgcgacaucuacaucucccggcgccugcugggcaccuucaccuggacccucagcgacuccgagggcaacgagacgcccgggggcuacugccugacccgguggaugcugaucgaggccgagcucaagugcuucgggaacaccgccgucgccaagugcaacgagaagcacgacgaggaguucugcgacaugcugcgccuguucgacuucaacaagcaggcgauccggcgccucaagaccgaggcccagaugagcauccagcugaucaacaaggccgugaacgcccugaucaacgaccagcucaucaugaagaaccaccuccgggacaucaugggcauccccuacugcaacuacuccaaguacugcuaccugaaccacacggugaccgggaagaccagccugccccgcugcugccuggucuccaacggcagcuaccugaacgagacccacuucuccgacgacaucgagcagcaggccgacaacaugaucacggagcuccugcagaaggaguacauggaccggcagggcaagaccccgcuggggcucguggaccuguucguguucagcaccuccuucuaccugaucagcaucuuccugcaccucguccgcaucccgacccaccggcacgugaucggcaagcccugccccaagccccaccgccugaaccacauggggaucugcuccugcggccuguacaagcacccgggggugcccgucaaguggaagcggugaggacuagucccuguucccagagcccacuuuuuuuucuuuuuuugaaauaaaauagccugucuuucagaucucaaaggcucuuuucagagccaccaaaaaaaaaaaaaaaaaaaaaaaaaaaaaaaaaaaaaaaaaaaaaaaaaaaaaaaaaaaaaaaaagaauu

SEQ ID NO: 38770 - RNA, 1733 nt, Artificial Sequence
  mRNA product Design a-2 (hSL-A64-N5) comprising derived and/or modified sequence from LASV(Lassa virus/H.sapiens-wt/NGA/2018/ISTH_0959;Clade II)__AVV65099__GPCmut11 (opt1)
aggagaguccgcucagccagguugcagaagcggcuuagcguguguccuaaucuucucucugcguguagguaggccugugccgcaaacaagcuuaccaugggccagaucaucaccuucuuccaggaggugccccacgucaucgaggaggugaugaacaucgugcugaucgcccucagccugcuggccauccucaaggggaucuacaacgucgugaccugcggccuguucgggcugguguccuuccuccugcugugcggccgcagcugcuccacgaccuacaagggggucuacgagcuccagacccuggagcuggacauggcgagccucaacaugaccaugccgcuguccugcacgaagaacaacagccaccacuacaucauggugggcaacgagaccggccuggagcucacccugaccaacacguccaucaucaaccacaaguucugcaaccugagcgacgcccacaagaagaaccucuacgaccacgcccugauguccaucaucagcaccuuccaccuguccauccccaacuucaaccaguacgaggccaugagcugcgacuucaacgggggcaagaucuccgugcaguacaaccucagccacgccuacgcgaucgacgccgccaaccacugcgggaccaucgccaacggcguccugcagaccuucaugcggauggcguggggcggguccuacaucgcccuggacagcggcaagggguccugggacugcaucaugacgagcuaccaguaccucaucauccagaacaccaccugggaggaccacugccaguucucccgccccagccccaucggcuaccuggggcugcucagccagcggacccgcgacaucuacaucucccggcgccugcugggcacguucaccuggacccucagcgacuccgagggcaacgagacccccgggggcuacugccugacgcgguggaugcugaucgaggccgagcucaagugcuucgggaacaccgccguggccaagugcaacgagaagcacgacgaggaguucugcgacaugcugcgccuguucgacuucaacaagcaggcgauccggcgccucaagaccgaggcccagaugagcauccagcugaucaacaaggccgugaacgcccugaucaacgaccagcucaucaugaagaaccaccuccgggacaucaugggcaucccguacugcaacuacuccaaguacugcuaccugaaccacaccgucacggggaagaccagccugccccgcugcugccugguguccaacggcagcuaccugaacgagacccacuucuccgacgacaucgagcagcaggccgacaacaugaucaccgagcuccugcagaaggaguacaucgaccggcagggcaagacgccccuggggcucguggaccuguucgucuucagcaccuccuucuaccugaucagcaucuuccugcaccucgugaagaucccgacccaccgccacgugaucggcaagcccugccccaagccccaccggcugaaccacauggggaucugcuccugcggccuguacaagcacccggggguccccgugaaguggaagcgcugaggacuagucccuguucccagagcccacuuuuuuuucuuuuuuugaaauaaaauagccugucuuucagaucucaaaggcucuuuucagagccaccaaaaaaaaaaaaaaaaaaaaaaaaaaaaaaaaaaaaaaaaaaaaaaaaaaaaaaaaaaaaaaaaagaauu

SEQ ID NO: 38771 - RNA, 1733 nt, Artificial Sequence
  mRNA product Design a-2 (hSL-A64-N5) comprising derived and/or modified sequence from LASV(LASV003-NIG-2008;Clade II)__AIT17580__GPCmut11 (opt1)
aggagaguccgcucagccagguugcagaagcggcuuagcguguguccuaaucuucucucugcguguagguaggccugugccgcaaacaagcuuaccaugggccagaucaucaccuucuuccaggaggugccccacgucaucgaggaggugaugaacaucgugcugaucgcccucagccugcuggccauccucaaggggaucuacaacgucgcgaccugcggccuguucgggcugguguccuuccuccugcugugcggccgcagcugcuccacgaccuacaaggggguguacgagcuccagacccuggagcuggacauggccagccucaacaugaccaugccgcuguccugcacgaagaacaacagccaccacuacaucauggucggcaacgagaccggccuggagcucacccugaccaacacguccaucaucaaccacaaguucugcaaccugagcgacgcccacaagaagaaccucuacgaccacgcccugauguccaucaucagcaccuuccaccuguccauccccaacuucaaccaguacgaggccaugagcugcgacuucaacgggggcaagaucuccgugcaguacaaccucagccacaccuacgcgguggacgccgccaaccacugcgggaccaucgccaacggcguccugcagacguucaugcggauggcguggggcggguccuacaucgcccuggacagcggcaagggguccugggacugcaucaugaccagcuaccaguaccucaucauccagaacaccaccugggaggaccacugccaguucucccgccccagccccaucggcuaccuggggcugcucagccagcggacgcgcgacaucuacaucucccggcgccugcugggcaccuucaccuggacccucagcgacuccgagagcaacgagacgccgggcggguacugccugacccgguggaugcugaucgaggccgagcucaagugcuucggcaacaccgccguggccaagugcaacgagaagcacgacgaggaguucugcgacaugcugcgccuguucgacuucaacaagcaggcgauccggcgccucaaggccgaggcccagauguccauccagcugaucaacaaggccgugaacgcccugaucaacgaccagcucaucaugaagaaccaccuccgggacaucauggggauccccuacugcaacuacagcaaguacugcuaccugaaccacaccgucacgggccgcaccucccugccccggugcugccuggugagcaacggguccuaccugaacgagacccacuucagcgacgacaucgagcagcaggcggacaacaugaucaccgagcuccugcagaaggaguacauggaccgccagggcaagacgccccugggccucguggaccuguucgucuucuccaccagcuucuaccugaucuccaucuuccugcaccucgugaagaucccgacccaccggcacgugaucgggaagcccugccccaagccccaccgccugaaccacaugggcaucugcagcugcgggcuguacaagcacccgggcguccccgugaaguggaagcggugaggacuagucccuguucccagagcccacuuuuuuuucuuuuuuugaaauaaaauagccugucuuucagaucucaaaggcucuuuucagagccaccaaaaaaaaaaaaaaaaaaaaaaaaaaaaaaaaaaaaaaaaaaaaaaaaaaaaaaaaaaaaaaaaagaauu

SEQ ID NO: 38772 - RNA, 1733 nt, Artificial Sequence
  mRNA product Design a-2 (hSL-A64-N5) comprising derived and/or modified sequence from LASV(LASV035-NIG-2009;Clade II)__AIT17588__GPCmut11 (opt1)
aggagaguccgcucagccagguugcagaagcggcuuagcguguguccuaaucuucucucugcguguagguaggccugugccgcaaacaagcuuaccaugggccagaucaucaccuucuuccaggaggugccccacgucaucgaggaggugaugaacaucgugcugaucgcccucagccugcuggccauccucaaggggaucuacaacgucgcgaccugcggccuguucgggcugguguccuuccuccugcugugcggccgcagcugcuccacgaccuacaaggggguguacgagcuccagacccuggagcuggacauggccagccucaacaugaccaugccgcuguccugcacgaagaacaacagccaccacuacaucauggucggcaacgagaccggccuggagcucacccugaccaacacguccaucaucaaccacaaguucugcaaccugagcgacgcccacaagaagaaccucuacgaccacgcccugauguccaucaucagcaccuuccaccuguccauccccaacuucaaccaguacgaggccaugagcugcgacuucaacgggggcaagaucuccgugcaguacaaccucagccacgcguacgccguggacgccgccaaccacugcgggaccaucgcgaacggcguccugcagaccuucaugcggauggccuggggcggguccuacaucgcccuggacagcggcaagggguccugggacugcaucaugacgagcuaccaguaccucaucauccagaacaccaccugggaggaccacugccaguucucccgccccagccccaucggcuaccuggggcugcucagccagcggacccgcgacaucuacaucucccggcgccugcugggcacguucaccuggacccucagcgacuccgagggcaacgagacccccgggggcuacugccugacgcgguggaugcugaucgaggccgagcucaagugcuucgggaacaccgccguggcgaagugcaacgagaagcacgacgaggaguucugcgacaugcugcgccuguucgacuucaacaagcaggccauccggcgccucaaggccgaggcccagaugagcauccagcugaucaacaaggccgugaacgcgcugaucaacgaccagcucaucaugaagaaccaccuccgggacaucaugggcauccccuacugcaacuacuccaaguacugcuaccugaaccacaccgucaccgggaagacgagccugccccgcugcugccugguguccaacggcagcuaccugaacgagacccacuucuccgacgacaucgagcagcaggccgacaacaugaucaccgagcuccugcagaaggaguacaucgaccggcagggcaagaccccgcuggggcucguggaccuguucgucuucagcacguccuucuaccugaucagcaucuuccugcaccucgugaagaucccgacccaccgccacgugaucggcaagcccugccccaagccccaccggcugaaccacauggggaucugcuccugcggccuguacaagcacccggggguccccgugaaguggaagcgcugaggacuagucccuguucccagagcccacuuuuuuuucuuuuuuugaaauaaaauagccugucuuucagaucucaaaggcucuuuucagagccaccaaaaaaaaaaaaaaaaaaaaaaaaaaaaaaaaaaaaaaaaaaaaaaaaaaaaaaaaaaaaaaaaagaauu

SEQ ID NO: 38773 - RNA, 1733 nt, Artificial Sequence
  mRNA product Design a-2 (hSL-A64-N5) comprising derived and/or modified sequence from LASV(LASV1000-NIG-2009;Clade II)__AIT17782__GPCmut11 (opt1)
aggagaguccgcucagccagguugcagaagcggcuuagcguguguccuaaucuucucucugcguguagguaggccugugccgcaaacaagcuuaccaugggccagaucaucaccuucuuccaggaggugccccacgucaucgaggaggugaugaacaucgugcugaucgcccucagccugcuggccauccucaaggggaucuacaacgucgcgaccugcggccuguucgggcugguguccuuccuccugcugugcggccgcagcugcuccacgaccuacaaggggguguacgagcuccagacccuggagcuggacauggccagccucaacaugaccaugccgcuguccugcacgaagaacaacagccaccacuacaucauggucggcaacgagaccggccuggagcucacccugaccaacacguccaucaucaaccacaaguucugcaaccugagcgacgcccacaagaagaaccucuacgaccacgcccugauguccaucaucagcaccuuccaccuguccauccccaacuucaaccaguacgaggccaugagcugcgacuucaacgggggcaagaucuccgugcaguacaaccucagccacaccuacgcgguggacgccgccaaccacugcgggaccaucgccaacggcguccugcagacguucaugcggauggcguggggcggguccuacaucgcccuggacagcggcaagggguccugggacugcaucaugaccagcuaccaguaccucaucauccagaacaccaccugggaggaccacugccaguucucccgccccagccccaucggcuaccuggggcugcucagccagcggacgcgcgacaucuacaucucccggcgccugcugggcaccuucaccuggacccucagcgacuccgagggcaacgagacgcccgggggcuacugccugacccgguggaugcugaucgaggccgagcucaagugcuucgggaacaccgccguggccaagugcaacgagaagcacgacgaggaguucugcgacaugcugcgccuguucgacuucaacaagcaggcgaucaagcggcucaagaccgaggcccagaugagcauccagcugaucaacaaggccgugaacgcccugaucaacgaccagcucaucaugaagaaccaccuccgcgacaucaugggcauccccuacugcaacuacuccaaguacugcuaccugaaccacacggucaccgggaagaccagccugccccggugcugccugguguccaacggcagcuaccugaacgagacccacuucuccgacgacaucgagcagcaggccgacaacaugaucacggagcuccugcagaaggaguacaucgaccgccagggcaagaccccgcuggggcucguggaccuguucgucuucagcaccuccuucuaccugaucagcaucuuccugcaccucgugaagaucccgacccaccggcacguggucggcaagcccugccccaagccccaccgccugaaccacauggggaucugcuccugcggccuguacaagcacccgggggugcccgugaaguggaagcggugaggacuagucccuguucccagagcccacuuuuuuuucuuuuuuugaaauaaaauagccugucuuucagaucucaaaggcucuuuucagagccaccaaaaaaaaaaaaaaaaaaaaaaaaaaaaaaaaaaaaaaaaaaaaaaaaaaaaaaaaaaaaaaaaagaauu

SEQ ID NO: 38774 - RNA, 1733 nt, Artificial Sequence
  mRNA product Design a-2 (hSL-A64-N5) comprising derived and/or modified sequence from LASV(LASV221-NIG-2010;Clade II)__AIT17624__GPCmut11 (opt1)
aggagaguccgcucagccagguugcagaagcggcuuagcguguguccuaaucuucucucugcguguagguaggccugugccgcaaacaagcuuaccaugggccagaucaucaccuucuuccaggaggugccccacgucaucgaggaggugaugaacaucgugcugaucgcccucagccugcuggccauccucaaggggaucuacaacgucgcgaccugcggccuguucgggcugguguccuuccuccugcugugcggccgcagcugcuccacgaccuacaaggggguguacgagcuccagacccuggagcuggacauggccagccucaacaugaccaugccgcuguccugcacgaagaacaacagccaccacuacaucauggucggcaacgagaccggccuggagcucacccugaccaacacguccaucaucaaccacaaguucugcaaccugagcgacgcccacaagaagaaccucuacgaccacgcccugauguccaucaucagcaccuuccaccuguccauccccaacuucaaccaguacgaggccaugagcugcgacuucaacgggggcaagaucuccgugcaguacaaccucagccacaccuacgcgaucgacgccgccaaccacugcgggaccaucgccaacggcgugcugcagacguucaugcggauggcguggggcggguccuacaucgcccuggacagcggcaagggguccugggacugcaucaugaccagcuaccaguaccucaucauccagaacaccaccugggaggaccacugccaguucucccgccccagccccaucggcuaccuggggcugcucagccagcggacgcgcgacaucuacaucucccggcgccugcugggcaccuucaccuggacccucagcgacuccgagggcaacgagacgcccgggggcuacugccugacccgguggaugcugaucgaggccgagcucaagugcuucgggaacaccgccgucgccaagugcaacgagaagcacgacgaggaguucugcgacaugcugcgccuguucgacuucaacaagcaggcgauccggcgccucaagaccgaggcccagaugagcauccagcugaucaacaaggccgugaacgcccugaucaacgaccagcucaucaugaagaaccaccuccgggacaucaugggcauccccuacugcaacuacuccaaguacugcuaccugaaccacacggugaccgggaagaccagccugccccgcugcugccuggucuccaacggcagcuaccugaacgagacccacuucuccgacgacaucgagcagcaggccgacaacaugaucacggagaugcuccagaaggaguacauggaccggcagggcaagaccccgcuggggcugguggaccucuucguguucagcaccuccuucuaccugaucagcaucuuccugcaccuggucaagaucccgacccaccgccacgugaucggcaagcccugccccaagccccaccggcucaaccacauggggaucugcuccugcggccuguacaagcacccgggggugcccgucaaguggaagcgcugaggacuagucccuguucccagagcccacuuuuuuuucuuuuuuugaaauaaaauagccugucuuucagaucucaaaggcucuuuucagagccaccaaaaaaaaaaaaaaaaaaaaaaaaaaaaaaaaaaaaaaaaaaaaaaaaaaaaaaaaaaaaaaaaagaauu

SEQ ID NO: 38775 - RNA, 1733 nt, Artificial Sequence
  mRNA product Design a-2 (hSL-A64-N5) comprising derived and/or modified sequence from LASV(LASV237-NIG-2010;Clade II)__AIT17638__GPCmut11 (opt1)
aggagaguccgcucagccagguugcagaagcggcuuagcguguguccuaaucuucucucugcguguagguaggccugugccgcaaacaagcuuaccaugggccagaucaucaccuucuuccaggaggugccccacgucaucgaggaggugaugaacaucgugcugaucgcccucagccugcuggccauccucaaggggaucuacaacgucgcgaccugcggccuguucgggcugguguccuuccuccugcugugcggccgcagcugcuccacgaccuacaaggggguguacgagcuccagacccuggagcuggacauggccagccucaacaugaccaugccgcuguccugcacgaagaacaacagccaccacuacaucauggucggcaacgagaccggccuggagcucacccugaccaacacguccaucaucaaccacaaguucugcaaccugagcgacgcccacaagaaggaccucuacgaccacgcccugauguccaucaucagcaccuuccaccuguccauccccaacuucaaccaguacgaggccaugagcugcgacuucaacgggggcaagaucuccgugcaguacaaccucagccacaccuacgcgguggacgccgccaaccacugcgggaccaucgccaacggcguccugcagacguucaugcggauggcguggggcggguccuacaucgcccuggacagcggcaagggguccugggacugcaucaugaccagcuaccaguaccucaucauccagaacaccaccugggaggaccacugccaguucucccgccccagccccaucggcuaccuggggcugcucagccagcggacgcgcgacaucuacaucucccggcgccugcugggcaccuucaccuggacccucagcgacuccgagggcaacgagacgcccgggggcuacugccugacccgguggaugcugaucgaggccgagcucaagugcuucgggaacaccgccguggccaagugcaacgagaagcacgacgaggaguucugcgacaugcugcgccuguucgacuucaacaagcaggcgauccggcgccucaagaccgaggcccagaugagcauccagcugaucaacaaggccgugaacgcccugaucaacgaccagcucaucaugaagaaccaccuccgggacaucaugggcauccccuacugcaacuacuccaaguacugcuaccugaaccacacggucaccgggaagaccagccugccccgcugcugccugguguccaacggcagcuaccugaacgagacccacuucuccgacgacaucgagcagcaggccgacaacaugaucacggagcuccugcagaaggaguacauggaccggcagggcaagaccccgcuggggcucguggaccuguucgucuucagcaccuccuucuaccugaucagcaucuuccugcaccucaucaagaucccgacccaccgccacaucacgggcaagcccugccccaagccccaccggcugaaccacauggggaucugcuccugcggccuguacaagcacccgggggugcccgugaaguggaagcgcugaggacuagucccuguucccagagcccacuuuuuuuucuuuuuuugaaauaaaauagccugucuuucagaucucaaaggcucuuuucagagccaccaaaaaaaaaaaaaaaaaaaaaaaaaaaaaaaaaaaaaaaaaaaaaaaaaaaaaaaaaaaaaaaaagaauu

SEQ ID NO: 38776 - RNA, 1733 nt, Artificial Sequence
  mRNA product Design a-2 (hSL-A64-N5) comprising derived and/or modified sequence from LASV(LASV253-NIG-2011;Clade II)__AIT17670__GPCmut11 (opt1)
aggagaguccgcucagccagguugcagaagcggcuuagcguguguccuaaucuucucucugcguguagguaggccugugccgcaaacaagcuuaccaugggccagaucaucaccuucuuccaggaggugccccacgucaucgaggaggugaugaacaucgugcugaucgcccucagccugcuggccauccucaaggggaucuacaacgucgcgaccugcggccuguucgggcugguguccuuccuccugcugugcggccgcagcugcuccacgaccuacaaggggguguacgagcuccagacccuggagcuggacauggccagccucaacaugaccaugccgcuguccugcacgaagaacaacagccaccacuacaucauggucggcaacgagaccggccuggagcucacccugaccaacacguccaucaucaaccacaaguucugcaaccugagcgacgcccacaagaagaaccucuacgaccacgcccugauguccaucaucagcaccuuccaccuguccauccccaacuucaaccaguacgaggccaugagcugcgacuucaacgggggcaagaucuccgugcaguacaaccucagccacaccuacgcgguggacgccgccaaccacugcgggaccaucgccaacggcguccugcagacguucaugcggauggcguggggcggguccuacaucgcccuggacagcggcaagggguccugggacugcaucaugaccagcuaccaguaccucaucauccagaacaccaccugggaggaccacugccaguucucccgccccagccccaucggcuaccuggggcugcucagccagcggacgcgcgacaucuacaucucccggcgccugcugggcaccuucaccuggacccucagcgacuccgagggcaacgagacgcccgggggcuacugccugacccgguggaugcugaucgaggccgagcucaagugcuucgggaacaccgccguggccaagugcaacgagaagcacgacgaggaguucugcgacaugcugcgccuguucgacuucaacaagcaggcgauccggcgccucaaggccgaggcccagaugagcauccagcugaucaacaaggccgugaacgcccugaucaacgaccagcucaucaugaagaaccaccuccgggacaucaugggcaucccguacugcaacuacuccaaguacugcuaccugaaccacaccgucacggggcgcaccagccugccccggugcugccugguguccaacggcagcuaccugaacgagacccacuucuccgacgacaucgagcagcaggcggacaacaugaucaccgagcuccugcagaaggaguacaucgaccgccagggcaagacgccccuggggcucguggaccuguucgucuucagcaccuccuucuaccugaucagcaucuuccugcaccucgugaagaucccgacccaccggcacaucaucggcaagcccugccccaagccccaccgccugaaccacauggggaucugcuccugcggccuguacaagcacccgggggugcccgucaaguggaagcggugaggacuagucccuguucccagagcccacuuuuuuuucuuuuuuugaaauaaaauagccugucuuucagaucucaaaggcucuuuucagagccaccaaaaaaaaaaaaaaaaaaaaaaaaaaaaaaaaaaaaaaaaaaaaaaaaaaaaaaaaaaaaaaaaagaauu

SEQ ID NO: 38777 - RNA, 1733 nt, Artificial Sequence
  mRNA product Design a-2 (hSL-A64-N5) comprising derived and/or modified sequence from LASV(LASV254-NIG-2011;Clade II)__AIT17674__GPCmut11 (opt1)
aggagaguccgcucagccagguugcagaagcggcuuagcguguguccuaaucuucucucugcguguagguaggccugugccgcaaacaagcuuaccaugggccagaucaucaccuucuuccaggaggugccccacgucaucgaggaggugaugaacaucgugcugaucgcccucagccugcuggccauccucaaggggaucuacaacgucgcgaccugcggccuguucgggcugguguccuuccuccugcugugcggccgcagcugcuccacgaccuacaaggggguguacgagcuccagacccuggagcuggacaugaccaaccucaacaugacgaugccgcugagcugcaccaagaacaacucccaccacuacaucauggucggcaacgagaccggccuggagcucacccugacgaacaccagcaucaucaaccacaaguucugcaaccuguccgacgcccacaagaagaaccucuacaaccacgcccugaugagcaucaucuccaccuuccaccugagcauccccaacuucaaccaguacgaggccauguccugcgacuucaacgggggcaagaucagcgugcaguacaaccucucccacagcuacgccguggacgcggccaaccacugcgggaccaucgccaacggcguccugcagacguucaugcggauggccuggggcggguccuacaucgcgcuggacagcggcaaggggaacugggacugcaucaugaccuccuaccaguaccucaucauccagaacaccaccugggaggaccacugccaguucagccgccccucccccaucggcuaccuggggcugcucagccagcggacgcgcgacaucuacaucagccggcgccugcugggcaccuucaccuggacccucuccgacagcgagggcaacgagacgcccgggggcuacugccugacccgguggaugcugaucgaggccgagcucaagugcuucgggaacaccgccguggccaagugcaacgagaagcacgacgaggaguucugcgacaugcugcgccuguucgacuucaacaagcaggccauccggcgccucaagaccgaggcgcaggccaacauccagcugaucaacaaggccgugaacgcccugaucaacgaccagcucaucaugaagaaccaccuccgggacaucaugggcauccccuacugcaacuacuccaaguacugcuaccugaaccacacggucaccgggaagaccagccugccccgcugcugccugguguccaacggcagcuaccugaacgagacccacuucuccgacgacaucgagcagcaggccgacaacaugaucacggagcuccugcagaaggaguacauggaccggcagggcaagaccccgcuggggcucguggaccuguucgucuucagcaccuccuucuaccugaucagcaucuuccugcaccucgugaagaucccgacccaccgccacgugaucggcaagcccugccccaagccccaccggcugaaccacauggggaucugcuccugcggccuguacaagcacccggggguccccgugaaguggaagcgcugaggacuagucccuguucccagagcccacuuuuuuuucuuuuuuugaaauaaaauagccugucuuucagaucucaaaggcucuuuucagagccaccaaaaaaaaaaaaaaaaaaaaaaaaaaaaaaaaaaaaaaaaaaaaaaaaaaaaaaaaaaaaaaaaagaauu

SEQ ID NO: 38778 - RNA, 1733 nt, Artificial Sequence
  mRNA product Design a-2 (hSL-A64-N5) comprising derived and/or modified sequence from LASV(Nig08-A19;Clade III)__ADU56618__GPCmut11 (opt1)
aggagaguccgcucagccagguugcagaagcggcuuagcguguguccuaaucuucucucugcguguagguaggccugugccgcaaacaagcuuaccaugggccagaucgugaccuucuuccaggaggucccccacgugaucgaggaggugaugaacaucguccugaucgcccucagcauccuggccauccugaaggggcucuacaacaucgcgaccugcggccugaucgggcuggugacguuccuccugcuguccggccgcagcugcuccaugaccuacaaggggguguacgagcuccagacccuggagcugaacaugaacacccucaacaugacgaugccgcugagcugcaccaagaacaacucccaccacuacaucauggucggcaacgagaccggccuggagcucacccugacgaacaccagccugcuccaccacaaguucugcaaccuguccgacgcccacaagaagaaccuguacgaccacacccucaugagcaucaucuccaccuuccaccugagcauccccaacuucaaccaguacgaggccauguccugcgacuucaacgggggcaagaucacggugcaguacaaccugagccacuccuacgccaucgacgccgcgaaccacugcgggaccguggccaacggcguccuccagaccuucaugcggauggccuggggcgggagcuacaucgcccuggacuccggccgcgggaagugggacugcaucaugaccagcuaccaguaccugaucauccagaacacgaccugggaggaccacugccaguucucccggcccagccccaucggcuaccucgggcugcugucccagcgcacccgggacaucuacaucagccgccggcuccugggcaccuucacguggacccugagcgacuccgagggcaacgagacccccgggggcuacugccucacccgcuggaugcugaucgaggcggagcugaagugcuucgggaacacggccguggccaagugcaacgagaagcacgacgaggaguucugcgacaugcuccggcuguucgacuucaacaagcaggccauccgccggcugaaggccgaggcgcagaugagcauccagcucaucaacaaggccgugaacgcccugaucaacgaccagcugaucaugaagaaccaccuccgcgacaucaugggcauccccuacugcaacuacuccaaguacugcuaccugaaccacaccagcaccgggcggaccucccugccccgcugcugccucgucagcaacggcuccuaccugaacgagacgcacuucagcgacgacaucgagcagcaggccgacaacaugaucaccgagaugcugcagaaggaguaccucgaccggcagggcaagaccccgcuggggcugguggaccuguucguguucuccaccagcuucuaccucaucuccaucuuccugcaccuggucaagaucccgacgcaccgccacaucgugggcaagcccugccccaagccccaccggcucaaccacauggggaucugcagcugcggccuguacaagcagccgggggugcccguccgcuggaagcggugaggacuagucccuguucccagagcccacuuuuuuuucuuuuuuugaaauaaaauagccugucuuucagaucucaaaggcucuuuucagagccaccaaaaaaaaaaaaaaaaaaaaaaaaaaaaaaaaaaaaaaaaaaaaaaaaaaaaaaaaaaaaaaaaagaauu

SEQ ID NO: 38779 - RNA, 1736 nt, Artificial Sequence
  mRNA product Design a-2 (hSL-A64-N5) comprising derived and/or modified sequence from LASV(G1180-SLE-2010;Clade IV)__AIT17168__GPCmut11 (opt1)
aggagaguccgcucagccagguugcagaagcggcuuagcguguguccuaaucuucucucugcguguagguaggccugugccgcaaacaagcuuaccaugggccagaucgugaccuucuuccaggaggucccccacgugaucgaggaggugaugaacaucguccugaucgcccucagcauccuggccgugcugaaggggcucuacaacuucgcgaccugcggccugguggggcugcucaccuuccugcugcucugcggccgcuccugcaccgccagccgguacaagggggucuacgagcugcagacccuggagcucaacauggagacccugaacaugacgaugccgcuguccugcaccaagaacaacagccaccacuacaucauggugggcaacgagaccggccucgagcugacccugacgaacaccuccaucaucaaccacaaguucugcaaccucagcgacgcccacaagaagaaccuguacgaccacgcccugauguccaucaucagcaccuuccaccucuccauccccaacuucaaccaguacgaggccaugagcugcgacuucaacgggggcaagaucuccgugcaguacaaccugagccacuccuacgcgggggacgccgccaaccacugcggcaccgucgccaacggggugcugcagacguucaugcgcauggcguggggcggcagcuacaucgcccucgacuccgggcacggcagcugggacugcaucaugaccuccuaccaguaccugaucauccagaacaccaccugggaggaccacugccaguucagccggcccucccccaucggguaccugggccuccugagccagcgcacgcgggacaucuacaucagccgccggcugcucggcaccuucaccuggacccuguccgacagcgaggggaaggacacgccgggcggguacugccugacccgcuggaugcucaucgaggccgagcugaagugcuucggcaacaccgccguggccaagugcaacgagaagcacgacgaggaguucugcgacaugcugcggcuguucgacuucaacaagcaggcgauccagcgccugaaggccgaggcccagauguccauccagcugaucaacaaggccgucaacgcccucaucaacgaccagcugaucaugaagaaccaccuccgggacaucauggggauccccuacugcaacuacagcaaguacugcuaccucaaccacaccacgaccggcaagaccucccugcccaagugcugccuggugagcaacggcuccuaccucaacgagacccacuucagcgacgacaucgagcagcaggcggacaacaugaucacggagaugcugcagaaggaguacauggagcgccaggggaagacgccccugggccucguggaccuguucgucuucuccaccagcuucuaccugaucuccaucuuccugcaccucgugaagaucccgacccaccggcacaucgugggcaagagcugccccaagccccaccgccugaaccacauggggaucugcuccugcgggcuguacaagcagcccggcgucccggugaaguggaagcggugaggacuagucccuguucccagagcccacuuuuuuuucuuuuuuugaaauaaaauagccugucuuucagaucucaaaggcucuuuucagagccaccaaaaaaaaaaaaaaaaaaaaaaaaaaaaaaaaaaaaaaaaaaaaaaaaaaaaaaaaaaaaaaaaagaauu

SEQ ID NO: 38780 - RNA, 1736 nt, Artificial Sequence
  mRNA product Design a-2 (hSL-A64-N5) comprising derived and/or modified sequence from LASV(G1442-SLE-2011;Clade IV)__AIT17180__GPCmut11 (opt1)
aggagaguccgcucagccagguugcagaagcggcuuagcguguguccuaaucuucucucugcguguagguaggccugugccgcaaacaagcuuaccaugggccagaucgugaccuucuuccaggaggucccccacgugaucgaggaggugaugaacaucguccugaucgcccucagcauccuggccgugcugaaggggcucuacaacguggcgaccugcggccugaucgggcuggucacguuccuccugcugugcggccgcuccugcaccaccacccucuacaaggggguguacgagcugcagacgcuggagcucaacauggagacccugaacaugaccaugccgcugagcugcaccaagaacaacucccaccacuacauccgggugggcaacgagacgggccucgagcugacccugaccaacaccagcaucaucaaccacaaguucugcaaccucuccgacgcccacaagaagaaccuguacgaccacgcccugaugagcaucaucuccacguuccaccucagcauccccaacuucaaccaguacgaggccauguccugcgacuucaacgggggcaagaucagcguccaguacaaccugucccacagcuacgccggggacgcggccaaccacugcggcaccguggccaacggggugcugcagaccuucaugcgcauggccuggggcggcuccuacaucgcgcucgacagcgggcggggcaacugggacugcaucaugaccuccuaccaguaccugaucauccagaacacgaccugggacgaccacugccaguucagccgccccucccccaucggguaccugggccuccugagccagcggacccgcgacgucuacaucucccggcgccugcucggcaccuucacguggacccugagcgacagcgaggggaaggacaccccgggcggguacugccugacccgguggaugcucaucgaggccgagcugaagugcuucggcaacacggccguggccaagugcaacgagaagcacgacgaggaguucugcgacaugcugcgccucuucgacuucaacaagcaggccauccagcggcugaaggcggaggcccagauguccauccagcugaucaacaaggccgugaacgcccucaucaacgaccagcugaucaugaagaaccaccuccgcgacaucauggggauccccuacugcaacuacagcaaguacugcuaccugaacaacaccgccaccggcaagaccucccugcccaagugcugccugaucagcaacggcuccuaccucaacgagacgcacuucagcgacgacaucgagcaggaggcggacaacaugaucaccgagaugcugcagaaggaguacauggagcggcaggggaagacgccccugggccucgucgaccuguucguguucuccaccagcuucuaccugaucuccaucuuccugcaccucgugaagaucccgacccaccgccacaucgucggcaagagcugccccaagccccaccggcugaaccacauggggaucugcuccugcgggcuguacaagcagcccggcgugccggugcgcuggaagcggugaggacuagucccuguucccagagcccacuuuuuuuucuuuuuuugaaauaaaauagccugucuuucagaucucaaaggcucuuuucagagccaccaaaaaaaaaaaaaaaaaaaaaaaaaaaaaaaaaaaaaaaaaaaaaaaaaaaaaaaaaaaaaaaaagaauu

SEQ ID NO: 38781 - RNA, 1736 nt, Artificial Sequence
  mRNA product Design a-2 (hSL-A64-N5) comprising derived and/or modified sequence from LASV(G3010-SLE-2013;Clade IV)__AIT17344__GPCmut11 (opt1)
aggagaguccgcucagccagguugcagaagcggcuuagcguguguccuaaucuucucucugcguguagguaggccugugccgcaaacaagcuuaccaugggccagaucgugaccuucuuccaggaggucccccacgugaucgaggaggugaugaacaucguccugaucgcccucagcauccuggccgugcugaaggggcucuacaacuucgcgaccugcggccugguggggcuggucacguuccuccugcugugcggccgcuccugcaccaccagccucuacaaggggguguacgagcugcagacccuggagcucaacauggagacgcugaacaugaccaugccgcuguccugcaccaagaacaacagccaccacuacaucauggugggcaacgagaccggccucgagcugacgcugaccaacaccuccaucaucaaccacaaguucugcaaccucagcgacgcccacaagaagaaccuguacaaccacgcccugauguccaucaucagcaccuuccaccucuccauccccaacuucaaccaguacgaggccaugagcugcgacuucaacgggggcaagaucuccguccaguacaaccugagccacuccuacgccggggacgcggccagccacugcggcacgguggccaacggggugcugcagaccuucaugcggauggccuggggcggcuccuacaucgcgcucgacagcggguacggcaagugggacugcaucaugaccuccuaccaguaccugaucauccagaacaccacgugggaggaccacugccaguucagccgccccucccccaucggguaccugggccuccugagccagcggacccgcgacaucuacaucagccggcgccugcucggcaccuucaccuggacgcuguccgacagcgaggggaaggacaccccgggcggguacugccugacccgguggaugcucaucgaggccgagcugaagugcuucggcaacaccgccgucgccaagugcaacgagaagcacgacgaggaguucugcgacaugcugcgccucuucgacuucaacaagcaggccauccagcggcugaagacggaggcgcagauguccauccagcugaucaacaaggccgugaacgcccucaucaacgaccagcugaucaugaagaaccaccuccgcgacaucauggggauccccuacugcaacuacagcaaguacugcuaccugaaccacaccaccaccggcaagacgucccugcccaagugcugccuggugagcaacggcuccuaccucaacgagacccacuucagcgacgacaucgagcagcaggccgacaacaugaucaccgagaugcugcagaaggaguacauggagcggcaggggaagacgccccugggccucgucgaccuguucguguucuccaccagcuucuaccugaucuccaucuuccugcaccucgugaagaucccgacccaccgccacaucgucggcaagagcugccccaagccccaccggcugaaccacauggggaucugcuccugcgggcuguacaagcagcccggcgugccggugcgcuggaagcggugaggacuagucccuguucccagagcccacuuuuuuuucuuuuuuugaaauaaaauagccugucuuucagaucucaaaggcucuuuucagagccaccaaaaaaaaaaaaaaaaaaaaaaaaaaaaaaaaaaaaaaaaaaaaaaaaaaaaaaaaaaaaaaaaagaauu

SEQ ID NO: 38782 - RNA, 1736 nt, Artificial Sequence
  mRNA product Design a-2 (hSL-A64-N5) comprising derived and/or modified sequence from LASV(G502-SLE-2009;Clade IV)__AIT17126__GPCmut11 (opt1)
aggagaguccgcucagccagguugcagaagcggcuuagcguguguccuaaucuucucucugcguguagguaggccugugccgcaaacaagcuuaccaugggccagaucgugaccuucuuccaggaggucccccacgugaucgaggaggugaugaacaucguccugaucgcccucagcauccuggccgugcugaaggggcucuacaacuucgcgaccugcggccugguggggcugcucacguuccugcugcucugcggccgcuccugcaccaccgggcuguacaagggcgucuacgagcugcagacccucgagcugaacauggagacgcugaacaugaccaugccgcucagcugcaccaagaacaacucccaccacuacaucauggugggcaacgagaccgggcuggagcugacgcucaccaacaccagcaucaucaaccacaaguucugcaaccuguccgacgcccacaagaagaaccuguacgaccacgcccucaugagcaucaucuccaccuuccaccugagcauccccaacuucaaccaguacgaggccauguccugcgacuucaacggcgggaagaucagcgugcaguacaaccugucccacagcuacgccggcgacgcggccgaccacugcgggacggucgccaacggcgugcuccagaccuucaugcggauggccuggggcggguccuacaucgcgcuggacagcggccgcgggcggugggacugcaucaugaccuccuaccaguaccugaucauccagaacaccacgugggaggaccacugccaguucagccgccccucccccaucggcuaccucggccugcugagccagcggacccgcgacaucuacaucucccggcgccuccuggggaccuucaccuggacgcugagcgacagcgagggcaaggacacccccgggggcuacugccucacccgguggaugcugaucgaggccgagcugaagugcuucgggaacaccgccguggccaagugcaacgagaagcacgacgaggaguucugcgacaugcuccgccuguucgacuucaacaagcaggccauccagcggcugaaggcggaggcccagauguccauccagcucaucaacaaggccgucaacgcccugaucaacgaccagcuggugaugaagaaccaccuccgcgacaucaugggcauccccuacugcaacuacagccgguacugcuaccugaaccacacgaccaccggccgcaccucccugcccaagugcugccucgugagcaacggguccuaccugaacgagacgcacuucagcgacgacaucgagcagcaggccgacaacaugaucaccgagaugcugcagaaggaguacauggagcggcagggcaagaccccgcucgggcuggucgaccuguucguguucuccaccagcuucuaccugaucuccaucuuccuccaccuggugaagaucccgacgcaccgccacaucgucggcaagagcugccccaagccccaccggcugaaccacauggggaucugcuccugcggccucuacaagcagcccggcgugccggugaaguggaagcgcugaggacuagucccuguucccagagcccacuuuuuuuucuuuuuuugaaauaaaauagccugucuuucagaucucaaaggcucuuuucagagccaccaaaaaaaaaaaaaaaaaaaaaaaaaaaaaaaaaaaaaaaaaaaaaaaaaaaaaaaaaaaaaaaaagaauu

SEQ ID NO: 38783 - RNA, 1736 nt, Artificial Sequence
  mRNA product Design a-2 (hSL-A64-N5) comprising derived and/or modified sequence from LASV(G733-SLE-2010;Clade IV)__AIT17154__GPCmut11 (opt1)
aggagaguccgcucagccagguugcagaagcggcuuagcguguguccuaaucuucucucugcguguagguaggccugugccgcaaacaagcuuaccaugggccagaucgugaccuucuuccaggaggucccccacgugaucgaggaggugaugaacaucguccugaucgcccucagcauccuggccgugcugaaggggcucuacaacuucgcgaccugcggcaucguggggcuggucuccuuccugcuccugugcggccgcagcugcacgaccucccuguacaaggggguguacgagcuccagacccuggagcugaacauggagacccucaacaugacgaugccgcugagcugcaccaagaacaacucccaccacuacaucauggugggcaacgagaccggccuggagcucacccugacgaacaccagcaucaucaaccacaaguucugcaaccuguccgacgcccacaagaagaaccucuacgaccacgcccugaugagcaucaucuccaccuuccaccugagcauccccaacuucaaccaguacgaggccauguccugcgacuucaacgggggcaagaucagcguccaguacaaccucucccacagcuacgccggggacgcggccaaccacugcggcaccaucgccaacggggugcugcagacguucaugcggauggccuggggcggcuccuacaucgcgcuggacagcgggcgcgaccggugggacugcaucaugaccuccuaccaguaccucaucauccagaacaccaccugggaggaccacugccaguucagccgccccucccccaucggcuaccuggggcugcucagccagcggacgcgcgacaucuacaucagccggcgccugcugggcaccuucaccuggacccucuccgacagcgagggcaaggacacgcccgggggcuacugccugacccgguggaugcugaucgaggccgagcucaagugcuucgggaacaccgccguggccaagugcaacgagaagcacgacgaggaguucugcgacaugcugcgccuguucgacuucaacaagcaggccauccagcggcucaaggcggaggcccagauguccauccagcugaucaacaaggccgucaacgcccugaucaacgaccagcucaucaugaagaaccaccuccgcgacaucaugggcauccccuacugcaacuacagcaaguacugcuaccugaaccacaccacgaccgggaagaccucccugcccaagugcugccuggugagcaacggcuccuaccugaacgagacccacuucagcgacgacaucgagcagcaggccgacaacaugaucacggagaugcuccagaaggaguacauggagcggcagggcaagaccccgcuggggcugguggaccucuucgucuucuccaccagcuucuaccugaucuccaucuuccugcaccuggugaagaucccgacccaccgccacguggucggcaagagcugccccaagccccaccggcucaaccacauggggaucugcuccugcggccuguacgggcagcccggcgugccggugaaguggaagcgcugaggacuagucccuguucccagagcccacuuuuuuuucuuuuuuugaaauaaaauagccugucuuucagaucucaaaggcucuuuucagagccaccaaaaaaaaaaaaaaaaaaaaaaaaaaaaaaaaaaaaaaaaaaaaaaaaaaaaaaaaaaaaaaaaagaauu

SEQ ID NO: 38784 - RNA, 1736 nt, Artificial Sequence
  mRNA product Design a-2 (hSL-A64-N5) comprising derived and/or modified sequence from MOPV/LASV reassortant(IGS-1;Clade IV)__AFY05576__GPCmut11 (opt1)
aggagaguccgcucagccagguugcagaagcggcuuagcguguguccuaaucuucucucugcguguagguaggccugugccgcaaacaagcuuaccaugggccagaucgugaccuucuuccaggaggucccccacgugaucgaggaggugaugaacaucguccugaucgcccucagcgugcuggccgugcugaaggggcucuacaacuucgcgaccugcggccuggucgggcuggugacguuccuccugcugugcggccgcuccugcaccaccagccucuacaaggggguguacgagcugcagacccuggagcucaacauggagacgcugaacaugaccaugccgcuguccugcaccaagaacaacagccaccacuacaucauggucggcaacgagaccggccucgagcugacgcugaccaacaccuccaucaucaaccacaaguucugcaaccucagcgacgcccacaagaagaaccuguacgaccacgcccugauguccaucaucagcaccuuccaccucuccauccccaacuucaaccaguacgaggccaugagcugcgacuucaacgggggcaagaucuccgugcaguacaaccugagccacuccuacgccggggacgcggccaaccacugcggcacgguggccaacgggguccugcagaccuucaugcggauggccuggggcggcagcuacaucgcgcucgacuccgggcgcggcaacugggacugcaucaugaccagcuaccaguaccugaucauccagaacaccacgugggaggaccacugccaguucucccggcccagccccaucggguaccugggccuccugucccagcgcacccgggacaucuacaucagccgccggcugcucggcaccuucaccuggacgcugagcgacuccgagggggaggacaccccgggcggguacugccugacccgcuggaugcucaucgaggccgagcugaagugcuucggcaacaccgccguggccaagugcaacgagaagcacgacgaggaguucugcgacaugcugcggcuguucgacuucaacaagcaggccauccagcgccugaaggcggaggcccagaugagcauccagcugaucaacaaggccgugaacgcccucaucaacgaccagcugaucaugaagaaccaccuccgggacaucauggggauccccuacugcaacuacuccaaguacugcuaccucaaccacacgaccaccggccgcaccagccugcccaagugcugccuggucuccaacggcagcuaccucaacgagacgcacuucuccgacgacaucgagcagcaggccgacaacaugaucaccgagaugcugcagaaggaguacauggagcggcaggggaagacgccccugggccucguggaccuguucguguucagcaccuccuucuaccugaucagcaucuuccugcaccucgucaagaucccgacccaccgccacaucguggggaaguccugccccaagccccaccggcugaaccacaugggcaucugcagcugcgggcuguacaagcagcccggcgugccggucaaguggaagcgcugaggacuagucccuguucccagagcccacuuuuuuuucuuuuuuugaaauaaaauagccugucuuucagaucucaaaggcucuuuucagagccaccaaaaaaaaaaaaaaaaaaaaaaaaaaaaaaaaaaaaaaaaaaaaaaaaaaaaaaaaaaaaaaaaagaauu

SEQ ID NO: 38785 - RNA, 1736 nt, Artificial Sequence
  mRNA product Design a-2 (hSL-A64-N5) comprising derived and/or modified sequence from LASV(LM765-SLE-2012;Clade IV)__AIT17814__GPCmut11 (opt1)
aggagaguccgcucagccagguugcagaagcggcuuagcguguguccuaaucuucucucugcguguagguaggccugugccgcaaacaagcuuaccaugggccagaucgugaccuucuuccaggaggucccccacgugaucgaggaggugaugaacaucguccugaucgcccucagcauccuggccgugcugaaggggcucuacaacuucgcgaccugcggccugguggggcuggucacguuccuccugcugugcggccgcuccugcaccaccagccucuacaaggggguguacgagcugcagacccuggagcucaacauggagacgcugaacaugaccaugccgcuguccugcaccaagaacaacagccaccacuacaucauggugggcaacgagaccggccucgagcugacgcugaccaacaccuccaucaucgaccacaaguucugcaaccucagcgacgcccaccggaagaaccuguacgaccacgcccugauguccaucaucagcaccuuccaccucuccauccccaacuucaaccaguacgaggccaugagcugcgacuucaacgggggcaagaucuccguccaguacaaccugagccacuccuacgccaaggacgcggccgaccacugcgggacgguggccaacggcgugcugcagaccuucaugcgcauggccuggggcgggagcuacaucgcgcucgacuccggccgggggcgcugggacugcaucaugaccagcuaccaguaccugaucauccagaacaccacgugggaggaccacugccaguucucccggcccagccccaucggcuaccuggggcuccugucccagcgcacccgggacaucuacaucagccgccggcugcucggcaccuucaccuggacgcugagcgacuccgagggcaaggacacccccgggggcuacugccugacccgcuggaugcucaucgaggccgagcugaagugcuucgggaacaccgccgucgccaagugcaacgagaagcacgacgaggaguucugcgacaugcugcggcuguucgacuucaacaagcaggccauccagcgccugaaggcggaggcccagaugagcauccagcugaucaacaaggccgugaacgcccucaucaacgaccagcugaucaugaagaaccaccuccgggacaucaugggcauccccuacugcaacuacuccaaguacugcuaccucaaccacacgaccaccgggaagaccagccugcccaagugcugccugguguccaacggcagcuaccucaacgagacgcacuucuccgacgacaucgagcagcaggccgacaacaugaucaccgagaugcugcagaaggaguacauggagcgccagggcaagaccccgcuggggcucgucgaccuguucguguucagcaccuccuucuaccugaucagcaucuuccugcaccucgugaagaucccgacgcaccggcacaucgucggcaagcccugccccaagccccaccgccugaaccacauggggaucugcuccugcggccuguacaagcagccgggggugcccgugaaguggaagcggugaggacuagucccuguucccagagcccacuuuuuuuucuuuuuuugaaauaaaauagccugucuuucagaucucaaaggcucuuuucagagccaccaaaaaaaaaaaaaaaaaaaaaaaaaaaaaaaaaaaaaaaaaaaaaaaaaaaaaaaaaaaaaaaaagaauu

SEQ ID NO: 38786 - RNA, 1736 nt, Artificial Sequence
  mRNA product Design a-2 (hSL-A64-N5) comprising derived and/or modified sequence from LASV(LM776-SLE-2012;Clade IV)__AIT17824__GPCmut11 (opt1)
aggagaguccgcucagccagguugcagaagcggcuuagcguguguccuaaucuucucucugcguguagguaggccugugccgcaaacaagcuuaccaugggccagaucgugaccuucuuccaggaggucccccacgugaucgaggaggugaugaacaucguccugaucgcccucagcauccuggccgugcugaaggggcucuacaacuucgcgaccugcggccugguggggcuggucacguuccuccugcugugcggccgcuccugcaccaccagcguguacaaggggguguacgagcuccagacccuggagcugaacauggagacgcucaacaugaccaugccgcuguccugcaccaagaacaacagccaccacuacaucauggucggcaacgagaccggccuggagcucacgcugaccaacaccuccaucaucaaccacaaguucugcaaccugagcgacgcccacaagaagaaccucuacgaccacgcccugauguccaucaucagcaccuuccaccuguccauccccaacuucaaccaguacgaggccaugagcugcgacuucaacgggggcaagaucuccgugcaguacaaccucagccacuccuacgccggggacgcggccaaccacugcggcacgguggccaacgggguccugcagaccuucaugcggauggccuggggcggcagcuacaucgcgcuggacuccgggcacggcaagugggacugcaucaugaccagcuaccaguaccucaucauccagaacaccacgugggaggaccacugccaguucucccgccccagccccaucggguaccugggccugcucucccagcggacccgcgacaucuacaucagccggcgccugcugggcaccuucaccuggacgcucagcgacuccgaggggaaggacaccccgggcggguacugccugacccgguggaugcugaucgaggccgagcucaagugcuucggcaacaccgccguggccaagugcaacgagaagcacgacgaggaguucugcgacaugcugcgccuguucgacuucaacaagcaggccauccagcggcucaaggcggaggcccagaugagcauccagcugaucaacaaggccgugaacgcccugaucaacgaccagcucaucaugaagaaccaccuccgcgacaucauggggauccccuacugcaacuacuccaaguacugcuaccugaaccacacgaccaccggcaagaccagccugcccaagugcugccuggucuccaacggcagcuaccugaacgagacgcacuucuccgacgacaucgagcagcaggccgacaacaugaucaccgagaugcuccagaaggaguacauggagcggcaggggaagacgccccugggccugguggaccucuucguguucagcaccuccuucuaccugaucagcaucuuccugcaccuggucaagaucccgacccaccgccacaucguggggaaguccugccccaagccccaccggcucaaccacaugggcaucugcagcugcgggcuguacaagcagcccggcgugccgguccgcuggaagcggugaggacuagucccuguucccagagcccacuuuuuuuucuuuuuuugaaauaaaauagccugucuuucagaucucaaaggcucuuuucagagccaccaaaaaaaaaaaaaaaaaaaaaaaaaaaaaaaaaaaaaaaaaaaaaaaaaaaaaaaaaaaaaaaaagaauu

SEQ ID NO: 38787 - RNA, 1736 nt, Artificial Sequence
  mRNA product Design a-2 (hSL-A64-N5) comprising derived and/or modified sequence from LASV(Mad39;Clade IV)__ANH09722__GPCmut11 (opt1)
aggagaguccgcucagccagguugcagaagcggcuuagcguguguccuaaucuucucucugcguguagguaggccugugccgcaaacaagcuuaccaugggccagaucgugaccuucuuccaggaggucccccacgugaucgaggaggugaugaacaucguccugaucgcccucagcauccuggccgugcugaaggggcucuacaacguggcgaccugcggccugaucgggcuggucacguuccuccugcugugcggccgcuccugcaccaccacccucuacaaggggguguacgagcugcaggcccuggagcucaacauggagacgcugaacaugaccaugccgcugagcugcaccaagaacaacucccaccacuacauccgggugggcaacgagaccggccucgagcugacgcugaccaacaccagccucaucaaccacaaguucugcaaccuguccgacgcccacaagaagaaccuguacgaccacgcccucaugagcaucaucuccaccuuccaccugagcauccccaacuucaaccaguacgaggccauguccugcgacuucaacgacgggaagaucagcguccaguacaaccugucccacacguacgcgggcgacaccgccaaccacugcgggaccguggccaacggcgugcuccagaccuucaugcgcauggccuggggcgggagcuacaucgcgcuggacuccggccgcgggggcugggacugcaucaugacgagcuaccaguaccugaucauccagaacaccaccugggaggaccacugccaguucucccggcccagccccaucggguaccucggccugcugucccagcggacccgcgacaucuacaucagccggcgccuccugggcacguucaccuggacccuguccgacagcgaggggaaggacaccccgggcggguacugccucacgcgguggaugcugaucgaggccgagcugaagugcuucggcaacaccgccgucgccaagugcaacgagaagcacgacgaggaguucugcgacaugcuccgccuguucgacuucaacaagcaggccauccagcggcugaaggcggaggcccagaugagcauccagcucaucaacaaggccgugaacgcccugaucaacgaccagcugaucaugaagaaccaccuccgcgacaucauggggauccccuacugcaacuacuccaaguacugcuaccugaaccacaccgugaccggcaagacgagccugcccaagugcugccucgucuccaacggcagcuaccugaacgagacccacuucuccgacgacaucgagcagcaggccgacaacaugaucaccgagaugcugcagaaggaguacauggagcggcaggggaagacgccccucggccugguggaccuguucguguucagcaccuccuucuaccugaucagcaucuuccuccaccuggucaagaucccgacccaccgccacgugguggggaagcccugccccaagccccaccggcugaaccacaugggcaucugcuccugcggguucuacaagcagccgggcguccccgugcgcuggaagcggugaggacuagucccuguucccagagcccacuuuuuuuucuuuuuuugaaauaaaauagccugucuuucagaucucaaaggcucuuuucagagccaccaaaaaaaaaaaaaaaaaaaaaaaaaaaaaaaaaaaaaaaaaaaaaaaaaaaaaaaaaaaaaaaaagaauu

SEQ ID NO: 38788 - RNA, 1736 nt, Artificial Sequence
  mRNA product Design a-2 (hSL-A64-N5) comprising derived and/or modified sequence from LASV(Z0947-SLE-2011;Clade IV)__AIT17840__GPCmut11 (opt1)
aggagaguccgcucagccagguugcagaagcggcuuagcguguguccuaaucuucucucugcguguagguaggccugugccgcaaacaagcuuaccaugggccagaucgugaccuucuuccaggaggucccccacgugaucgaggaggugaugaacaucguccugaucgcccucagcauccuggccgugcugaaggggcucuacaacuucgcgaccugcggccugguggggcuggucacguuccuccugcugugcggccgcuccugcaccaucagccucuacaaggggguguacgagcugcagacccuggagcucaacauggagacccugaacaugacgaugccgcuguccugcaccaagaacaacagccaccacuacaucauggugggcaacgagaccggccucgagcugacccugacgaacaccuccaucaucaaccacaaguucugcaaccucagcgacgcccacaagaagaaccuguacgaccacgcccugauguccaucaucagcaccuuccaccucuccauccccaacuucaaccaguacgaggccaugagcugcgacuucaacgggggcaagaucuccguccaguacaaccugagccacuccuacgccggggacgcggccaaccacugcggcaccguggccaacggggugcugcagacguucaugcggauggccuggggcggcagcuacaucgcgcucgacuccgggcgcgaccggugggacugcaucaugaccagcuaccaguaccugaucauccagaacaccaccugggaggaccacugccaguucucccgccccagccccaucggcuaccuggggcuccugucccagcggacgcgcgacaucuacaucagccggcgccugcucggcaccuucaccuggacccugagcgacuccgagggcaaggacacgcccgggggcuacugccugacccgguggaugcucaucgaggccgagcugaagugcuucgggaacaccgccgucgccaagugcaacgagaagcacgacgaggaguucugcgacaugcugcgccucuucgacuucaacaagcaggccauccagcggcugaaggcggaggcccagaugagcauccagcugaucaacaaggccgugaacgcccucaucaacgaccagcugaucaugaagaaccaccuccgcgacaucaugggcauccccuacugcaacuacuccaaguacugcuaccugaaccacaccacgaccgggaagaccagccugcccaagugcugccugguguccaacggcagcuaccucaacgagacccacuucuccgacgacaucgagcagcaggccgacaacaugaucacggagaugcugcagaaggaguacauggagcggcagggcaagaccccgcuggggcucgucgaccuguucguguucagcaccuccuucuaccugaucagcaucuuccugcaccucgugaagaucccgacccaccgccacaucgucggcaagcccugccccaagccccaccggcugaaccacauggggaucugcuccugcggccuguacaagcagccgggggugcccgugaaguggaagcgcugaggacuagucccuguucccagagcccacuuuuuuuucuuuuuuugaaauaaaauagccugucuuucagaucucaaaggcucuuuucagagccaccaaaaaaaaaaaaaaaaaaaaaaaaaaaaaaaaaaaaaaaaaaaaaaaaaaaaaaaaaaaaaaaaagaauu

SEQ ID NO: 38789 - RNA, 1736 nt, Artificial Sequence
  mRNA product Design a-2 (hSL-A64-N5) comprising derived and/or modified sequence from LASV(Josiah;Clade IV)__NP_694870__GPCmut11 (opt1)
aggagaguccgcucagccagguugcagaagcggcuuagcguguguccuaaucuucucucugcguguagguaggccugugccgcaaacaagcuuaccaugggccagaucgugaccuucuuccaggaggucccccacgugaucgaggaggugaugaacaucguccugaucgcccucagcgugcuggccgugcugaaggggcucuacaacuucgcgaccugcggccuggucgggcuggugacguuccuccugcugugcggccgcuccugcaccaccagccucuacaaggggguguacgagcugcagacccuggagcucaacauggagacgcugaacaugaccaugccgcuguccugcaccaagaacaacagccaccacuacaucauggucggcaacgagaccggccucgagcugacgcugaccaacaccuccaucaucaaccacaaguucugcaaccucagcgacgcccacaagaagaaccuguacgaccacgcccugauguccaucaucagcaccuuccaccucuccauccccaacuucaaccaguacgaggccaugagcugcgacuucaacgggggcaagaucuccgugcaguacaaccugagccacuccuacgccggggacgcggccaaccacugcggcacgguggccaacgggguccugcagaccuucaugcggauggccuggggcggcagcuacaucgcgcucgacuccgggcgcggcaacugggacugcaucaugaccagcuaccaguaccugaucauccagaacaccacgugggaggaccacugccaguucucccggcccagccccaucggguaccugggccuccugucccagcgcacccgggacaucuacaucagccgccggcugcucggcaccuucaccuggacgcugagcgacuccgaggggaaggacaccccgggcggguacugccugacccgcuggaugcucaucgaggccgagcugaagugcuucggcaacaccgccguggccaagugcaacgagaagcacgacgaggaguucugcgacaugcugcggcuguucgacuucaacaagcaggccauccagcgccugaaggcggaggcccagaugagcauccagcugaucaacaaggccgugaacgcccucaucaacgaccagcugaucaugaagaaccaccuccgggacaucauggggauccccuacugcaacuacuccaaguacugcuaccucaaccacacgaccaccggccgcaccagccugcccaagugcugccuggucuccaacggcagcuaccucaacgagacgcacuucuccgacgacaucgagcagcaggccgacaacaugaucaccgagaugcugcagaaggaguacauggagcggcaggggaagacgccccugggccugguggaccucuucguguucagcaccuccuucuaccugaucagcaucuuccugcaccucgucaagaucccgacccaccgccacaucguggggaaguccugccccaagccccaccggcugaaccacaugggcaucugcagcugcgggcuguacaagcagcccggcgugccggucaaguggaagcgcugaggacuagucccuguucccagagcccacuuuuuuuucuuuuuuugaaauaaaauagccugucuuucagaucucaaaggcucuuuucagagccaccaaaaaaaaaaaaaaaaaaaaaaaaaaaaaaaaaaaaaaaaaaaaaaaaaaaaaaaaaaaaaaaaagaauu

SEQ ID NO: 38790 - RNA, 1733 nt, Artificial Sequence
  mRNA product Design a-2 (hSL-A64-N5) comprising derived and/or modified sequence from LASV(LP;Clade I)__AAF86701__GPCmut11 (opt1)
aggagaguccgcucagccagguugcagaagcggcuuagcguguguccuaaucuucucucugcguguagguaggccugugccgcaaacaagcuuaccaugggccagaucaucaccuucuuccaggaggugccccacgucaucgaggaggugaugaacaucgugcugaucgcccucagccugcuggccauccucaaggggcuguacaacaucgcgaccugcggcaucaucgggcuggucgccuuccucuuccugugcggcaaguccugcagccugacgcucaagggcggguacgagcugcagacccuggagcucaacauggagacccugaacaugaccaugccgcuguccugcacgaagaacagcucccaccacuacauccgcgugggcaacgagaccgggcucgagcugacccugaccaacacgagcaucaucaaccacaaguucugcaaccucuccgacgcccacaagaagaaccuguacgaccacgcccugaugagcaucaucuccaccuuccaccucagcauccccaacuucaaccaguacgaggccauguccugcgacuucaacggcgggaagaucagcgugcaguacaaccugucccacagcuacgcgggcgacgccgccgagcacugcgggaccgucgccaacggcgugcugcagaccuucaugcggauggcguggggcgggcgcuacaucgcccucgacuccggcaaggggaacugggacugcaucaugacgagcuaccaguaccugaucauccagaacaccaccugggaggaccacugccaguucucccggcccagccccaucggcuaccugggccuccugucccagcgcacccgggacaucuacaucagccgccggcugcucgggacguucaccuggacccugagcgacuccgagggcaacgagacccccgggggcuacugccugacgcgcuggaugcucaucgaggccgagcugaagugcuucgggaacaccgccguggccaagugcaacgagaagcacgacgaggaguucugcgacaugcugcggcuguucgacuucaacaagcaggcgauccgccggcugaaggccgaggcccagaugagcauccagcugaucaacaaggccgucaacgcccucaucaacgaccagcugaucaugaagaaccaccuccgcgacaucaugggcauccccuacugcaacuacuccaaguacugcuaccucaaccacaccagcuccggccggaccagccugcccaagugcugccugaucuccaacgggagcuaccucaacgagacgcaguucuccgacgacaucgagcagcaggcggacaacaugaucaccgagaugcugcagaaggaguacaucgagcgccagggcaagaccccgcuggggcugguggacaucuucaucuucagcaccuccuucuaccucaucagcaucuuccugcaccugaucaagaucccgacgcaccggcacaucgugggcaagcccugccccaagccccaccgccucaaccacaugggggucugcuccugcggccuguacaagcacccgggcgugcccaccaaguggaagcggugaggacuagucccuguucccagagcccacuuuuuuuucuuuuuuugaaauaaaauagccugucuuucagaucucaaaggcucuuuucagagccaccaaaaaaaaaaaaaaaaaaaaaaaaaaaaaaaaaaaaaaaaaaaaaaaaaaaaaaaaaaaaaaaaagaauu

SEQ ID NO: 38791 - RNA, 1733 nt, Artificial Sequence
  mRNA product Design a-2 (hSL-A64-N5) comprising derived and/or modified sequence from LASV(803213;Clade II)__AAF86703__GPCmut11 (opt1)
aggagaguccgcucagccagguugcagaagcggcuuagcguguguccuaaucuucucucugcguguagguaggccugugccgcaaacaagcuuaccaugggccagaucaucaccuucuuccaggaggugccccacgucaucgaggaggugaugaacaucgugcugaucgcccucagccugcuggccauccucaaggggaucuacaacgucgcgaccugcggccuguucgggcugaucuccuuccuccugcugugcggccgcagcugcuccgugacguacaaggggguguacgagcuccagacccuggagcugaacauggccaaccucaacaugaccaugccgcugagcugcaccaagaacaacucccaccacuacaucauggucggcaacgagacgggccuggagcucacccugaccaacaccagcaucaucaaccacaaguucugcaaccuguccgacgcccacaagaagaaccucuacgaccacgcccugaugagcaucaucuccacguuccaccugagcauccccaacuucaaccaguacgaggccauguccugcgacuucaacgggggcaagaucagcgugcaguacaaccucucccacagcuucgcgguggacgccgccaaccacugcgggaccaucgccaacggcguccugcagaccuucaugcggauggcguggggcggguccuacaucgcccuggacagcggcaaggggaacugggacugcaucaugaccuccuaccaguaccucaucauccagaacacgaccugggaggaccacugccaguucagccgccccucccccaucggcuaccuggggcugcucagccagcggacccgcgacaucuacaucagccggcgccugcugggcaccuucacguggacccucuccgacagcgagggcaacgaggcccccgggggcuacugccugacccgguggaugcugaucgaggccgagcucaagugcuucgggaacaccgccguggcgaagugcaacgagaagcacgacgaggaguucugcgacaugcugcgccuguucgacuucaacaagcaggccaucaagcggcucaagacggaggcccagauguccauccagcugaucaacaaggccgugaacgcccugaucaacgaccagcucaucaugaagaaccaccuccgcgacaucaugggcauccccuacugcaacuacagccgguacugcuaccugaaccacaccgucaccgggaagaccucccugccccgcugcugccuggugagcaacggcuccuaccugaacgagacgcacuucagcgacgacaucgagcagcaggcggacaacaugaucaccgagaugcuccagaaggaguacauggaccggcagggcaagaccccgcuggggcugguggaccuguucgucuucuccaccagcuucuaccucaucuccaucuuccugcaccuggugaagaucccgacgcaccgccacaucgugggcaagcccugccccaagccccaccggcucaaccacauggggaucugcagcugcggccuguacaagcacccggggguccccgugaaguggaagcgcugaggacuagucccuguucccagagcccacuuuuuuuucuuuuuuugaaauaaaauagccugucuuucagaucucaaaggcucuuuucagagccaccaaaaaaaaaaaaaaaaaaaaaaaaaaaaaaaaaaaaaaaaaaaaaaaaaaaaaaaaaaaaaaaaagaauu

SEQ ID NO: 38792 - RNA, 1733 nt, Artificial Sequence
  mRNA product Design a-2 (hSL-A64-N5) comprising derived and/or modified sequence from LASV(GA391;Clade III)__CAA36645__GPCmut11 (opt1)
aggagaguccgcucagccagguugcagaagcggcuuagcguguguccuaaucuucucucugcguguagguaggccugugccgcaaacaagcuuaccaugggccagaucgugaccuucuuccaggaggucccccacgugaucgaggaggugaugaacaucguccugaucgcccucagcauccuggccauccugaaggggcucuacaacguggcgaccugcggccugaucgggcuggugacguuccuccugcuguccggccgcagcugcucccucaucuacaaggggaccuacgagcugcagacccuggagcucaacauggagacccugaacaugacgaugccgcugagcugcaccaagaacaacucccaccacuacauccgggucggcaacgagaccggccucgagcugacccugacgaacaccagcauccucaaccacaaguucugcaaccuguccgacgcccacaagcgcaaccuguacgaccacagccucauguccaucaucagcaccuuccaccuguccauccccaacuucaaccaguacgaggccaugagcugcgacuucaacgggggcaagaucaccgugcaguacaaccugucccacagcuucgccguggacgccgcggggcacugcggcacgcucgccaacgggguccugcagaccuucaugcggauggccuggggcggcuccuacaucgcccuggacagcgggcgcggcaacugggacugcaucaugaccuccuaccaguaccucaucauccagaacaccacgugggacgaccacugccaguucagccggcccucccccaucggguaccugggccugcucagccagcgcacccgggacaucuacaucagccgccggcugcugggcaccuucaccuggacgcucuccgacagcgaggggaacgagaccccgggcggguacugccugacccgcuggaugcugaucgaggcggagcucaagugcuucggcaacaccgccguggccaagugcaacgagaagcacgacgaggaguucugcgacaugcugcggcuguucgacuucaacaagcaggccauccgccggcucaagacggaggcccagauguccauccagcugaucaacaaggcggugaacgcccugaucaacgaccagcucaucaugaagaaccaccuccgcgacaucauggggauccccuacugcaacuacagccgguacugcuaccugaaccacaccuccaccggcaagaccagccugccccgcugcugccugaucuccaacggcagcuaccugaacgagacgaaguucuccgacgacaucgagcagcaggccgacaacaugaucaccgagaugcugcagaaggaguacaucgaccggcaggggaagacgccccucggccuggucgaccuguucguguucagcaccuccuucuaccucaucagcaucuuccugcaccuggugaagaucccgacccaccgccacaucgucgggaagcccugccccaagccccaccggcucaaccacaugggcaucugcuccugcgggcuguacaagcagccgggcgugcccgugcgcuggaagcggugaggacuagucccuguucccagagcccacuuuuuuuucuuuuuuugaaauaaaauagccugucuuucagaucucaaaggcucuuuucagagccaccaaaaaaaaaaaaaaaaaaaaaaaaaaaaaaaaaaaaaaaaaaaaaaaaaaaaaaaaaaaaaaaaagaauu

SEQ ID NO: 38793 - RNA, 1736 nt, Artificial Sequence
  mRNA product Design a-2 (hSL-A64-N5) comprising derived and/or modified sequence from LASV(AV;Clade V)__CCA30314__GPCmut11 (opt1)
aggagaguccgcucagccagguugcagaagcggcuuagcguguguccuaaucuucucucugcguguagguaggccugugccgcaaacaagcuuaccaugggccagaucgugaccuucuuccaggaggucccccacgugaucgaggaggugaugaacaucguccugaucgcccucagcauccuggccgugcugaaggggcucuacaacaucgcgaccugcggccugaucgggcugaucacguuccuccugcugugcggccgcuccugcagcuccaaccucuacaaggggguguacgagcugcagagccuggaccucaacauggagacccugaacaugaccaugccgcuguccugcaccaagaacaacagccaccacuacauccgggucggcaacgacacgggccucgagcugacccugaccaacaccuccauccucaaccacaaguucugcaaccugagcgacgcccacaagaaggaccuguacgaccacgcccucauguccaucaucagcacguuccaccuguccauccccaacuucaaccaguacgaggccaugagcugcgacuucaacgggggcaagaucuccgugcaguacaaccugagccacuccuacgccaucgacgcggccaaccacugcgggaccguggccaacggcauccuccagaccuucaugcgcauggccuggggcgggagcuacaucgcgcuggacuccggccgggggaacugggacugcaucaugaccagcuaccaguaccugaucauccagaacacgaccugggagaaccacugccaguucucccgccccagccccaucggcuaccucgggcugcugagccagcggacccgcgacaucuacaucucccggcgccuccugggcaccuucacguggacccugagcgacuccgagggcaacgccacccccgggggcuacugccucacccgguggaugcugaucgaggccgagcugaagugcuucgggaacacggccgucgccaagugcaacgagaagcacgacgaggaguucugcgacaugcuccgccuguucgacuucaacaagcaggcgaucagccggcugaaguccgaggcccagaugagcauccagcucaucaacaaggccgugaacgcccugaucaacgaccagcugaucaugaagaaccaccuccgcgacaucaugggcauccccuacugcaacuacuccaaguacugcuaccugaaccacaccaucaccgggaagaccagccugcccaagugcugccucguguccaacggcagcuaccugaacgagacgcacuucuccgacgacaucgagcagcaggccgacaacaugaucaccgagaugcugcagaaggaguacauggagcggcagggcaagaccccgcuggggcucgucgaccuguucguguucagcaccuccuucuaccugaucagcaucuuccuccgccuggugaagaucccgacgcaccggcacaucgucggcaagcccugccccaagccccaccgccugaaccacauggggaucugcuccugcggccucuacaagcagccgggggugcccgugcgguggaagcgcugaggacuagucccuguucccagagcccacuuuuuuuucuuuuuuugaaauaaaauagccugucuuucagaucucaaaggcucuuuucagagccaccaaaaaaaaaaaaaaaaaaaaaaaaaaaaaaaaaaaaaaaaaaaaaaaaaaaaaaaaaaaaaaaaagaauu

SEQ ID NO: 38794 - RNA, 1733 nt, Artificial Sequence
  mRNA product Design a-2 (hSL-A64-N5) comprising derived and/or modified sequence from LASV(Togo/2016/7082;Clade VI)__AMR44577__GPCmut11 (opt1)
aggagaguccgcucagccagguugcagaagcggcuuagcguguguccuaaucuucucucugcguguagguaggccugugccgcaaacaagcuuaccaugggccagaucaucaccuucuuccaggaggugccccacgucaucgaggaggugaugaacaucgugcugaucgcccucagccugcuggccauccucaagggggucuacaacguggcgaccugcggcaucaucgggcuggugacguuccuguuccucugcggccgcuccugcagccugaucuacaagggguccuacgagcugcagacccucgagcugaacauggagacccugaacaugaccaugccgcucagcugcacgaagaacuccagccaccacuacauccgggucggcaacgagaccggccuggagcugacccucaccaacacguccaucaucaaccacaaguucugcaaccugagcgacgcccacaagcgcaaccuguacgaccacgcccucauguccauccugagcaccuuccaccuguccauccccaacuucaaccaguacgaggccaugagcugcgacuucaacgggggcaagaucuccgugcaguacaaccucagccacgccuacgcgguggacgccgccgagcacugcgggaccgucgccaacggcgugcugcagaccuucaugcggauggcguggggcggguccuacaucgcccuggacagcggccgcgggaacugggacugcaucaugacguccuaccaguaccucaucauccagaacaccaccugggaggaccacugccaguucagccggcccucccccaucggcuaccuggggcugcucagccagcgcacccgggacaucuacaucagccgccggcugcugggcacguucaccuggacccucuccgacagcgagggcaacgagacccccgggggcuacugccugacgcgcuggaugcugaucgaggccgagcucaagugcuucgggaacaccgccguggccaagugcaacgagaagcacgacgaggaguucugcgacaugcugcggcuguucgacuucaacaagcaggcgauccagcgccucaaguccgaggcccagaugagcauccagcugaucaacaaggccgucaacgcccugaucaacgaccagcucaucaugaagaaccaccuccgggacaugaugggcauccccuacugcaacuacuccaaguacugcuaccugaaccacaccagcuccgggcgcaccagccugcccaagugcugccugguguccaacggcagcuaccugaacgagacgcacuucuccgacgacaucgagcagcaggccgacaacaugaucaccgagaugcuccagaaggaguacaucgaccggcagggcaagaccccgcuggggcugguggaccuguucgucuucagcaccuccuucuaccucaucagcaucuuccugcaccugaucaagaucccgacgcaccgccacaucgugggcaagcccugccccaagccccaccggcucaaccacauggggaucugcuccugcggccuguacaagcagccgggggugcccacccgcuggaagcggugaggacuagucccuguucccagagcccacuuuuuuuucuuuuuuugaaauaaaauagccugucuuucagaucucaaaggcucuuuucagagccaccaaaaaaaaaaaaaaaaaaaaaaaaaaaaaaaaaaaaaaaaaaaaaaaaaaaaaaaaaaaaaaaaagaauu

SEQ ID NO: 38795 - RNA, 1733 nt, Artificial Sequence
  mRNA product Design a-2 (hSL-A64-N5) comprising derived and/or modified sequence from LASV(KAK-428;Clade n.d. (VII))__ANH09740__GPCmut11 (opt1)
aggagaguccgcucagccagguugcagaagcggcuuagcguguguccuaaucuucucucugcguguagguaggccugugccgcaaacaagcuuaccaugggccagaucgugaccuucuuccaggaggucccccacgugaucgaggaggugaugaacaucguccugaucgcccucagccugcuggccauccucaaggggcuguacaacuucgcgaccugcggcgugaucgggcugaucacguuccuccugcugugcggccgcuccugcagcgccaccuacaaggggcaguacgagcuccagacccuggagcugaacauggagucccucaacaugaccaugccgcugagcugcacgaagaacaacucccaccacuacauccgggccggcaacaacaccggccuggagcucacccugaccaacacgagcaucaucucccacaaguucugcaaccugagcgacgcccacaagaagaaccucuacgaccacacccugauguccaucaucaccaccuuccaccugagcauccccaacuucaaccaguacgaggccauguccugcgacuucaacgggggcaagaucagcauccaguacaaccucucccacagcuacgcgggggacgccgcccagcacugcggcacgguggccaacgggguccugcagaccuucaugcgcauggcguggggcggcuccuaccuggcccucgacagcgggcggcgcggcugggacugcaucaucuccagcuaccaguaccugaucauccagaacaccaccugggacgaccacugccaguucucccggcccagccccaucggguaccugggcuucgugagccagaagacgcgcgacaucuacaucucccggcgccuccugggcaccuucaccuggacccugagcgacuccgaggggcacgacaugccgggcggguacugccucacgcgguggaugcugaucgaggccgaccugaagugcuucggcaacaccgccguggccaagugcaacgagaagcacgacgaggaguucugcgacauguggcgccucuucgacuucaacaagcaggcgauccagcggcugaaggccgaggcccagaugaacauccagcugaucaacaaggccgucaacgcccucaucaacgaccagcugaugaugaagaaccaccuccgcgacaucauggggauccccuacugcaacuacagcaaguucugcuaccugaacaacaccaccacgggccggaccucccugccccgcugcugccugaucagcaacggcuccuaccucaacgagacccacuucagcgacgacaucgagcagcaggcggacaacaugaucaccgagaugcugcagaaggaguacauggaccggcaggggaagacgccccugggccucguggaccuguucguguucuccaccagcuucuaccugaucaccaucuuccugcaccucgucaagaucccgacccaccgccacaucguggggaagcccugccccaagccccaccggcugaaccacaugggcaucugcuccugcgggcuguacaagcagccgggcgugcccguccgcuggaagcggugaggacuagucccuguucccagagcccacuuuuuuuucuuuuuuugaaauaaaauagccugucuuucagaucucaaaggcucuuuucagagccaccaaaaaaaaaaaaaaaaaaaaaaaaaaaaaaaaaaaaaaaaaaaaaaaaaaaaaaaaaaaaaaaaagaauu

SEQ ID NO: 38796 - RNA, 1733 nt, Artificial Sequence; identical to SEQ ID NO: 38790
  mRNA product Design a-2 (hSL-A64-N5) comprising derived and/or modified sequence from LASV(Pinneo-NIG-1969;Clade I)__AIT17836__GPCmut11 (opt1)

SEQ ID NO: 38797 - RNA, 1733 nt, Artificial Sequence
  mRNA product Design a-2 (hSL-A64-N5) comprising derived and/or modified sequence from LASV(ISTH0009-NIG-2011;Clade II)__AIT17404__GPCmut11 (opt1)
aggagaguccgcucagccagguugcagaagcggcuuagcguguguccuaaucuucucucugcguguagguaggccugugccgcaaacaagcuuaccaugggccagaucaucaccuucuuccaggaggugccccacgucaucgaggaggugaugaacaucgugcugaucgcccucagccugcuggccauccucaaggggaucuacaacgucgcgaccugcggccuguucgggcugguguccuuccuccugcugugcggccgcagcugcuccacgaccuacaaggggguguacgagcuccagacccuggagcuggacauggccagccucaacaugaccaugccgcuguccugcacgaagaacaacagccaccacuacaucauggucggcaacgagaccggccuggagcucacccugaccaacacguccaucaucaaccacaaguucugcaaccugagcgacgcccacaagaagaaccucuacgaccacgcccugauguccaucaucagcaccuuccaccuguccauccccaacuucaaccaguacgaggccaugagcugcgacuucaacgggggcaagaucuccgugcaguacaaccucagccacgcguacgccguggacgccgccaaccacugcgggaccaucgcgaacggcguccugcagaccuucaugcggauggccuggggcggguccuacaucgcccuggacagcggcaagggguccugggacugcaucaugacgagcuaccaguaccucaucauccagaacaccaccugggaggaccacugccaguucucccgccccagccccaucggcuaccuggggcugcucagccagcggacccgcgacaucuacaucucccggcgccugcugggcacguucaccuggacccucagcgacuccgagggcaacgagacccccgggggcuacugccugacgcgguggaugcugaucgaggccgagcucaagugcuucgggaacaccgccguggcgaagugcaacgagaagcacgacgaggaguucugcgacaugcugcgccuguucgacuucaacaagcaggccauccggcgccucaagaccgaggcccagaugagcauccagcugaucaacaaggccgugaacgcccugaucaacgaccagcucaucaugaagaaccaccuccgggacaucaugggcaucccguacugcaacuacuccaaguacugcuaccugaaccacaccgucacggggaagaccagccugccccgcugcugccugguguccaacggcagcuaccugaacgagacccacuucuccgacgacaucgagcagcaggcggacaacaugaucaccgagcuccugcagaaggaguacauggaccggcagggcaagacgccccuggggcugguggaccucuucgucuucagcaccuccuucuaccugaucagcaucuuccugcaccucaucaagaucccgacccaccgccacaucaccggcaagcccugccccaagccccaccggcugaaccacauggggaucugcuccugcggccuguacaagcacccgggggugcccgugaaguggaagcgcugaggacuagucccuguucccagagcccacuuuuuuuucuuuuuuugaaauaaaauagccugucuuucagaucucaaaggcucuuuucagagccaccaaaaaaaaaaaaaaaaaaaaaaaaaaaaaaaaaaaaaaaaaaaaaaaaaaaaaaaaaaaaaaaaagaauu

SEQ ID NO: 38798 - RNA, 1733 nt, Artificial Sequence
  mRNA product Design a-2 (hSL-A64-N5) comprising derived and/or modified sequence from LASV(ISTH2010-NIG-2012;Clade II)__AIT17482__GPCmut11 (opt1)
aggagaguccgcucagccagguugcagaagcggcuuagcguguguccuaaucuucucucugcguguagguaggccugugccgcaaacaagcuuaccaugggccagaucaucaccuucuuccaggaggugccccacgucaucgaggaggugaugaacaucgugcugaucgcccucagccugcuggccauccucaaggggaucuacaacgucgcgaccugcggccuguucgggcugguguccuuccuccugcugugcggccgcagcugcuccacgaccuacaaggggguguacgagcuccagacccuggagcuggacauggccagccucaacaugaccaugccgcuguccugcacgaagaacaacagccaccacuacaucauggucggcaacgagaccggccuggagcucacccugaccaacacguccaucaucaaccacaaguucugcaaccugagcgacgcccacaagaagaaccucuacgaccacgcccugauguccaucaucagcaccuuccaccuguccauccccaacuucaaccaguacgaggccaugagcugcgacuucaacgggggcaagaucuccgugcaguacaaccucagccacgcguacgccguggacgccgccaaccacugcgggaccaucgcgaacggcguccugcagaccuucaugcggauggccuggggcggguccuacaucgcccuggacagcggcaagggguccugggacugcaucaugacgagcuaccaguaccucaucauccagaacaucaccugggaggaccacugccaguucucccgccccagccccaucggcuaccuggggcugcucagccagcggacccgcgacaucuacaucucccggcgccugcugggcaccuucacguggacccucagcgacuccgagggcaacgagacccccgggggcuacugccugacccgguggaugcugaucgaggccgagcucaagugcuucgggaacacggccguggcgaagugcaacgagaagcacgacgaggaguucugcgacaugcugcgccuguucgacuucaacaagcaggccauccggcgccucaagaccgaggcccagaugagcauccagcugaucaacaaggccgugaacgcccugaucaacgaccagcucaucaugaagaaccaccuccgggacaucaugggcauccccuacugcaacuacuccaaguacugcuaccugaaccacaccgucaccgggaagacgagccugccccgcugcugccugguguccaacggcagcuaccugaacgagacccacuucuccgacgacaucgagcagcaggcggacaacaugaucaccgagcuccugcagaaggaguacaucgaccggcagggcaagaccccgcuggggcugguggaccucuucgucuucagcacguccuucuaccugaucagcaucuuccugcaccucgugaagaucccgacccaccgccacguggucggcaagcccugccccaagccccaccggcugaaccacauggggaucugcuccugcggccuguacaagcacccgggggugcccgugaaguggaagcgcugaggacuagucccuguucccagagcccacuuuuuuuucuuuuuuugaaauaaaauagccugucuuucagaucucaaaggcucuuuucagagccaccaaaaaaaaaaaaaaaaaaaaaaaaaaaaaaaaaaaaaaaaaaaaaaaaaaaaaaaaaaaaaaaaagaauu

SEQ ID NO: 38799 - RNA, 1733 nt, Artificial Sequence
  mRNA product Design a-2 (hSL-A64-N5) comprising derived and/or modified sequence from LASV(Lassa virus/H.sapiens-wt/NGA/2015/ISTH_0543;Clade II)__AVO03639__GPCmut11 (opt1)
aggagaguccgcucagccagguugcagaagcggcuuagcguguguccuaaucuucucucugcguguagguaggccugugccgcaaacaagcuuaccaugggccagaucaucaccuucuuccaggaggugccccacgucaucgaggaggugaugaacaucgugcugaucgcccucagccugcuggccauccucaaggggaucuacaacgucgcgaccugcggccuguucgggcugguguccuuccuccugcugugcggccgcagcugcuccacgaccuacaaggggguguacgagcuccagacccuggagcuggacauggccaaccucaacaugaccaugccgcugagcugcacgaagaacaacucccaccacuacaucauggucggcaacgagaccggccuggagcucacccugaccaacacgagcaucaucaaccacaaguucugcaaccuguccgacgcccacaagaagaaccucuacgaccacgcccugaugagcaucaucuccaccuuccaccugagcauccccaacuucaaccaguacgaggccauguccugcgacuucaacgggggcaagaucagcgugcaguacaaccucucccacaccuacgcgguggacgccgccaaccacugcgggaccaucgccaacggcguccugcagacguucaugcggauggcguggggcgggagcuacaucgcccuggacuccggcaaggggagcugggacugcaucaugaccuccuaccaguaccucgugauccagaacaccaccugggaggaccacugccaguucagccgccccucccccaucggcuaccuggggcugcucagccagcggacgcgcgacaucuacaucagccggcgccugcugggcaccuucaccuggacccucuccgacagcgagggcaacgagacgcccgggggcuacugccugacccgguggaugcugaucgaggccgagcucaagugcuucgggaacaccgccguggccaagugcaacgagaagcacgacgaggaguucugcgacaugcugcgccuguucgacuucaacaagcaggcgauccggcgccucaagaccgaggcccagauguccauccagcugaucaacaaggccgucaacgcccugaucaacgaccagcucaucaugaagaaccaccuccgggacaucaugggcauccccuacugcaacuacagcaaguacugcuaccugaaccacacggugaccgggaagaccucccugccccgcugcugccuggugagcaacggcuccuaccugaacgagacccacuucagcgacgacaucgagcagcaggccgacaacaugaucacggagcuccugcagaaggaguacaucgaccggcagggcaagaccccgcuggggcuggucgaccucuucguguucuccaccagcuucuaccugaucuccaucuuccugcaccucgugaagaucccgacccaccgccacaucacgggcaagcccugccccaagccccaccggcugaaccacauggggaucugcagcugcggccuguacaagcacccggggguccccgugaaguggaagcgcugaggacuagucccuguucccagagcccacuuuuuuuucuuuuuuugaaauaaaauagccugucuuucagaucucaaaggcucuuuucagagccaccaaaaaaaaaaaaaaaaaaaaaaaaaaaaaaaaaaaaaaaaaaaaaaaaaaaaaaaaaaaaaaaaagaauu

SEQ ID NO: 38800 - RNA, 1733 nt, Artificial Sequence
  mRNA product Design a-2 (hSL-A64-N5) comprising derived and/or modified sequence from LASV(Lassa virus/H.sapiens-wt/NGA/2016/ISTH_0009;Clade II)__AVO03571__GPCmut11 (opt1)
aggagaguccgcucagccagguugcagaagcggcuuagcguguguccuaaucuucucucugcguguagguaggccugugccgcaaacaagcuuaccaugggccagaucaucaccuucuuccaggaggugccccacgucaucgaggaggugaugaacaucgugcugaucgcccucagccugcuggccauccucaaggggaucuacaacgucgcgaccugcggccugcuggggcucguguccuuccugcugcucugcggccgcagcugcuccacgaccuacaaggggguguacgagcugcagacccuggagcucgacauggccagccugaacaugaccaugccgcuguccugcacgaagaacaacagccaccacuacaucauggucggcaacgagaccggccucgagcugacccugaccaacacguccaucaucaaccacaaguucugcaaccucagcgacgcccacaagaagaaccuguacgaccacgcccugauguccaucaucagcaccuuccaccucuccauccccaacuucaaccaguacgaggccaugagcugcgacuucaacgggggccggaucuccgugcaguacaaccugagccacuccuacgcgguggacgccgccaaccacugcgggaccaucgccaacggcguccugcagaccuucaugcgcauggcguggggcgggagcuacaucgcccucgacuccggcaaggggagcugggacugcaucaugacguccuaccaguaccugaucauccagaacaccaccugggaggaccacugccaguucagccggcccagccccaucggcuaccuggggcuccugucccagcgcacccgggacaucuacaucagccgccggcugcucggcacguucaccuggacccuguccgacagcgagggcaacgagacccccgggggcuacugccugacgcgcuggaugcucaucgaggccgagcugaagugcuucgggaacaccgccguggccaagugcaacgagaagcacgacgaggaguucugcgacaugcugcggcuguucgacuucaacaagcaggcgauccgccggcugaagaccgaggcccagauguccauccagcugaucaacaaggccgugaacgcccucaucaacgaccagcugaucaugaagaaccaccuccgcgacaucaugggcaucccguacugcaacuacagcaaguacugcuaccucaaccacaccgucacggggaagaccucccugccccggugcugccuggugagcaacggcuccuaccucaacgagacccacuucagcgacgacaucgagcagcaggccgacaacaugaucaccgagcugcugcagaaggaguacaucgaccgccagggcaagacgccccuggggcucguggaccuguucgucuucuccaccagcuucuaccugaucuccaucuuccuccaccuggugaagaucccgacccaccggcacaucaccggcaagcccugccccaagccccaccgccugaaccacauggggaucugcagcugcggccucuacaaccacccgggggugcccgucaaguggaagcggugaggacuagucccuguucccagagcccacuuuuuuuucuuuuuuugaaauaaaauagccugucuuucagaucucaaaggcucuuuucagagccaccaaaaaaaaaaaaaaaaaaaaaaaaaaaaaaaaaaaaaaaaaaaaaaaaaaaaaaaaaaaaaaaaagaauu

SEQ ID NO: 38801 - RNA, 1733 nt, Artificial Sequence
  mRNA product Design a-2 (hSL-A64-N5) comprising derived and/or modified sequence from LASV(Lassa virus/H.sapiens-wt/NGA/2016/ISTH_0017;Clade II)__AVO03567__GPCmut11 (opt1)
aggagaguccgcucagccagguugcagaagcggcuuagcguguguccuaaucuucucucugcguguagguaggccugugccgcaaacaagcuuaccaugggccagaucaucaccuucuuccaggaggugccccacgucaucgaggaggugaugaacaucgugcugaucgcccucagccugcuggccauccucaaggggaucuacaacgucgcgaccugcggccuguucgggcugguguccuuccuccugcugugcggccgcagcugcuccacgaccuacaaggggguguacgagcuccagacccuggagcuggacauggccagccucaacaugaccaugccgcuguccugcacgaagaacaacagccaccacuacaucauggucggcaacgagaccggccuggagcucacccugaccaacacguccaucaucaaccacaaguucugcaaccugagcgacgcccacaagaagaaccucuacgaccacgcccugauguccaucaucagcaccuuccaccuguccauccccaacuucaaccaguacgaggccaugagcugcgacuucaacgggggcaagaucuccgugcaguacaaccucagccacaccuacgcgaucgacgccgccaaccacugcgggaccaucgccaacggcgugcugcagacguucaugcggauggcguggggcggguccuacaucgcccuggacagcggcaagggguccugggacugcaucaugaccagcuaccaguaccucaucauccagaacaccaccugggaggaccacugccaguucucccgccccagccccaucggcuaccuggggcugcucagccagcggacgcgcgacaucuacaucucccggcgccugcugggcaccuucaccuggacccucagcgacuccgagggcaacgagacgcccgggggcuacugccugacccgguggaugcugaucgaggccgagcucaagugcuucgggaacaccgccgucgccaagugcaacgagaagcacgacgaggaguucugcgacaugcugcgccuguucgacuucaacaagcaggcgauccggcgccucaagaccgaggcccagaugagcauccagcugaucaacaaggccgugaacgcccugaucaacgaccagcucaucaugaagaaccaccuccgggacaucaugggcauccccuacugcaacuacuccaaguacugcuaccugaaccacacggugaccgggaagaccagccugccccgcugcugccuggucuccaacggcagcuaccugaacgagacccacuucuccgacgacaucgagcagcaggccgacaacaugaucacggagcuccugcagaaggaguacauggaccggcagggcaagaccccgcuggggcugguggaccucuucguguucagcaccuccuucuaccugaucagcaucuuccugcaccucguccgcaucccgacccaccggcacgugaucggcaagcccugccccaagccccaccgccugaaccacauggggaucugcuccugcggccuguacaagcacccgggggugcccgucaaguggaagcggugaggacuagucccuguucccagagcccacuuuuuuuucuuuuuuugaaauaaaauagccugucuuucagaucucaaaggcucuuuucagagccaccaaaaaaaaaaaaaaaaaaaaaaaaaaaaaaaaaaaaaaaaaaaaaaaaaaaaaaaaaaaaaaaaagaauu

SEQ ID NO: 38802 - RNA, 1733 nt, Artificial Sequence
  mRNA product Design a-2 (hSL-A64-N5) comprising derived and/or modified sequence from LASV(Lassa virus/H.sapiens-wt/NGA/2018/ISTH_0959;Clade II)__AVV65099__GPCmut11 (opt1)
aggagaguccgcucagccagguugcagaagcggcuuagcguguguccuaaucuucucucugcguguagguaggccugugccgcaaacaagcuuaccaugggccagaucaucaccuucuuccaggaggugccccacgucaucgaggaggugaugaacaucgugcugaucgcccucagccugcuggccauccucaaggggaucuacaacgucgugaccugcggccuguucgggcugguguccuuccuccugcugugcggccgcagcugcuccacgaccuacaagggggucuacgagcuccagacccuggagcuggacauggcgagccucaacaugaccaugccgcuguccugcacgaagaacaacagccaccacuacaucauggugggcaacgagaccggccuggagcucacccugaccaacacguccaucaucaaccacaaguucugcaaccugagcgacgcccacaagaagaaccucuacgaccacgcccugauguccaucaucagcaccuuccaccuguccauccccaacuucaaccaguacgaggccaugagcugcgacuucaacgggggcaagaucuccgugcaguacaaccucagccacgccuacgcgaucgacgccgccaaccacugcgggaccaucgccaacggcguccugcagaccuucaugcggauggcguggggcggguccuacaucgcccuggacagcggcaagggguccugggacugcaucaugacgagcuaccaguaccucaucauccagaacaccaccugggaggaccacugccaguucucccgccccagccccaucggcuaccuggggcugcucagccagcggacccgcgacaucuacaucucccggcgccugcugggcacguucaccuggacccucagcgacuccgagggcaacgagacccccgggggcuacugccugacgcgguggaugcugaucgaggccgagcucaagugcuucgggaacaccgccguggccaagugcaacgagaagcacgacgaggaguucugcgacaugcugcgccuguucgacuucaacaagcaggcgauccggcgccucaagaccgaggcccagaugagcauccagcugaucaacaaggccgugaacgcccugaucaacgaccagcucaucaugaagaaccaccuccgggacaucaugggcaucccguacugcaacuacuccaaguacugcuaccugaaccacaccgucacggggaagaccagccugccccgcugcugccugguguccaacggcagcuaccugaacgagacccacuucuccgacgacaucgagcagcaggccgacaacaugaucaccgagcuccugcagaaggaguacaucgaccggcagggcaagacgccccuggggcugguggaccucuucgucuucagcaccuccuucuaccugaucagcaucuuccugcaccucgugaagaucccgacccaccgccacgugaucggcaagcccugccccaagccccaccggcugaaccacauggggaucugcuccugcggccuguacaagcacccggggguccccgugaaguggaagcgcugaggacuagucccuguucccagagcccacuuuuuuuucuuuuuuugaaauaaaauagccugucuuucagaucucaaaggcucuuuucagagccaccaaaaaaaaaaaaaaaaaaaaaaaaaaaaaaaaaaaaaaaaaaaaaaaaaaaaaaaaaaaaaaaaagaauu

SEQ ID NO: 38803 - RNA, 1733 nt, Artificial Sequence
  mRNA product Design a-2 (hSL-A64-N5) comprising derived and/or modified sequence from LASV(LASV003-NIG-2008;Clade II)__AIT17580__GPCmut11 (opt1)
aggagaguccgcucagccagguugcagaagcggcuuagcguguguccuaaucuucucucugcguguagguaggccugugccgcaaacaagcuuaccaugggccagaucaucaccuucuuccaggaggugccccacgucaucgaggaggugaugaacaucgugcugaucgcccucagccugcuggccauccucaaggggaucuacaacgucgcgaccugcggccuguucgggcugguguccuuccuccugcugugcggccgcagcugcuccacgaccuacaaggggguguacgagcuccagacccuggagcuggacauggccagccucaacaugaccaugccgcuguccugcacgaagaacaacagccaccacuacaucauggucggcaacgagaccggccuggagcucacccugaccaacacguccaucaucaaccacaaguucugcaaccugagcgacgcccacaagaagaaccucuacgaccacgcccugauguccaucaucagcaccuuccaccuguccauccccaacuucaaccaguacgaggccaugagcugcgacuucaacgggggcaagaucuccgugcaguacaaccucagccacaccuacgcgguggacgccgccaaccacugcgggaccaucgccaacggcguccugcagacguucaugcggauggcguggggcggguccuacaucgcccuggacagcggcaagggguccugggacugcaucaugaccagcuaccaguaccucaucauccagaacaccaccugggaggaccacugccaguucucccgccccagccccaucggcuaccuggggcugcucagccagcggacgcgcgacaucuacaucucccggcgccugcugggcaccuucaccuggacccucagcgacuccgagagcaacgagacgccgggcggguacugccugacccgguggaugcugaucgaggccgagcucaagugcuucggcaacaccgccguggccaagugcaacgagaagcacgacgaggaguucugcgacaugcugcgccuguucgacuucaacaagcaggcgauccggcgccucaaggccgaggcccagauguccauccagcugaucaacaaggccgugaacgcccugaucaacgaccagcucaucaugaagaaccaccuccgggacaucauggggauccccuacugcaacuacagcaaguacugcuaccugaaccacaccgucacgggccgcaccucccugccccggugcugccuggugagcaacggguccuaccugaacgagacccacuucagcgacgacaucgagcagcaggcggacaacaugaucaccgagcuccugcagaaggaguacauggaccgccagggcaagacgccccugggccugguggaccucuucgucuucuccaccagcuucuaccugaucuccaucuuccugcaccucgugaagaucccgacccaccggcacgugaucgggaagcccugccccaagccccaccgccugaaccacaugggcaucugcagcugcgggcuguacaagcacccgggcguccccgugaaguggaagcggugaggacuagucccuguucccagagcccacuuuuuuuucuuuuuuugaaauaaaauagccugucuuucagaucucaaaggcucuuuucagagccaccaaaaaaaaaaaaaaaaaaaaaaaaaaaaaaaaaaaaaaaaaaaaaaaaaaaaaaaaaaaaaaaaagaauu

SEQ ID NO: 38804 - RNA, 1733 nt, Artificial Sequence
  mRNA product Design a-2 (hSL-A64-N5) comprising derived and/or modified sequence from LASV(LASV035-NIG-2009;Clade II)__AIT17588__GPCmut11 (opt1)
aggagaguccgcucagccagguugcagaagcggcuuagcguguguccuaaucuucucucugcguguagguaggccugugccgcaaacaagcuuaccaugggccagaucaucaccuucuuccaggaggugccccacgucaucgaggaggugaugaacaucgugcugaucgcccucagccugcuggccauccucaaggggaucuacaacgucgcgaccugcggccuguucgggcugguguccuuccuccugcugugcggccgcagcugcuccacgaccuacaaggggguguacgagcuccagacccuggagcuggacauggccagccucaacaugaccaugccgcuguccugcacgaagaacaacagccaccacuacaucauggucggcaacgagaccggccuggagcucacccugaccaacacguccaucaucaaccacaaguucugcaaccugagcgacgcccacaagaagaaccucuacgaccacgcccugauguccaucaucagcaccuuccaccuguccauccccaacuucaaccaguacgaggccaugagcugcgacuucaacgggggcaagaucuccgugcaguacaaccucagccacgcguacgccguggacgccgccaaccacugcgggaccaucgcgaacggcguccugcagaccuucaugcggauggccuggggcggguccuacaucgcccuggacagcggcaagggguccugggacugcaucaugacgagcuaccaguaccucaucauccagaacaccaccugggaggaccacugccaguucucccgccccagccccaucggcuaccuggggcugcucagccagcggacccgcgacaucuacaucucccggcgccugcugggcacguucaccuggacccucagcgacuccgagggcaacgagacccccgggggcuacugccugacgcgguggaugcugaucgaggccgagcucaagugcuucgggaacaccgccguggcgaagugcaacgagaagcacgacgaggaguucugcgacaugcugcgccuguucgacuucaacaagcaggccauccggcgccucaaggccgaggcccagaugagcauccagcugaucaacaaggccgugaacgcgcugaucaacgaccagcucaucaugaagaaccaccuccgggacaucaugggcauccccuacugcaacuacuccaaguacugcuaccugaaccacaccgucaccgggaagacgagccugccccgcugcugccugguguccaacggcagcuaccugaacgagacccacuucuccgacgacaucgagcagcaggccgacaacaugaucaccgagcuccugcagaaggaguacaucgaccggcagggcaagaccccgcuggggcugguggaccucuucgucuucagcacguccuucuaccugaucagcaucuuccugcaccucgugaagaucccgacccaccgccacgugaucggcaagcccugccccaagccccaccggcugaaccacauggggaucugcuccugcggccuguacaagcacccggggguccccgugaaguggaagcgcugaggacuagucccuguucccagagcccacuuuuuuuucuuuuuuugaaauaaaauagccugucuuucagaucucaaaggcucuuuucagagccaccaaaaaaaaaaaaaaaaaaaaaaaaaaaaaaaaaaaaaaaaaaaaaaaaaaaaaaaaaaaaaaaaagaauu

SEQ ID NO: 38805 - RNA, 1733 nt, Artificial Sequence
  mRNA product Design a-2 (hSL-A64-N5) comprising derived and/or modified sequence from LASV(LASV1000-NIG-2009;Clade II)__AIT17782__GPCmut11 (opt1)
aggagaguccgcucagccagguugcagaagcggcuuagcguguguccuaaucuucucucugcguguagguaggccugugccgcaaacaagcuuaccaugggccagaucaucaccuucuuccaggaggugccccacgucaucgaggaggugaugaacaucgugcugaucgcccucagccugcuggccauccucaaggggaucuacaacgucgcgaccugcggccuguucgggcugguguccuuccuccugcugugcggccgcagcugcuccacgaccuacaaggggguguacgagcuccagacccuggagcuggacauggccagccucaacaugaccaugccgcuguccugcacgaagaacaacagccaccacuacaucauggucggcaacgagaccggccuggagcucacccugaccaacacguccaucaucaaccacaaguucugcaaccugagcgacgcccacaagaagaaccucuacgaccacgcccugauguccaucaucagcaccuuccaccuguccauccccaacuucaaccaguacgaggccaugagcugcgacuucaacgggggcaagaucuccgugcaguacaaccucagccacaccuacgcgguggacgccgccaaccacugcgggaccaucgccaacggcguccugcagacguucaugcggauggcguggggcggguccuacaucgcccuggacagcggcaagggguccugggacugcaucaugaccagcuaccaguaccucaucauccagaacaccaccugggaggaccacugccaguucucccgccccagccccaucggcuaccuggggcugcucagccagcggacgcgcgacaucuacaucucccggcgccugcugggcaccuucaccuggacccucagcgacuccgagggcaacgagacgcccgggggcuacugccugacccgguggaugcugaucgaggccgagcucaagugcuucgggaacaccgccguggccaagugcaacgagaagcacgacgaggaguucugcgacaugcugcgccuguucgacuucaacaagcaggcgaucaagcggcucaagaccgaggcccagaugagcauccagcugaucaacaaggccgugaacgcccugaucaacgaccagcucaucaugaagaaccaccuccgcgacaucaugggcauccccuacugcaacuacuccaaguacugcuaccugaaccacacggucaccgggaagaccagccugccccggugcugccugguguccaacggcagcuaccugaacgagacccacuucuccgacgacaucgagcagcaggccgacaacaugaucacggagcuccugcagaaggaguacaucgaccgccagggcaagaccccgcuggggcugguggaccucuucgucuucagcaccuccuucuaccugaucagcaucuuccugcaccucgugaagaucccgacccaccggcacguggucggcaagcccugccccaagccccaccgccugaaccacauggggaucugcuccugcggccuguacaagcacccgggggugcccgugaaguggaagcggugaggacuagucccuguucccagagcccacuuuuuuuucuuuuuuugaaauaaaauagccugucuuucagaucucaaaggcucuuuucagagccaccaaaaaaaaaaaaaaaaaaaaaaaaaaaaaaaaaaaaaaaaaaaaaaaaaaaaaaaaaaaaaaaaagaauu

SEQ ID NO: 38806 - RNA, 1733 nt, Artificial Sequence
  mRNA product Design a-2 (hSL-A64-N5) comprising derived and/or modified sequence from LASV(LASV221-NIG-2010;Clade II)__AIT17624__GPCmut11 (opt1)
aggagaguccgcucagccagguugcagaagcggcuuagcguguguccuaaucuucucucugcguguagguaggccugugccgcaaacaagcuuaccaugggccagaucaucaccuucuuccaggaggugccccacgucaucgaggaggugaugaacaucgugcugaucgcccucagccugcuggccauccucaaggggaucuacaacgucgcgaccugcggccuguucgggcugguguccuuccuccugcugugcggccgcagcugcuccacgaccuacaaggggguguacgagcuccagacccuggagcuggacauggccagccucaacaugaccaugccgcuguccugcacgaagaacaacagccaccacuacaucauggucggcaacgagaccggccuggagcucacccugaccaacacguccaucaucaaccacaaguucugcaaccugagcgacgcccacaagaagaaccucuacgaccacgcccugauguccaucaucagcaccuuccaccuguccauccccaacuucaaccaguacgaggccaugagcugcgacuucaacgggggcaagaucuccgugcaguacaaccucagccacaccuacgcgaucgacgccgccaaccacugcgggaccaucgccaacggcgugcugcagacguucaugcggauggcguggggcggguccuacaucgcccuggacagcggcaagggguccugggacugcaucaugaccagcuaccaguaccucaucauccagaacaccaccugggaggaccacugccaguucucccgccccagccccaucggcuaccuggggcugcucagccagcggacgcgcgacaucuacaucucccggcgccugcugggcaccuucaccuggacccucagcgacuccgagggcaacgagacgcccgggggcuacugccugacccgguggaugcugaucgaggccgagcucaagugcuucgggaacaccgccgucgccaagugcaacgagaagcacgacgaggaguucugcgacaugcugcgccuguucgacuucaacaagcaggcgauccggcgccucaagaccgaggcccagaugagcauccagcugaucaacaaggccgugaacgcccugaucaacgaccagcucaucaugaagaaccaccuccgggacaucaugggcauccccuacugcaacuacuccaaguacugcuaccugaaccacacggugaccgggaagaccagccugccccgcugcugccuggucuccaacggcagcuaccugaacgagacccacuucuccgacgacaucgagcagcaggccgacaacaugaucacggagaugcuccagaaggaguacauggaccggcagggcaagaccccgcuggggcugguggaccuguucguguucagcaccuccuucuaccucaucagcaucuuccugcaccuggucaagaucccgacccaccgccacgugaucggcaagcccugccccaagccccaccggcucaaccacauggggaucugcuccugcggccuguacaagcacccgggggugcccgucaaguggaagcgcugaggacuagucccuguucccagagcccacuuuuuuuucuuuuuuugaaauaaaauagccugucuuucagaucucaaaggcucuuuucagagccaccaaaaaaaaaaaaaaaaaaaaaaaaaaaaaaaaaaaaaaaaaaaaaaaaaaaaaaaaaaaaaaaaagaauu

SEQ ID NO: 38807 - RNA, 1733 nt, Artificial Sequence
  mRNA product Design a-2 (hSL-A64-N5) comprising derived and/or modified sequence from LASV(LASV237-NIG-2010;Clade II)__AIT17638__GPCmut11 (opt1)
aggagaguccgcucagccagguugcagaagcggcuuagcguguguccuaaucuucucucugcguguagguaggccugugccgcaaacaagcuuaccaugggccagaucaucaccuucuuccaggaggugccccacgucaucgaggaggugaugaacaucgugcugaucgcccucagccugcuggccauccucaaggggaucuacaacgucgcgaccugcggccuguucgggcugguguccuuccuccugcugugcggccgcagcugcuccacgaccuacaaggggguguacgagcuccagacccuggagcuggacauggccagccucaacaugaccaugccgcuguccugcacgaagaacaacagccaccacuacaucauggucggcaacgagaccggccuggagcucacccugaccaacacguccaucaucaaccacaaguucugcaaccugagcgacgcccacaagaaggaccucuacgaccacgcccugauguccaucaucagcaccuuccaccuguccauccccaacuucaaccaguacgaggccaugagcugcgacuucaacgggggcaagaucuccgugcaguacaaccucagccacaccuacgcgguggacgccgccaaccacugcgggaccaucgccaacggcguccugcagacguucaugcggauggcguggggcggguccuacaucgcccuggacagcggcaagggguccugggacugcaucaugaccagcuaccaguaccucaucauccagaacaccaccugggaggaccacugccaguucucccgccccagccccaucggcuaccuggggcugcucagccagcggacgcgcgacaucuacaucucccggcgccugcugggcaccuucaccuggacccucagcgacuccgagggcaacgagacgcccgggggcuacugccugacccgguggaugcugaucgaggccgagcucaagugcuucgggaacaccgccguggccaagugcaacgagaagcacgacgaggaguucugcgacaugcugcgccuguucgacuucaacaagcaggcgauccggcgccucaagaccgaggcccagaugagcauccagcugaucaacaaggccgugaacgcccugaucaacgaccagcucaucaugaagaaccaccuccgggacaucaugggcauccccuacugcaacuacuccaaguacugcuaccugaaccacacggucaccgggaagaccagccugccccgcugcugccugguguccaacggcagcuaccugaacgagacccacuucuccgacgacaucgagcagcaggccgacaacaugaucacggagcuccugcagaaggaguacauggaccggcagggcaagaccccgcuggggcugguggaccucuucgucuucagcaccuccuucuaccugaucagcaucuuccugcaccucaucaagaucccgacccaccgccacaucacgggcaagcccugccccaagccccaccggcugaaccacauggggaucugcuccugcggccuguacaagcacccgggggugcccgugaaguggaagcgcugaggacuagucccuguucccagagcccacuuuuuuuucuuuuuuugaaauaaaauagccugucuuucagaucucaaaggcucuuuucagagccaccaaaaaaaaaaaaaaaaaaaaaaaaaaaaaaaaaaaaaaaaaaaaaaaaaaaaaaaaaaaaaaaaagaauu

SEQ ID NO: 38808 - RNA, 1733 nt, Artificial Sequence
  mRNA product Design a-2 (hSL-A64-N5) comprising derived and/or modified sequence from LASV(LASV253-NIG-2011;Clade II)__AIT17670__GPCmut11 (opt1)
aggagaguccgcucagccagguugcagaagcggcuuagcguguguccuaaucuucucucugcguguagguaggccugugccgcaaacaagcuuaccaugggccagaucaucaccuucuuccaggaggugccccacgucaucgaggaggugaugaacaucgugcugaucgcccucagccugcuggccauccucaaggggaucuacaacgucgcgaccugcggccuguucgggcugguguccuuccuccugcugugcggccgcagcugcuccacgaccuacaaggggguguacgagcuccagacccuggagcuggacauggccagccucaacaugaccaugccgcuguccugcacgaagaacaacagccaccacuacaucauggucggcaacgagaccggccuggagcucacccugaccaacacguccaucaucaaccacaaguucugcaaccugagcgacgcccacaagaagaaccucuacgaccacgcccugauguccaucaucagcaccuuccaccuguccauccccaacuucaaccaguacgaggccaugagcugcgacuucaacgggggcaagaucuccgugcaguacaaccucagccacaccuacgcgguggacgccgccaaccacugcgggaccaucgccaacggcguccugcagacguucaugcggauggcguggggcggguccuacaucgcccuggacagcggcaagggguccugggacugcaucaugaccagcuaccaguaccucaucauccagaacaccaccugggaggaccacugccaguucucccgccccagccccaucggcuaccuggggcugcucagccagcggacgcgcgacaucuacaucucccggcgccugcugggcaccuucaccuggacccucagcgacuccgagggcaacgagacgcccgggggcuacugccugacccgguggaugcugaucgaggccgagcucaagugcuucgggaacaccgccguggccaagugcaacgagaagcacgacgaggaguucugcgacaugcugcgccuguucgacuucaacaagcaggcgauccggcgccucaaggccgaggcccagaugagcauccagcugaucaacaaggccgugaacgcccugaucaacgaccagcucaucaugaagaaccaccuccgggacaucaugggcaucccguacugcaacuacuccaaguacugcuaccugaaccacaccgucacggggcgcaccagccugccccggugcugccugguguccaacggcagcuaccugaacgagacccacuucuccgacgacaucgagcagcaggcggacaacaugaucaccgagcuccugcagaaggaguacaucgaccgccagggcaagacgccccuggggcugguggaccucuucgucuucagcaccuccuucuaccugaucagcaucuuccugcaccucgugaagaucccgacccaccggcacaucaucggcaagcccugccccaagccccaccgccugaaccacauggggaucugcuccugcggccuguacaagcacccgggggugcccgucaaguggaagcggugaggacuagucccuguucccagagcccacuuuuuuuucuuuuuuugaaauaaaauagccugucuuucagaucucaaaggcucuuuucagagccaccaaaaaaaaaaaaaaaaaaaaaaaaaaaaaaaaaaaaaaaaaaaaaaaaaaaaaaaaaaaaaaaaagaauu

SEQ ID NO: 38809 - RNA, 1733 nt, Artificial Sequence
  mRNA product Design a-2 (hSL-A64-N5) comprising derived and/or modified sequence from LASV(LASV254-NIG-2011;Clade II)__AIT17674__GPCmut11 (opt1)
aggagaguccgcucagccagguugcagaagcggcuuagcguguguccuaaucuucucucugcguguagguaggccugugccgcaaacaagcuuaccaugggccagaucaucaccuucuuccaggaggugccccacgucaucgaggaggugaugaacaucgugcugaucgcccucagccugcuggccauccucaaggggaucuacaacgucgcgaccugcggccuguucgggcugguguccuuccuccugcugugcggccgcagcugcuccacgaccuacaaggggguguacgagcuccagacccuggagcuggacaugaccaaccucaacaugacgaugccgcugagcugcaccaagaacaacucccaccacuacaucauggucggcaacgagaccggccuggagcucacccugacgaacaccagcaucaucaaccacaaguucugcaaccuguccgacgcccacaagaagaaccucuacaaccacgcccugaugagcaucaucuccaccuuccaccugagcauccccaacuucaaccaguacgaggccauguccugcgacuucaacgggggcaagaucagcgugcaguacaaccucucccacagcuacgccguggacgcggccaaccacugcgggaccaucgccaacggcguccugcagacguucaugcggauggccuggggcggguccuacaucgcgcuggacagcggcaaggggaacugggacugcaucaugaccuccuaccaguaccucaucauccagaacaccaccugggaggaccacugccaguucagccgccccucccccaucggcuaccuggggcugcucagccagcggacgcgcgacaucuacaucagccggcgccugcugggcaccuucaccuggacccucuccgacagcgagggcaacgagacgcccgggggcuacugccugacccgguggaugcugaucgaggccgagcucaagugcuucgggaacaccgccguggccaagugcaacgagaagcacgacgaggaguucugcgacaugcugcgccuguucgacuucaacaagcaggccauccggcgccucaagaccgaggcgcaggccaacauccagcugaucaacaaggccgugaacgcccugaucaacgaccagcucaucaugaagaaccaccuccgggacaucaugggcauccccuacugcaacuacuccaaguacugcuaccugaaccacacggucaccgggaagaccagccugccccgcugcugccugguguccaacggcagcuaccugaacgagacccacuucuccgacgacaucgagcagcaggccgacaacaugaucacggagcuccugcagaaggaguacauggaccggcagggcaagaccccgcuggggcugguggaccucuucgucuucagcaccuccuucuaccugaucagcaucuuccugcaccucgugaagaucccgacccaccgccacgugaucggcaagcccugccccaagccccaccggcugaaccacauggggaucugcuccugcggccuguacaagcacccggggguccccgugaaguggaagcgcugaggacuagucccuguucccagagcccacuuuuuuuucuuuuuuugaaauaaaauagccugucuuucagaucucaaaggcucuuuucagagccaccaaaaaaaaaaaaaaaaaaaaaaaaaaaaaaaaaaaaaaaaaaaaaaaaaaaaaaaaaaaaaaaaagaauu

SEQ ID NO: 38810 - RNA, 1733 nt, Artificial Sequence
  mRNA product Design a-2 (hSL-A64-N5) comprising derived and/or modified sequence from LASV(Nig08-A19;Clade III)__ADU56618__GPCmut11 (opt1)
aggagaguccgcucagccagguugcagaagcggcuuagcguguguccuaaucuucucucugcguguagguaggccugugccgcaaacaagcuuaccaugggccagaucgugaccuucuuccaggaggucccccacgugaucgaggaggugaugaacaucguccugaucgcccucagcauccuggccauccugaaggggcucuacaacaucgcgaccugcggccugaucgggcuggugacguuccuccugcuguccggccgcagcugcuccaugaccuacaaggggguguacgagcuccagacccuggagcugaacaugaacacccucaacaugacgaugccgcugagcugcaccaagaacaacucccaccacuacaucauggucggcaacgagaccggccuggagcucacccugacgaacaccagccugcuccaccacaaguucugcaaccuguccgacgcccacaagaagaaccuguacgaccacacccucaugagcaucaucuccaccuuccaccugagcauccccaacuucaaccaguacgaggccauguccugcgacuucaacgggggcaagaucacggugcaguacaaccugagccacuccuacgccaucgacgccgcgaaccacugcgggaccguggccaacggcguccuccagaccuucaugcggauggccuggggcgggagcuacaucgcccuggacuccggccgcgggaagugggacugcaucaugaccagcuaccaguaccugaucauccagaacacgaccugggaggaccacugccaguucucccggcccagccccaucggcuaccucgggcugcugucccagcgcacccgggacaucuacaucagccgccggcuccugggcaccuucacguggacccugagcgacuccgagggcaacgagacccccgggggcuacugccucacccgcuggaugcugaucgaggcggagcugaagugcuucgggaacacggccguggccaagugcaacgagaagcacgacgaggaguucugcgacaugcuccggcuguucgacuucaacaagcaggccauccgccggcugaaggccgaggcgcagaugagcauccagcucaucaacaaggccgugaacgcccugaucaacgaccagcugaucaugaagaaccaccuccgcgacaucaugggcauccccuacugcaacuacuccaaguacugcuaccugaaccacaccagcaccgggcggaccucccugccccgcugcugccucgucagcaacggcuccuaccugaacgagacgcacuucagcgacgacaucgagcagcaggccgacaacaugaucaccgagaugcugcagaaggaguaccuggaccggcagggcaagaccccgcucgggcugguggaccuguucguguucuccaccagcuucuaccucaucuccaucuuccugcaccuggucaagaucccgacgcaccgccacaucgugggcaagcccugccccaagccccaccggcucaaccacauggggaucugcagcugcggccuguacaagcagccgggggugcccguccgcuggaagcggugaggacuagucccuguucccagagcccacuuuuuuuucuuuuuuugaaauaaaauagccugucuuucagaucucaaaggcucuuuucagagccaccaaaaaaaaaaaaaaaaaaaaaaaaaaaaaaaaaaaaaaaaaaaaaaaaaaaaaaaaaaaaaaaaagaauu

SEQ ID NO: 38811 - RNA, 1736 nt, Artificial Sequence
  mRNA product Design a-2 (hSL-A64-N5) comprising derived and/or modified sequence from LASV(G1180-SLE-2010;Clade IV)__AIT17168__GPCmut11 (opt1)
aggagaguccgcucagccagguugcagaagcggcuuagcguguguccuaaucuucucucugcguguagguaggccugugccgcaaacaagcuuaccaugggccagaucgugaccuucuuccaggaggucccccacgugaucgaggaggugaugaacaucguccugaucgcccucagcauccuggccgugcugaaggggcucuacaacuucgcgaccugcggccugguggggcugcucaccuuccugcugcucugcggccgcuccugcaccgccagccgguacaagggggucuacgagcugcagacccuggagcucaacauggagacccugaacaugacgaugccgcuguccugcaccaagaacaacagccaccacuacaucauggugggcaacgagaccggccucgagcugacccugacgaacaccuccaucaucaaccacaaguucugcaaccucagcgacgcccacaagaagaaccuguacgaccacgcccugauguccaucaucagcaccuuccaccucuccauccccaacuucaaccaguacgaggccaugagcugcgacuucaacgggggcaagaucuccgugcaguacaaccugagccacuccuacgcgggggacgccgccaaccacugcggcaccgucgccaacggggugcugcagacguucaugcgcauggcguggggcggcagcuacaucgcccucgacuccgggcacggcagcugggacugcaucaugaccuccuaccaguaccugaucauccagaacaccaccugggaggaccacugccaguucagccggcccucccccaucggguaccugggccuccugagccagcgcacgcgggacaucuacaucagccgccggcugcucggcaccuucaccuggacccuguccgacagcgaggggaaggacacgccgggcggguacugccugacccgcuggaugcucaucgaggccgagcugaagugcuucggcaacaccgccguggccaagugcaacgagaagcacgacgaggaguucugcgacaugcugcggcuguucgacuucaacaagcaggcgauccagcgccugaaggccgaggcccagauguccauccagcugaucaacaaggccgucaacgcccucaucaacgaccagcugaucaugaagaaccaccuccgggacaucauggggauccccuacugcaacuacagcaaguacugcuaccucaaccacaccacgaccggcaagaccucccugcccaagugcugccuggugagcaacggcuccuaccucaacgagacccacuucagcgacgacaucgagcagcaggcggacaacaugaucacggagaugcugcagaaggaguacauggagcgccaggggaagacgccccugggccugguggaccucuucgucuucuccaccagcuucuaccugaucuccaucuuccugcaccucgugaagaucccgacccaccggcacaucgugggcaagagcugccccaagccccaccgccugaaccacauggggaucugcuccugcgggcuguacaagcagcccggcgucccggugaaguggaagcggugaggacuagucccuguucccagagcccacuuuuuuuucuuuuuuugaaauaaaauagccugucuuucagaucucaaaggcucuuuucagagccaccaaaaaaaaaaaaaaaaaaaaaaaaaaaaaaaaaaaaaaaaaaaaaaaaaaaaaaaaaaaaaaaaagaauu

SEQ ID NO: 38812 - RNA, 1736 nt, Artificial Sequence
  mRNA product Design a-2 (hSL-A64-N5) comprising derived and/or modified sequence from LASV(G1442-SLE-2011;Clade IV)__AIT17180__GPCmut11 (opt1)
aggagaguccgcucagccagguugcagaagcggcuuagcguguguccuaaucuucucucugcguguagguaggccugugccgcaaacaagcuuaccaugggccagaucgugaccuucuuccaggaggucccccacgugaucgaggaggugaugaacaucguccugaucgcccucagcauccuggccgugcugaaggggcucuacaacguggcgaccugcggccugaucgggcuggucacguuccuccugcugugcggccgcuccugcaccaccacccucuacaaggggguguacgagcugcagacgcuggagcucaacauggagacccugaacaugaccaugccgcugagcugcaccaagaacaacucccaccacuacauccgggugggcaacgagacgggccucgagcugacccugaccaacaccagcaucaucaaccacaaguucugcaaccucuccgacgcccacaagaagaaccuguacgaccacgcccugaugagcaucaucuccacguuccaccucagcauccccaacuucaaccaguacgaggccauguccugcgacuucaacgggggcaagaucagcguccaguacaaccugucccacagcuacgccggggacgcggccaaccacugcggcaccguggccaacggggugcugcagaccuucaugcgcauggccuggggcggcuccuacaucgcgcucgacagcgggcggggcaacugggacugcaucaugaccuccuaccaguaccugaucauccagaacacgaccugggacgaccacugccaguucagccgccccucccccaucggguaccugggccuccugagccagcggacccgcgacgucuacaucucccggcgccugcucggcaccuucacguggacccugagcgacagcgaggggaaggacaccccgggcggguacugccugacccgguggaugcucaucgaggccgagcugaagugcuucggcaacacggccguggccaagugcaacgagaagcacgacgaggaguucugcgacaugcugcgccucuucgacuucaacaagcaggccauccagcggcugaaggcggaggcccagauguccauccagcugaucaacaaggccgugaacgcccucaucaacgaccagcugaucaugaagaaccaccuccgcgacaucauggggauccccuacugcaacuacagcaaguacugcuaccugaacaacaccgccaccggcaagaccucccugcccaagugcugccugaucagcaacggcuccuaccucaacgagacgcacuucagcgacgacaucgagcaggaggcggacaacaugaucaccgagaugcugcagaaggaguacauggagcggcaggggaagacgccccugggccuggucgaccucuucguguucuccaccagcuucuaccugaucuccaucuuccugcaccucgugaagaucccgacccaccgccacaucgucggcaagagcugccccaagccccaccggcugaaccacauggggaucugcuccugcgggcuguacaagcagcccggcgugccggugcgcuggaagcggugaggacuagucccuguucccagagcccacuuuuuuuucuuuuuuugaaauaaaauagccugucuuucagaucucaaaggcucuuuucagagccaccaaaaaaaaaaaaaaaaaaaaaaaaaaaaaaaaaaaaaaaaaaaaaaaaaaaaaaaaaaaaaaaaagaauu

SEQ ID NO: 38813 - RNA, 1736 nt, Artificial Sequence
  mRNA product Design a-2 (hSL-A64-N5) comprising derived and/or modified sequence from LASV(G3010-SLE-2013;Clade IV)__AIT17344__GPCmut11 (opt1)
aggagaguccgcucagccagguugcagaagcggcuuagcguguguccuaaucuucucucugcguguagguaggccugugccgcaaacaagcuuaccaugggccagaucgugaccuucuuccaggaggucccccacgugaucgaggaggugaugaacaucguccugaucgcccucagcauccuggccgugcugaaggggcucuacaacuucgcgaccugcggccugguggggcuggucacguuccuccugcugugcggccgcuccugcaccaccagccucuacaaggggguguacgagcugcagacccuggagcucaacauggagacgcugaacaugaccaugccgcuguccugcaccaagaacaacagccaccacuacaucauggugggcaacgagaccggccucgagcugacgcugaccaacaccuccaucaucaaccacaaguucugcaaccucagcgacgcccacaagaagaaccuguacaaccacgcccugauguccaucaucagcaccuuccaccucuccauccccaacuucaaccaguacgaggccaugagcugcgacuucaacgggggcaagaucuccguccaguacaaccugagccacuccuacgccggggacgcggccagccacugcggcacgguggccaacggggugcugcagaccuucaugcggauggccuggggcggcuccuacaucgcgcucgacagcggguacggcaagugggacugcaucaugaccuccuaccaguaccugaucauccagaacaccacgugggaggaccacugccaguucagccgccccucccccaucggguaccugggccuccugagccagcggacccgcgacaucuacaucagccggcgccugcucggcaccuucaccuggacgcuguccgacagcgaggggaaggacaccccgggcggguacugccugacccgguggaugcucaucgaggccgagcugaagugcuucggcaacaccgccgucgccaagugcaacgagaagcacgacgaggaguucugcgacaugcugcgccucuucgacuucaacaagcaggccauccagcggcugaagacggaggcgcagauguccauccagcugaucaacaaggccgugaacgcccucaucaacgaccagcugaucaugaagaaccaccuccgcgacaucauggggauccccuacugcaacuacagcaaguacugcuaccugaaccacaccaccaccggcaagacgucccugcccaagugcugccuggugagcaacggcuccuaccucaacgagacccacuucagcgacgacaucgagcagcaggccgacaacaugaucaccgagaugcugcagaaggaguacauggagcggcaggggaagacgccccugggccuggucgaccucuucguguucuccaccagcuucuaccugaucuccaucuuccugcaccucgugaagaucccgacccaccgccacaucgucggcaagagcugccccaagccccaccggcugaaccacauggggaucugcuccugcgggcuguacaagcagcccggcgugccggugcgcuggaagcggugaggacuagucccuguucccagagcccacuuuuuuuucuuuuuuugaaauaaaauagccugucuuucagaucucaaaggcucuuuucagagccaccaaaaaaaaaaaaaaaaaaaaaaaaaaaaaaaaaaaaaaaaaaaaaaaaaaaaaaaaaaaaaaaaagaauu

SEQ ID NO: 38814 - RNA, 1736 nt, Artificial Sequence
  mRNA product Design a-2 (hSL-A64-N5) comprising derived and/or modified sequence from LASV(G502-SLE-2009;Clade IV)__AIT17126__GPCmut11 (opt1)
aggagaguccgcucagccagguugcagaagcggcuuagcguguguccuaaucuucucucugcguguagguaggccugugccgcaaacaagcuuaccaugggccagaucgugaccuucuuccaggaggucccccacgugaucgaggaggugaugaacaucguccugaucgcccucagcauccuggccgugcugaaggggcucuacaacuucgcgaccugcggccugguggggcugcucacguuccugcugcucugcggccgcuccugcaccaccgggcuguacaagggcgucuacgagcugcagacccucgagcugaacauggagacgcugaacaugaccaugccgcucagcugcaccaagaacaacucccaccacuacaucauggugggcaacgagaccgggcuggagcugacgcucaccaacaccagcaucaucaaccacaaguucugcaaccuguccgacgcccacaagaagaaccuguacgaccacgcccucaugagcaucaucuccaccuuccaccugagcauccccaacuucaaccaguacgaggccauguccugcgacuucaacggcgggaagaucagcgugcaguacaaccugucccacagcuacgccggcgacgcggccgaccacugcgggacggucgccaacggcgugcuccagaccuucaugcggauggccuggggcggguccuacaucgcgcuggacagcggccgcgggcggugggacugcaucaugaccuccuaccaguaccugaucauccagaacaccacgugggaggaccacugccaguucagccgccccucccccaucggcuaccucggccugcugagccagcggacccgcgacaucuacaucucccggcgccuccuggggaccuucaccuggacgcugagcgacagcgagggcaaggacacccccgggggcuacugccucacccgguggaugcugaucgaggccgagcugaagugcuucgggaacaccgccguggccaagugcaacgagaagcacgacgaggaguucugcgacaugcuccgccuguucgacuucaacaagcaggccauccagcggcugaaggcggaggcccagauguccauccagcucaucaacaaggccgucaacgcccugaucaacgaccagcuggugaugaagaaccaccuccgcgacaucaugggcauccccuacugcaacuacagccgguacugcuaccugaaccacacgaccaccggccgcaccucccugcccaagugcugccucgugagcaacggguccuaccugaacgagacgcacuucagcgacgacaucgagcagcaggccgacaacaugaucaccgagaugcugcagaaggaguacauggagcggcagggcaagaccccgcuggggcucgucgaccuguucguguucuccaccagcuucuaccugaucuccaucuuccuccaccuggugaagaucccgacgcaccgccacaucgucggcaagagcugccccaagccccaccggcugaaccacauggggaucugcuccugcggccucuacaagcagcccggcgugccggugaaguggaagcgcugaggacuagucccuguucccagagcccacuuuuuuuucuuuuuuugaaauaaaauagccugucuuucagaucucaaaggcucuuuucagagccaccaaaaaaaaaaaaaaaaaaaaaaaaaaaaaaaaaaaaaaaaaaaaaaaaaaaaaaaaaaaaaaaaagaauu

SEQ ID NO: 38815 - RNA, 1736 nt, Artificial Sequence
  mRNA product Design a-2 (hSL-A64-N5) comprising derived and/or modified sequence from LASV(G733-SLE-2010;Clade IV)__AIT17154__GPCmut11 (opt1)
aggagaguccgcucagccagguugcagaagcggcuuagcguguguccuaaucuucucucugcguguagguaggccugugccgcaaacaagcuuaccaugggccagaucgugaccuucuuccaggaggucccccacgugaucgaggaggugaugaacaucguccugaucgcccucagcauccuggccgugcugaaggggcucuacaacuucgcgaccugcggcaucguggggcuggucuccuuccugcuccugugcggccgcagcugcacgaccucccuguacaaggggguguacgagcuccagacccuggagcugaacauggagacccucaacaugacgaugccgcugagcugcaccaagaacaacucccaccacuacaucauggugggcaacgagaccggccuggagcucacccugacgaacaccagcaucaucaaccacaaguucugcaaccuguccgacgcccacaagaagaaccucuacgaccacgcccugaugagcaucaucuccaccuuccaccugagcauccccaacuucaaccaguacgaggccauguccugcgacuucaacgggggcaagaucagcguccaguacaaccucucccacagcuacgccggggacgcggccaaccacugcggcaccaucgccaacggggugcugcagacguucaugcggauggccuggggcggcuccuacaucgcgcuggacagcgggcgcgaccggugggacugcaucaugaccuccuaccaguaccucaucauccagaacaccaccugggaggaccacugccaguucagccgccccucccccaucggcuaccuggggcugcucagccagcggacgcgcgacaucuacaucagccggcgccugcugggcaccuucaccuggacccucuccgacagcgagggcaaggacacgcccgggggcuacugccugacccgguggaugcugaucgaggccgagcucaagugcuucgggaacaccgccguggccaagugcaacgagaagcacgacgaggaguucugcgacaugcugcgccuguucgacuucaacaagcaggccauccagcggcucaaggcggaggcccagauguccauccagcugaucaacaaggccgucaacgcccugaucaacgaccagcucaucaugaagaaccaccuccgcgacaucaugggcauccccuacugcaacuacagcaaguacugcuaccugaaccacaccacgaccgggaagaccucccugcccaagugcugccuggugagcaacggcuccuaccugaacgagacccacuucagcgacgacaucgagcagcaggccgacaacaugaucacggagaugcuccagaaggaguacauggagcggcagggcaagaccccgcuggggcugguggaccuguucgucuucuccaccagcuucuaccucaucuccaucuuccugcaccuggugaagaucccgacccaccgccacguggucggcaagagcugccccaagccccaccggcucaaccacauggggaucugcuccugcggccuguacgggcagcccggcgugccggugaaguggaagcgcugaggacuagucccuguucccagagcccacuuuuuuuucuuuuuuugaaauaaaauagccugucuuucagaucucaaaggcucuuuucagagccaccaaaaaaaaaaaaaaaaaaaaaaaaaaaaaaaaaaaaaaaaaaaaaaaaaaaaaaaaaaaaaaaaagaauu

SEQ ID NO: 38816 - RNA, 1736 nt, Artificial Sequence
  mRNA product Design a-2 (hSL-A64-N5) comprising derived and/or modified sequence from MOPV/LASV reassortant(IGS-1;Clade IV)__AFY05576__GPCmut11 (opt1)
aggagaguccgcucagccagguugcagaagcggcuuagcguguguccuaaucuucucucugcguguagguaggccugugccgcaaacaagcuuaccaugggccagaucgugaccuucuuccaggaggucccccacgugaucgaggaggugaugaacaucguccugaucgcccucagcgugcuggccgugcugaaggggcucuacaacuucgcgaccugcggccuggucgggcuggugacguuccuccugcugugcggccgcuccugcaccaccagccucuacaaggggguguacgagcugcagacccuggagcucaacauggagacgcugaacaugaccaugccgcuguccugcaccaagaacaacagccaccacuacaucauggucggcaacgagaccggccucgagcugacgcugaccaacaccuccaucaucaaccacaaguucugcaaccucagcgacgcccacaagaagaaccuguacgaccacgcccugauguccaucaucagcaccuuccaccucuccauccccaacuucaaccaguacgaggccaugagcugcgacuucaacgggggcaagaucuccgugcaguacaaccugagccacuccuacgccggggacgcggccaaccacugcggcacgguggccaacgggguccugcagaccuucaugcggauggccuggggcggcagcuacaucgcgcucgacuccgggcgcggcaacugggacugcaucaugaccagcuaccaguaccugaucauccagaacaccacgugggaggaccacugccaguucucccggcccagccccaucggguaccugggccuccugucccagcgcacccgggacaucuacaucagccgccggcugcucggcaccuucaccuggacgcugagcgacuccgagggggaggacaccccgggcggguacugccugacccgcuggaugcucaucgaggccgagcugaagugcuucggcaacaccgccguggccaagugcaacgagaagcacgacgaggaguucugcgacaugcugcggcuguucgacuucaacaagcaggccauccagcgccugaaggcggaggcccagaugagcauccagcugaucaacaaggccgugaacgcccucaucaacgaccagcugaucaugaagaaccaccuccgggacaucauggggauccccuacugcaacuacuccaaguacugcuaccucaaccacacgaccaccggccgcaccagccugcccaagugcugccuggucuccaacggcagcuaccucaacgagacgcacuucuccgacgacaucgagcagcaggccgacaacaugaucaccgagaugcugcagaaggaguacauggagcggcaggggaagacgccccugggccugguggaccucuucguguucagcaccuccuucuaccugaucagcaucuuccugcaccucgucaagaucccgacccaccgccacaucguggggaaguccugccccaagccccaccggcugaaccacaugggcaucugcagcugcgggcuguacaagcagcccggcgugccggucaaguggaagcgcugaggacuagucccuguucccagagcccacuuuuuuuucuuuuuuugaaauaaaauagccugucuuucagaucucaaaggcucuuuucagagccaccaaaaaaaaaaaaaaaaaaaaaaaaaaaaaaaaaaaaaaaaaaaaaaaaaaaaaaaaaaaaaaaaagaauu

SEQ ID NO: 38817 - RNA, 1736 nt, Artificial Sequence
  mRNA product Design a-2 (hSL-A64-N5) comprising derived and/or modified sequence from LASV(LM765-SLE-2012;Clade IV)__AIT17814__GPCmut11 (opt1)
aggagaguccgcucagccagguugcagaagcggcuuagcguguguccuaaucuucucucugcguguagguaggccugugccgcaaacaagcuuaccaugggccagaucgugaccuucuuccaggaggucccccacgugaucgaggaggugaugaacaucguccugaucgcccucagcauccuggccgugcugaaggggcucuacaacuucgcgaccugcggccugguggggcuggucacguuccuccugcugugcggccgcuccugcaccaccagccucuacaaggggguguacgagcugcagacccuggagcucaacauggagacgcugaacaugaccaugccgcuguccugcaccaagaacaacagccaccacuacaucauggugggcaacgagaccggccucgagcugacgcugaccaacaccuccaucaucgaccacaaguucugcaaccucagcgacgcccaccggaagaaccuguacgaccacgcccugauguccaucaucagcaccuuccaccucuccauccccaacuucaaccaguacgaggccaugagcugcgacuucaacgggggcaagaucuccguccaguacaaccugagccacuccuacgccaaggacgcggccgaccacugcgggacgguggccaacggcgugcugcagaccuucaugcgcauggccuggggcgggagcuacaucgcgcucgacuccggccgggggcgcugggacugcaucaugaccagcuaccaguaccugaucauccagaacaccacgugggaggaccacugccaguucucccggcccagccccaucggcuaccuggggcuccugucccagcgcacccgggacaucuacaucagccgccggcugcucggcaccuucaccuggacgcugagcgacuccgagggcaaggacacccccgggggcuacugccugacccgcuggaugcucaucgaggccgagcugaagugcuucgggaacaccgccgucgccaagugcaacgagaagcacgacgaggaguucugcgacaugcugcggcuguucgacuucaacaagcaggccauccagcgccugaaggcggaggcccagaugagcauccagcugaucaacaaggccgugaacgcccucaucaacgaccagcugaucaugaagaaccaccuccgggacaucaugggcauccccuacugcaacuacuccaaguacugcuaccucaaccacacgaccaccgggaagaccagccugcccaagugcugccugguguccaacggcagcuaccucaacgagacgcacuucuccgacgacaucgagcagcaggccgacaacaugaucaccgagaugcugcagaaggaguacauggagcgccagggcaagaccccgcuggggcuggucgaccucuucguguucagcaccuccuucuaccugaucagcaucuuccugcaccucgugaagaucccgacgcaccggcacaucgucggcaagcccugccccaagccccaccgccugaaccacauggggaucugcuccugcggccuguacaagcagccgggggugcccgugaaguggaagcggugaggacuagucccuguucccagagcccacuuuuuuuucuuuuuuugaaauaaaauagccugucuuucagaucucaaaggcucuuuucagagccaccaaaaaaaaaaaaaaaaaaaaaaaaaaaaaaaaaaaaaaaaaaaaaaaaaaaaaaaaaaaaaaaaagaauu

SEQ ID NO: 38818 - RNA, 1736 nt, Artificial Sequence
  mRNA product Design a-2 (hSL-A64-N5) comprising derived and/or modified sequence from LASV(LM776-SLE-2012;Clade IV)__AIT17824__GPCmut11 (opt1)
aggagaguccgcucagccagguugcagaagcggcuuagcguguguccuaaucuucucucugcguguagguaggccugugccgcaaacaagcuuaccaugggccagaucgugaccuucuuccaggaggucccccacgugaucgaggaggugaugaacaucguccugaucgcccucagcauccuggccgugcugaaggggcucuacaacuucgcgaccugcggccugguggggcuggucacguuccuccugcugugcggccgcuccugcaccaccagcguguacaaggggguguacgagcuccagacccuggagcugaacauggagacgcucaacaugaccaugccgcuguccugcaccaagaacaacagccaccacuacaucauggucggcaacgagaccggccuggagcucacgcugaccaacaccuccaucaucaaccacaaguucugcaaccugagcgacgcccacaagaagaaccucuacgaccacgcccugauguccaucaucagcaccuuccaccuguccauccccaacuucaaccaguacgaggccaugagcugcgacuucaacgggggcaagaucuccgugcaguacaaccucagccacuccuacgccggggacgcggccaaccacugcggcacgguggccaacgggguccugcagaccuucaugcggauggccuggggcggcagcuacaucgcgcuggacuccgggcacggcaagugggacugcaucaugaccagcuaccaguaccucaucauccagaacaccacgugggaggaccacugccaguucucccgccccagccccaucggguaccugggccugcucucccagcggacccgcgacaucuacaucagccggcgccugcugggcaccuucaccuggacgcucagcgacuccgaggggaaggacaccccgggcggguacugccugacccgguggaugcugaucgaggccgagcucaagugcuucggcaacaccgccguggccaagugcaacgagaagcacgacgaggaguucugcgacaugcugcgccuguucgacuucaacaagcaggccauccagcggcucaaggcggaggcccagaugagcauccagcugaucaacaaggccgugaacgcccugaucaacgaccagcucaucaugaagaaccaccuccgcgacaucauggggauccccuacugcaacuacuccaaguacugcuaccugaaccacacgaccaccggcaagaccagccugcccaagugcugccuggucuccaacggcagcuaccugaacgagacgcacuucuccgacgacaucgagcagcaggccgacaacaugaucaccgagaugcuccagaaggaguacauggagcggcaggggaagacgccccugggccugguggaccuguucguguucagcaccuccuucuaccucaucagcaucuuccugcaccuggucaagaucccgacccaccgccacaucguggggaaguccugccccaagccccaccggcucaaccacaugggcaucugcagcugcgggcuguacaagcagcccggcgugccgguccgcuggaagcggugaggacuagucccuguucccagagcccacuuuuuuuucuuuuuuugaaauaaaauagccugucuuucagaucucaaaggcucuuuucagagccaccaaaaaaaaaaaaaaaaaaaaaaaaaaaaaaaaaaaaaaaaaaaaaaaaaaaaaaaaaaaaaaaaagaauu

SEQ ID NO: 38819 - RNA, 1736 nt, Artificial Sequence
  mRNA product Design a-2 (hSL-A64-N5) comprising derived and/or modified sequence from LASV(Mad39;Clade IV)__ANH09722__GPCmut11 (opt1)
aggagaguccgcucagccagguugcagaagcggcuuagcguguguccuaaucuucucucugcguguagguaggccugugccgcaaacaagcuuaccaugggccagaucgugaccuucuuccaggaggucccccacgugaucgaggaggugaugaacaucguccugaucgcccucagcauccuggccgugcugaaggggcucuacaacguggcgaccugcggccugaucgggcuggucacguuccuccugcugugcggccgcuccugcaccaccacccucuacaaggggguguacgagcugcaggcccuggagcucaacauggagacgcugaacaugaccaugccgcugagcugcaccaagaacaacucccaccacuacauccgggugggcaacgagaccggccucgagcugacgcugaccaacaccagccucaucaaccacaaguucugcaaccuguccgacgcccacaagaagaaccuguacgaccacgcccucaugagcaucaucuccaccuuccaccugagcauccccaacuucaaccaguacgaggccauguccugcgacuucaacgacgggaagaucagcguccaguacaaccugucccacacguacgcgggcgacaccgccaaccacugcgggaccguggccaacggcgugcuccagaccuucaugcgcauggccuggggcgggagcuacaucgcgcuggacuccggccgcgggggcugggacugcaucaugacgagcuaccaguaccugaucauccagaacaccaccugggaggaccacugccaguucucccggcccagccccaucggguaccucggccugcugucccagcggacccgcgacaucuacaucagccggcgccuccugggcacguucaccuggacccuguccgacagcgaggggaaggacaccccgggcggguacugccucacgcgguggaugcugaucgaggccgagcugaagugcuucggcaacaccgccgucgccaagugcaacgagaagcacgacgaggaguucugcgacaugcuccgccuguucgacuucaacaagcaggccauccagcggcugaaggcggaggcccagaugagcauccagcucaucaacaaggccgugaacgcccugaucaacgaccagcugaucaugaagaaccaccuccgcgacaucauggggauccccuacugcaacuacuccaaguacugcuaccugaaccacaccgugaccggcaagacgagccugcccaagugcugccucgucuccaacggcagcuaccugaacgagacccacuucuccgacgacaucgagcagcaggccgacaacaugaucaccgagaugcugcagaaggaguacauggagcggcaggggaagacgccccugggccucguggaccuguucguguucagcaccuccuucuaccugaucagcaucuuccuccaccuggucaagaucccgacccaccgccacgugguggggaagcccugccccaagccccaccggcugaaccacaugggcaucugcuccugcggguucuacaagcagccgggcguccccgugcgcuggaagcggugaggacuagucccuguucccagagcccacuuuuuuuucuuuuuuugaaauaaaauagccugucuuucagaucucaaaggcucuuuucagagccaccaaaaaaaaaaaaaaaaaaaaaaaaaaaaaaaaaaaaaaaaaaaaaaaaaaaaaaaaaaaaaaaaagaauu

SEQ ID NO: 38820 - RNA, 1736 nt, Artificial Sequence
  mRNA product Design a-2 (hSL-A64-N5) comprising derived and/or modified sequence from LASV(Z0947-SLE-2011;Clade IV)__AIT17840__GPCmut11 (opt1)
aggagaguccgcucagccagguugcagaagcggcuuagcguguguccuaaucuucucucugcguguagguaggccugugccgcaaacaagcuuaccaugggccagaucgugaccuucuuccaggaggucccccacgugaucgaggaggugaugaacaucguccugaucgcccucagcauccuggccgugcugaaggggcucuacaacuucgcgaccugcggccugguggggcuggucacguuccuccugcugugcggccgcuccugcaccaucagccucuacaaggggguguacgagcugcagacccuggagcucaacauggagacccugaacaugacgaugccgcuguccugcaccaagaacaacagccaccacuacaucauggugggcaacgagaccggccucgagcugacccugacgaacaccuccaucaucaaccacaaguucugcaaccucagcgacgcccacaagaagaaccuguacgaccacgcccugauguccaucaucagcaccuuccaccucuccauccccaacuucaaccaguacgaggccaugagcugcgacuucaacgggggcaagaucuccguccaguacaaccugagccacuccuacgccggggacgcggccaaccacugcggcaccguggccaacggggugcugcagacguucaugcggauggccuggggcggcagcuacaucgcgcucgacuccgggcgcgaccggugggacugcaucaugaccagcuaccaguaccugaucauccagaacaccaccugggaggaccacugccaguucucccgccccagccccaucggcuaccuggggcuccugucccagcggacgcgcgacaucuacaucagccggcgccugcucggcaccuucaccuggacccugagcgacuccgagggcaaggacacgcccgggggcuacugccugacccgguggaugcucaucgaggccgagcugaagugcuucgggaacaccgccgucgccaagugcaacgagaagcacgacgaggaguucugcgacaugcugcgccucuucgacuucaacaagcaggccauccagcggcugaaggcggaggcccagaugagcauccagcugaucaacaaggccgugaacgcccucaucaacgaccagcugaucaugaagaaccaccuccgcgacaucaugggcauccccuacugcaacuacuccaaguacugcuaccugaaccacaccacgaccgggaagaccagccugcccaagugcugccugguguccaacggcagcuaccucaacgagacccacuucuccgacgacaucgagcagcaggccgacaacaugaucacggagaugcugcagaaggaguacauggagcggcagggcaagaccccgcuggggcuggucgaccucuucguguucagcaccuccuucuaccugaucagcaucuuccugcaccucgugaagaucccgacccaccgccacaucgucggcaagcccugccccaagccccaccggcugaaccacauggggaucugcuccugcggccuguacaagcagccgggggugcccgugaaguggaagcgcugaggacuagucccuguucccagagcccacuuuuuuuucuuuuuuugaaauaaaauagccugucuuucagaucucaaaggcucuuuucagagccaccaaaaaaaaaaaaaaaaaaaaaaaaaaaaaaaaaaaaaaaaaaaaaaaaaaaaaaaaaaaaaaaaagaauu

SEQ ID NO: 38821 - RNA, 1736 nt, Artificial Sequence
  mRNA product Design a-2 (hSL-A64-N5) comprising derived and/or modified sequence from LASV(Josiah;Clade IV)__NP_694870__GPCmut11 (opt4)
aggagaguccgcucagccagguugcagaagcggcuuagcguguguccuaaucuucucucugcguguagguaggccugugccgcaaacaagcuuaccaugggccagaucgugaccuucuuccaggaggugccccacgugaucgaggaggugaugaacaucgugcugaucgcccugagcgugcuggccgugcugaagggccuguacaacuucgccaccugcggccuggugggccuggugaccuuccugcugcugugcggcagaagcugcaccaccagccuguacaagggcguguacgagcugcagacccuggagcugaacauggagacccugaacaugaccaugccccugagcugcaccaagaacaacagccaccacuacaucauggugggcaacgagaccggccuggagcugacccugaccaacaccagcaucaucaaccacaaguucugcaaccugagcgacgcccacaagaagaaccuguacgaccacgcccugaugagcaucaucagcaccuuccaccugagcauccccaacuucaaccaguacgaggccaugagcugcgacuucaacggcggcaagaucagcgugcaguacaaccugagccacagcuacgccggcgacgccgccaaccacugcggcaccguggccaacggcgugcugcagaccuucaugagaauggccuggggcggcagcuacaucgcccuggacagcggcagaggcaacugggacugcaucaugaccagcuaccaguaccugaucauccagaacaccaccugggaggaccacugccaguucagcagacccagccccaucggcuaccugggccugcugagccagagaaccagagacaucuacaucagcagaagacugcugggcaccuucaccuggacccugagcgacagcgagggcaaggacacccccggcggcuacugccugaccagauggaugcugaucgaggccgagcugaagugcuucggcaacaccgccguggccaagugcaacgagaagcacgacgaggaguucugcgacaugcugagacuguucgacuucaacaagcaggccauccagagacugaaggccgaggcccagaugagcauccagcugaucaacaaggccgugaacgcccugaucaacgaccagcugaucaugaagaaccaccugagagacaucaugggcauccccuacugcaacuacagcaaguacugcuaccugaaccacaccaccaccggcagaaccagccugcccaagugcugccuggugagcaacggcagcuaccugaacgagacccacuucagcgacgacaucgagcagcaggccgacaacaugaucaccgagaugcugcagaaggaguacauggagagacagggcaagaccccccugggccugguggaccuguucguguucagcaccagcuucuaccugaucagcaucuuccugcaccuggugaagauccccacccacagacacaucgugggcaagagcugccccaagccccacagacugaaccacaugggcaucugcagcugcggccuguacaagcagcccggcgugcccgugaaguggaagagaugaggacuagucccuguucccagagcccacuuuuuuuucuuuuuuugaaauaaaauagccugucuuucagaucucaaaggcucuuuucagagccaccaaaaaaaaaaaaaaaaaaaaaaaaaaaaaaaaaaaaaaaaaaaaaaaaaaaaaaaaaaaaaaaaagaauu

SEQ ID NO: 38822 - RNA, 1733 nt, Artificial Sequence
  mRNA product Design a-2 (hSL-A64-N5) comprising derived and/or modified sequence from LASV(LP;Clade I)__AAF86701__GPCmut11 (opt4)
aggagaguccgcucagccagguugcagaagcggcuuagcguguguccuaaucuucucucugcguguagguaggccugugccgcaaacaagcuuaccaugggccagaucaucaccuucuuccaggaggugccccacgugaucgaggaggugaugaacaucgugcugaucgcccugagccugcuggccauccugaagggccuguacaacaucgccaccugcggcaucaucggccugguggccuuccuguuccugugcggcaagagcugcagccugacccugaagggcggcuacgagcugcagacccuggagcugaacauggagacccugaacaugaccaugccccugagcugcaccaagaacagcagccaccacuacaucagagugggcaacgagaccggccuggagcugacccugaccaacaccagcaucaucaaccacaaguucugcaaccugagcgacgcccacaagaagaaccuguacgaccacgcccugaugagcaucaucagcaccuuccaccugagcauccccaacuucaaccaguacgaggccaugagcugcgacuucaacggcggcaagaucagcgugcaguacaaccugagccacagcuacgccggcgacgccgccgagcacugcggcaccguggccaacggcgugcugcagaccuucaugagaauggccuggggcggcagauacaucgcccuggacagcggcaagggcaacugggacugcaucaugaccagcuaccaguaccugaucauccagaacaccaccugggaggaccacugccaguucagcagacccagccccaucggcuaccugggccugcugagccagagaaccagagacaucuacaucagcagaagacugcugggcaccuucaccuggacccugagcgacagcgagggcaacgagacccccggcggcuacugccugaccagauggaugcugaucgaggccgagcugaagugcuucggcaacaccgccguggccaagugcaacgagaagcacgacgaggaguucugcgacaugcugagacuguucgacuucaacaagcaggccaucagaagacugaaggccgaggcccagaugagcauccagcugaucaacaaggccgugaacgcccugaucaacgaccagcugaucaugaagaaccaccugagagacaucaugggcauccccuacugcaacuacagcaaguacugcuaccugaaccacaccagcagcggcagaaccagccugcccaagugcugccugaucagcaacggcagcuaccugaacgagacccaguucagcgacgacaucgagcagcaggccgacaacaugaucaccgagaugcugcagaaggaguacaucgagagacagggcaagaccccccugggccugguggacaucuucaucuucagcaccagcuucuaccugaucagcaucuuccugcaccugaucaagauccccacccacagacacaucgugggcaagcccugccccaagccccacagacugaaccacaugggcgugugcagcugcggccuguacaagcaccccggcgugcccaccaaguggaagagaugaggacuagucccuguucccagagcccacuuuuuuuucuuuuuuugaaauaaaauagccugucuuucagaucucaaaggcucuuuucagagccaccaaaaaaaaaaaaaaaaaaaaaaaaaaaaaaaaaaaaaaaaaaaaaaaaaaaaaaaaaaaaaaaaagaauu

SEQ ID NO: 38823 - RNA, 1733 nt, Artificial Sequence
  mRNA product Design a-2 (hSL-A64-N5) comprising derived and/or modified sequence from LASV(803213;Clade II)__AAF86703__GPCmut11 (opt4)
aggagaguccgcucagccagguugcagaagcggcuuagcguguguccuaaucuucucucugcguguagguaggccugugccgcaaacaagcuuaccaugggccagaucaucaccuucuuccaggaggugccccacgugaucgaggaggugaugaacaucgugcugaucgcccugagccugcuggccauccugaagggcaucuacaacguggccaccugcggccuguucggccugaucagcuuccugcugcugugcggcagaagcugcagcgugaccuacaagggcguguacgagcugcagacccuggagcugaacauggccaaccugaacaugaccaugccccugagcugcaccaagaacaacagccaccacuacaucauggugggcaacgagaccggccuggagcugacccugaccaacaccagcaucaucaaccacaaguucugcaaccugagcgacgcccacaagaagaaccuguacgaccacgcccugaugagcaucaucagcaccuuccaccugagcauccccaacuucaaccaguacgaggccaugagcugcgacuucaacggcggcaagaucagcgugcaguacaaccugagccacagcuucgccguggacgccgccaaccacugcggcaccaucgccaacggcgugcugcagaccuucaugagaauggccuggggcggcagcuacaucgcccuggacagcggcaagggcaacugggacugcaucaugaccagcuaccaguaccugaucauccagaacaccaccugggaggaccacugccaguucagcagacccagccccaucggcuaccugggccugcugagccagagaaccagagacaucuacaucagcagaagacugcugggcaccuucaccuggacccugagcgacagcgagggcaacgaggcccccggcggcuacugccugaccagauggaugcugaucgaggccgagcugaagugcuucggcaacaccgccguggccaagugcaacgagaagcacgacgaggaguucugcgacaugcugagacuguucgacuucaacaagcaggccaucaagagacugaagaccgaggcccagaugagcauccagcugaucaacaaggccgugaacgcccugaucaacgaccagcugaucaugaagaaccaccugagagacaucaugggcauccccuacugcaacuacagcagauacugcuaccugaaccacaccgugaccggcaagaccagccugcccagaugcugccuggugagcaacggcagcuaccugaacgagacccacuucagcgacgacaucgagcagcaggccgacaacaugaucaccgagaugcugcagaaggaguacauggacagacagggcaagaccccccugggccugguggaccuguucguguucagcaccagcuucuaccugaucagcaucuuccugcaccuggugaagauccccacccacagacacaucgugggcaagcccugccccaagccccacagacugaaccacaugggcaucugcagcugcggccuguacaagcaccccggcgugcccgugaaguggaagagaugaggacuagucccuguucccagagcccacuuuuuuuucuuuuuuugaaauaaaauagccugucuuucagaucucaaaggcucuuuucagagccaccaaaaaaaaaaaaaaaaaaaaaaaaaaaaaaaaaaaaaaaaaaaaaaaaaaaaaaaaaaaaaaaaagaauu

SEQ ID NO: 38824 - RNA, 1733 nt, Artificial Sequence
  mRNA product Design a-2 (hSL-A64-N5) comprising derived and/or modified sequence from LASV(GA391;Clade III)__CAA36645__GPCmut11 (opt4)
aggagaguccgcucagccagguugcagaagcggcuuagcguguguccuaaucuucucucugcguguagguaggccugugccgcaaacaagcuuaccaugggccagaucgugaccuucuuccaggaggugccccacgugaucgaggaggugaugaacaucgugcugaucgcccugagcauccuggccauccugaagggccuguacaacguggccaccugcggccugaucggccuggugaccuuccugcugcugagcggcagaagcugcagccugaucuacaagggcaccuacgagcugcagacccuggagcugaacauggagacccugaacaugaccaugccccugagcugcaccaagaacaacagccaccacuacaucagagugggcaacgagaccggccuggagcugacccugaccaacaccagcauccugaaccacaaguucugcaaccugagcgacgcccacaagagaaaccuguacgaccacagccugaugagcaucaucagcaccuuccaccugagcauccccaacuucaaccaguacgaggccaugagcugcgacuucaacggcggcaagaucaccgugcaguacaaccugagccacagcuucgccguggacgccgccggccacugcggcacccuggccaacggcgugcugcagaccuucaugagaauggccuggggcggcagcuacaucgcccuggacagcggcagaggcaacugggacugcaucaugaccagcuaccaguaccugaucauccagaacaccaccugggacgaccacugccaguucagcagacccagccccaucggcuaccugggccugcugagccagagaaccagagacaucuacaucagcagaagacugcugggcaccuucaccuggacccugagcgacagcgagggcaacgagacccccggcggcuacugccugaccagauggaugcugaucgaggccgagcugaagugcuucggcaacaccgccguggccaagugcaacgagaagcacgacgaggaguucugcgacaugcugagacuguucgacuucaacaagcaggccaucagaagacugaagaccgaggcccagaugagcauccagcugaucaacaaggccgugaacgcccugaucaacgaccagcugaucaugaagaaccaccugagagacaucaugggcauccccuacugcaacuacagcagauacugcuaccugaaccacaccagcaccggcaagaccagccugcccagaugcugccugaucagcaacggcagcuaccugaacgagaccaaguucagcgacgacaucgagcagcaggccgacaacaugaucaccgagaugcugcagaaggaguacaucgacagacagggcaagaccccccugggccugguggaccuguucguguucagcaccagcuucuaccugaucagcaucuuccugcaccuggugaagauccccacccacagacacaucgugggcaagcccugccccaagccccacagacugaaccacaugggcaucugcagcugcggccuguacaagcagcccggcgugcccgugagauggaagagaugaggacuagucccuguucccagagcccacuuuuuuuucuuuuuuugaaauaaaauagccugucuuucagaucucaaaggcucuuuucagagccaccaaaaaaaaaaaaaaaaaaaaaaaaaaaaaaaaaaaaaaaaaaaaaaaaaaaaaaaaaaaaaaaaagaauu

SEQ ID NO: 38825 - RNA, 1736 nt, Artificial Sequence
  mRNA product Design a-2 (hSL-A64-N5) comprising derived and/or modified sequence from LASV(AV;Clade V)__CCA30314__GPCmut11 (opt4)
aggagaguccgcucagccagguugcagaagcggcuuagcguguguccuaaucuucucucugcguguagguaggccugugccgcaaacaagcuuaccaugggccagaucgugaccuucuuccaggaggugccccacgugaucgaggaggugaugaacaucgugcugaucgcccugagcauccuggccgugcugaagggccuguacaacaucgccaccugcggccugaucggccugaucaccuuccugcugcugugcggcagaagcugcagcagcaaccuguacaagggcguguacgagcugcagagccuggaccugaacauggagacccugaacaugaccaugccccugagcugcaccaagaacaacagccaccacuacaucagagugggcaacgacaccggccuggagcugacccugaccaacaccagcauccugaaccacaaguucugcaaccugagcgacgcccacaagaaggaccuguacgaccacgcccugaugagcaucaucagcaccuuccaccugagcauccccaacuucaaccaguacgaggccaugagcugcgacuucaacggcggcaagaucagcgugcaguacaaccugagccacagcuacgccaucgacgccgccaaccacugcggcaccguggccaacggcauccugcagaccuucaugagaauggccuggggcggcagcuacaucgcccuggacagcggcagaggcaacugggacugcaucaugaccagcuaccaguaccugaucauccagaacaccaccugggagaaccacugccaguucagcagacccagccccaucggcuaccugggccugcugagccagagaaccagagacaucuacaucagcagaagacugcugggcaccuucaccuggacccugagcgacagcgagggcaacgccacccccggcggcuacugccugaccagauggaugcugaucgaggccgagcugaagugcuucggcaacaccgccguggccaagugcaacgagaagcacgacgaggaguucugcgacaugcugagacuguucgacuucaacaagcaggccaucagcagacugaagagcgaggcccagaugagcauccagcugaucaacaaggccgugaacgcccugaucaacgaccagcugaucaugaagaaccaccugagagacaucaugggcauccccuacugcaacuacagcaaguacugcuaccugaaccacaccaucaccggcaagaccagccugcccaagugcugccuggugagcaacggcagcuaccugaacgagacccacuucagcgacgacaucgagcagcaggccgacaacaugaucaccgagaugcugcagaaggaguacauggagagacagggcaagaccccccugggccugguggaccuguucguguucagcaccagcuucuaccugaucagcaucuuccugagacuggugaagauccccacccacagacacaucgugggcaagcccugccccaagccccacagacugaaccacaugggcaucugcagcugcggccuguacaagcagcccggcgugcccgugagauggaagagaugaggacuagucccuguucccagagcccacuuuuuuuucuuuuuuugaaauaaaauagccugucuuucagaucucaaaggcucuuuucagagccaccaaaaaaaaaaaaaaaaaaaaaaaaaaaaaaaaaaaaaaaaaaaaaaaaaaaaaaaaaaaaaaaaagaauu

SEQ ID NO: 38826 - RNA, 1733 nt, Artificial Sequence
  mRNA product Design a-2 (hSL-A64-N5) comprising derived and/or modified sequence from LASV(Togo/2016/7082;Clade VI)__AMR44577__GPCmut11 (opt4)
aggagaguccgcucagccagguugcagaagcggcuuagcguguguccuaaucuucucucugcguguagguaggccugugccgcaaacaagcuuaccaugggccagaucaucaccuucuuccaggaggugccccacgugaucgaggaggugaugaacaucgugcugaucgcccugagccugcuggccauccugaagggcguguacaacguggccaccugcggcaucaucggccuggugaccuuccuguuccugugcggcagaagcugcagccugaucuacaagggcagcuacgagcugcagacccuggagcugaacauggagacccugaacaugaccaugccccugagcugcaccaagaacagcagccaccacuacaucagagugggcaacgagaccggccuggagcugacccugaccaacaccagcaucaucaaccacaaguucugcaaccugagcgacgcccacaagagaaaccuguacgaccacgcccugaugagcauccugagcaccuuccaccugagcauccccaacuucaaccaguacgaggccaugagcugcgacuucaacggcggcaagaucagcgugcaguacaaccugagccacgccuacgccguggacgccgccgagcacugcggcaccguggccaacggcgugcugcagaccuucaugagaauggccuggggcggcagcuacaucgcccuggacagcggcagaggcaacugggacugcaucaugaccagcuaccaguaccugaucauccagaacaccaccugggaggaccacugccaguucagcagacccagccccaucggcuaccugggccugcugagccagagaaccagagacaucuacaucagcagaagacugcugggcaccuucaccuggacccugagcgacagcgagggcaacgagacccccggcggcuacugccugaccagauggaugcugaucgaggccgagcugaagugcuucggcaacaccgccguggccaagugcaacgagaagcacgacgaggaguucugcgacaugcugagacuguucgacuucaacaagcaggccauccagagacugaagagcgaggcccagaugagcauccagcugaucaacaaggccgugaacgcccugaucaacgaccagcugaucaugaagaaccaccugagagacaugaugggcauccccuacugcaacuacagcaaguacugcuaccugaaccacaccagcagcggcagaaccagccugcccaagugcugccuggugagcaacggcagcuaccugaacgagacccacuucagcgacgacaucgagcagcaggccgacaacaugaucaccgagaugcugcagaaggaguacaucgacagacagggcaagaccccccugggccugguggaccuguucguguucagcaccagcuucuaccugaucagcaucuuccugcaccugaucaagauccccacccacagacacaucgugggcaagcccugccccaagccccacagacugaaccacaugggcaucugcagcugcggccuguacaagcagcccggcgugcccaccagauggaagagaugaggacuagucccuguucccagagcccacuuuuuuuucuuuuuuugaaauaaaauagccugucuuucagaucucaaaggcucuuuucagagccaccaaaaaaaaaaaaaaaaaaaaaaaaaaaaaaaaaaaaaaaaaaaaaaaaaaaaaaaaaaaaaaaaagaauu

SEQ ID NO: 38827 - RNA, 1733 nt, Artificial Sequence
  mRNA product Design a-2 (hSL-A64-N5) comprising derived and/or modified sequence from LASV(KAK-428;Clade n.d. (VII))__ANH09740__GPCmut11 (opt4)
aggagaguccgcucagccagguugcagaagcggcuuagcguguguccuaaucuucucucugcguguagguaggccugugccgcaaacaagcuuaccaugggccagaucgugaccuucuuccaggaggugccccacgugaucgaggaggugaugaacaucgugcugaucgcccugagccugcuggccauccugaagggccuguacaacuucgccaccugcggcgugaucggccugaucaccuuccugcugcugugcggcagaagcugcagcgccaccuacaagggccaguacgagcugcagacccuggagcugaacauggagagccugaacaugaccaugccccugagcugcaccaagaacaacagccaccacuacaucagagccggcaacaacaccggccuggagcugacccugaccaacaccagcaucaucagccacaaguucugcaaccugagcgacgcccacaagaagaaccuguacgaccacacccugaugagcaucaucaccaccuuccaccugagcauccccaacuucaaccaguacgaggccaugagcugcgacuucaacggcggcaagaucagcauccaguacaaccugagccacagcuacgccggcgacgccgcccagcacugcggcaccguggccaacggcgugcugcagaccuucaugagaauggccuggggcggcagcuaccuggcccuggacagcggcagaagaggcugggacugcaucaucagcagcuaccaguaccugaucauccagaacaccaccugggacgaccacugccaguucagcagacccagccccaucggcuaccugggcuucgugagccagaagaccagagacaucuacaucagcagaagacugcugggcaccuucaccuggacccugagcgacagcgagggccacgacaugcccggcggcuacugccugaccagauggaugcugaucgaggccgaccugaagugcuucggcaacaccgccguggccaagugcaacgagaagcacgacgaggaguucugcgacauguggagacuguucgacuucaacaagcaggccauccagagacugaaggccgaggcccagaugaacauccagcugaucaacaaggccgugaacgcccugaucaacgaccagcugaugaugaagaaccaccugagagacaucaugggcauccccuacugcaacuacagcaaguucugcuaccugaacaacaccaccaccggcagaaccagccugcccagaugcugccugaucagcaacggcagcuaccugaacgagacccacuucagcgacgacaucgagcagcaggccgacaacaugaucaccgagaugcugcagaaggaguacauggacagacagggcaagaccccccugggccugguggaccuguucguguucagcaccagcuucuaccugaucaccaucuuccugcaccuggugaagauccccacccacagacacaucgugggcaagcccugccccaagccccacagacugaaccacaugggcaucugcagcugcggccuguacaagcagcccggcgugcccgugagauggaagagaugaggacuagucccuguucccagagcccacuuuuuuuucuuuuuuugaaauaaaauagccugucuuucagaucucaaaggcucuuuucagagccaccaaaaaaaaaaaaaaaaaaaaaaaaaaaaaaaaaaaaaaaaaaaaaaaaaaaaaaaaaaaaaaaaagaauu

SEQ ID NO: 38828 - RNA, 1733 nt, Artificial Sequence; identical to SEQ ID NO: 38822
  mRNA product Design a-2 (hSL-A64-N5) comprising derived and/or modified sequence from LASV(Pinneo-NIG-1969;Clade I)__AIT17836__GPCmut11 (opt4)

SEQ ID NO: 38829 - RNA, 1733 nt, Artificial Sequence
  mRNA product Design a-2 (hSL-A64-N5) comprising derived and/or modified sequence from LASV(ISTH0009-NIG-2011;Clade II)__AIT17404__GPCmut11 (opt4)
aggagaguccgcucagccagguugcagaagcggcuuagcguguguccuaaucuucucucugcguguagguaggccugugccgcaaacaagcuuaccaugggccagaucaucaccuucuuccaggaggugccccacgugaucgaggaggugaugaacaucgugcugaucgcccugagccugcuggccauccugaagggcaucuacaacguggccaccugcggccuguucggccuggugagcuuccugcugcugugcggcagaagcugcagcaccaccuacaagggcguguacgagcugcagacccuggagcuggacauggccagccugaacaugaccaugccccugagcugcaccaagaacaacagccaccacuacaucauggugggcaacgagaccggccuggagcugacccugaccaacaccagcaucaucaaccacaaguucugcaaccugagcgacgcccacaagaagaaccuguacgaccacgcccugaugagcaucaucagcaccuuccaccugagcauccccaacuucaaccaguacgaggccaugagcugcgacuucaacggcggcaagaucagcgugcaguacaaccugagccacgccuacgccguggacgccgccaaccacugcggcaccaucgccaacggcgugcugcagaccuucaugagaauggccuggggcggcagcuacaucgcccuggacagcggcaagggcagcugggacugcaucaugaccagcuaccaguaccugaucauccagaacaccaccugggaggaccacugccaguucagcagacccagccccaucggcuaccugggccugcugagccagagaaccagagacaucuacaucagcagaagacugcugggcaccuucaccuggacccugagcgacagcgagggcaacgagacccccggcggcuacugccugaccagauggaugcugaucgaggccgagcugaagugcuucggcaacaccgccguggccaagugcaacgagaagcacgacgaggaguucugcgacaugcugagacuguucgacuucaacaagcaggccaucagaagacugaagaccgaggcccagaugagcauccagcugaucaacaaggccgugaacgcccugaucaacgaccagcugaucaugaagaaccaccugagagacaucaugggcauccccuacugcaacuacagcaaguacugcuaccugaaccacaccgugaccggcaagaccagccugcccagaugcugccuggugagcaacggcagcuaccugaacgagacccacuucagcgacgacaucgagcagcaggccgacaacaugaucaccgagcugcugcagaaggaguacauggacagacagggcaagaccccccugggccugguggaccuguucguguucagcaccagcuucuaccugaucagcaucuuccugcaccugaucaagauccccacccacagacacaucaccggcaagcccugccccaagccccacagacugaaccacaugggcaucugcagcugcggccuguacaagcaccccggcgugcccgugaaguggaagagaugaggacuagucccuguucccagagcccacuuuuuuuucuuuuuuugaaauaaaauagccugucuuucagaucucaaaggcucuuuucagagccaccaaaaaaaaaaaaaaaaaaaaaaaaaaaaaaaaaaaaaaaaaaaaaaaaaaaaaaaaaaaaaaaaagaauu

SEQ ID NO: 38830 - RNA, 1733 nt, Artificial Sequence
  mRNA product Design a-2 (hSL-A64-N5) comprising derived and/or modified sequence from LASV(ISTH2010-NIG-2012;Clade II)__AIT17482__GPCmut11 (opt4)
aggagaguccgcucagccagguugcagaagcggcuuagcguguguccuaaucuucucucugcguguagguaggccugugccgcaaacaagcuuaccaugggccagaucaucaccuucuuccaggaggugccccacgugaucgaggaggugaugaacaucgugcugaucgcccugagccugcuggccauccugaagggcaucuacaacguggccaccugcggccuguucggccuggugagcuuccugcugcugugcggcagaagcugcagcaccaccuacaagggcguguacgagcugcagacccuggagcuggacauggccagccugaacaugaccaugccccugagcugcaccaagaacaacagccaccacuacaucauggugggcaacgagaccggccuggagcugacccugaccaacaccagcaucaucaaccacaaguucugcaaccugagcgacgcccacaagaagaaccuguacgaccacgcccugaugagcaucaucagcaccuuccaccugagcauccccaacuucaaccaguacgaggccaugagcugcgacuucaacggcggcaagaucagcgugcaguacaaccugagccacgccuacgccguggacgccgccaaccacugcggcaccaucgccaacggcgugcugcagaccuucaugagaauggccuggggcggcagcuacaucgcccuggacagcggcaagggcagcugggacugcaucaugaccagcuaccaguaccugaucauccagaacaucaccugggaggaccacugccaguucagcagacccagccccaucggcuaccugggccugcugagccagagaaccagagacaucuacaucagcagaagacugcugggcaccuucaccuggacccugagcgacagcgagggcaacgagacccccggcggcuacugccugaccagauggaugcugaucgaggccgagcugaagugcuucggcaacaccgccguggccaagugcaacgagaagcacgacgaggaguucugcgacaugcugagacuguucgacuucaacaagcaggccaucagaagacugaagaccgaggcccagaugagcauccagcugaucaacaaggccgugaacgcccugaucaacgaccagcugaucaugaagaaccaccugagagacaucaugggcauccccuacugcaacuacagcaaguacugcuaccugaaccacaccgugaccggcaagaccagccugcccagaugcugccuggugagcaacggcagcuaccugaacgagacccacuucagcgacgacaucgagcagcaggccgacaacaugaucaccgagcugcugcagaaggaguacaucgacagacagggcaagaccccccugggccugguggaccuguucguguucagcaccagcuucuaccugaucagcaucuuccugcaccuggugaagauccccacccacagacacguggugggcaagcccugccccaagccccacagacugaaccacaugggcaucugcagcugcggccuguacaagcaccccggcgugcccgugaaguggaagagaugaggacuagucccuguucccagagcccacuuuuuuuucuuuuuuugaaauaaaauagccugucuuucagaucucaaaggcucuuuucagagccaccaaaaaaaaaaaaaaaaaaaaaaaaaaaaaaaaaaaaaaaaaaaaaaaaaaaaaaaaaaaaaaaaagaauu

SEQ ID NO: 38831 - RNA, 1733 nt, Artificial Sequence
  mRNA product Design a-2 (hSL-A64-N5) comprising derived and/or modified sequence from LASV(Lassa virus/H.sapiens-wt/NGA/2015/ISTH_0543;Clade II)__AVO03639__GPCmut11 (opt4)
aggagaguccgcucagccagguugcagaagcggcuuagcguguguccuaaucuucucucugcguguagguaggccugugccgcaaacaagcuuaccaugggccagaucaucaccuucuuccaggaggugccccacgugaucgaggaggugaugaacaucgugcugaucgcccugagccugcuggccauccugaagggcaucuacaacguggccaccugcggccuguucggccuggugagcuuccugcugcugugcggcagaagcugcagcaccaccuacaagggcguguacgagcugcagacccuggagcuggacauggccaaccugaacaugaccaugccccugagcugcaccaagaacaacagccaccacuacaucauggugggcaacgagaccggccuggagcugacccugaccaacaccagcaucaucaaccacaaguucugcaaccugagcgacgcccacaagaagaaccuguacgaccacgcccugaugagcaucaucagcaccuuccaccugagcauccccaacuucaaccaguacgaggccaugagcugcgacuucaacggcggcaagaucagcgugcaguacaaccugagccacaccuacgccguggacgccgccaaccacugcggcaccaucgccaacggcgugcugcagaccuucaugagaauggccuggggcggcagcuacaucgcccuggacagcggcaagggcagcugggacugcaucaugaccagcuaccaguaccuggugauccagaacaccaccugggaggaccacugccaguucagcagacccagccccaucggcuaccugggccugcugagccagagaaccagagacaucuacaucagcagaagacugcugggcaccuucaccuggacccugagcgacagcgagggcaacgagacccccggcggcuacugccugaccagauggaugcugaucgaggccgagcugaagugcuucggcaacaccgccguggccaagugcaacgagaagcacgacgaggaguucugcgacaugcugagacuguucgacuucaacaagcaggccaucagaagacugaagaccgaggcccagaugagcauccagcugaucaacaaggccgugaacgcccugaucaacgaccagcugaucaugaagaaccaccugagagacaucaugggcauccccuacugcaacuacagcaaguacugcuaccugaaccacaccgugaccggcaagaccagccugcccagaugcugccuggugagcaacggcagcuaccugaacgagacccacuucagcgacgacaucgagcagcaggccgacaacaugaucaccgagcugcugcagaaggaguacaucgacagacagggcaagaccccccugggccugguggaccuguucguguucagcaccagcuucuaccugaucagcaucuuccugcaccuggugaagauccccacccacagacacaucaccggcaagcccugccccaagccccacagacugaaccacaugggcaucugcagcugcggccuguacaagcaccccggcgugcccgugaaguggaagagaugaggacuagucccuguucccagagcccacuuuuuuuucuuuuuuugaaauaaaauagccugucuuucagaucucaaaggcucuuuucagagccaccaaaaaaaaaaaaaaaaaaaaaaaaaaaaaaaaaaaaaaaaaaaaaaaaaaaaaaaaaaaaaaaaagaauu

SEQ ID NO: 38832 - RNA, 1733 nt, Artificial Sequence
  mRNA product Design a-2 (hSL-A64-N5) comprising derived and/or modified sequence from LASV(Lassa virus/H.sapiens-wt/NGA/2016/ISTH_0009;Clade II)__AVO03571__GPCmut11 (opt4)
aggagaguccgcucagccagguugcagaagcggcuuagcguguguccuaaucuucucucugcguguagguaggccugugccgcaaacaagcuuaccaugggccagaucaucaccuucuuccaggaggugccccacgugaucgaggaggugaugaacaucgugcugaucgcccugagccugcuggccauccugaagggcaucuacaacguggccaccugcggccugcugggccuggugagcuuccugcugcugugcggcagaagcugcagcaccaccuacaagggcguguacgagcugcagacccuggagcuggacauggccagccugaacaugaccaugccccugagcugcaccaagaacaacagccaccacuacaucauggugggcaacgagaccggccuggagcugacccugaccaacaccagcaucaucaaccacaaguucugcaaccugagcgacgcccacaagaagaaccuguacgaccacgcccugaugagcaucaucagcaccuuccaccugagcauccccaacuucaaccaguacgaggccaugagcugcgacuucaacggcggcagaaucagcgugcaguacaaccugagccacagcuacgccguggacgccgccaaccacugcggcaccaucgccaacggcgugcugcagaccuucaugagaauggccuggggcggcagcuacaucgcccuggacagcggcaagggcagcugggacugcaucaugaccagcuaccaguaccugaucauccagaacaccaccugggaggaccacugccaguucagcagacccagccccaucggcuaccugggccugcugagccagagaaccagagacaucuacaucagcagaagacugcugggcaccuucaccuggacccugagcgacagcgagggcaacgagacccccggcggcuacugccugaccagauggaugcugaucgaggccgagcugaagugcuucggcaacaccgccguggccaagugcaacgagaagcacgacgaggaguucugcgacaugcugagacuguucgacuucaacaagcaggccaucagaagacugaagaccgaggcccagaugagcauccagcugaucaacaaggccgugaacgcccugaucaacgaccagcugaucaugaagaaccaccugagagacaucaugggcauccccuacugcaacuacagcaaguacugcuaccugaaccacaccgugaccggcaagaccagccugcccagaugcugccuggugagcaacggcagcuaccugaacgagacccacuucagcgacgacaucgagcagcaggccgacaacaugaucaccgagcugcugcagaaggaguacaucgacagacagggcaagaccccccugggccugguggaccuguucguguucagcaccagcuucuaccugaucagcaucuuccugcaccuggugaagauccccacccacagacacaucaccggcaagcccugccccaagccccacagacugaaccacaugggcaucugcagcugcggccuguacaaccaccccggcgugcccgugaaguggaagagaugaggacuagucccuguucccagagcccacuuuuuuuucuuuuuuugaaauaaaauagccugucuuucagaucucaaaggcucuuuucagagccaccaaaaaaaaaaaaaaaaaaaaaaaaaaaaaaaaaaaaaaaaaaaaaaaaaaaaaaaaaaaaaaaaagaauu

SEQ ID NO: 38833 - RNA, 1733 nt, Artificial Sequence
  mRNA product Design a-2 (hSL-A64-N5) comprising derived and/or modified sequence from LASV(Lassa virus/H.sapiens-wt/NGA/2016/ISTH_0017;Clade II)__AVO03567__GPCmut11 (opt4)
aggagaguccgcucagccagguugcagaagcggcuuagcguguguccuaaucuucucucugcguguagguaggccugugccgcaaacaagcuuaccaugggccagaucaucaccuucuuccaggaggugccccacgugaucgaggaggugaugaacaucgugcugaucgcccugagccugcuggccauccugaagggcaucuacaacguggccaccugcggccuguucggccuggugagcuuccugcugcugugcggcagaagcugcagcaccaccuacaagggcguguacgagcugcagacccuggagcuggacauggccagccugaacaugaccaugccccugagcugcaccaagaacaacagccaccacuacaucauggugggcaacgagaccggccuggagcugacccugaccaacaccagcaucaucaaccacaaguucugcaaccugagcgacgcccacaagaagaaccuguacgaccacgcccugaugagcaucaucagcaccuuccaccugagcauccccaacuucaaccaguacgaggccaugagcugcgacuucaacggcggcaagaucagcgugcaguacaaccugagccacaccuacgccaucgacgccgccaaccacugcggcaccaucgccaacggcgugcugcagaccuucaugagaauggccuggggcggcagcuacaucgcccuggacagcggcaagggcagcugggacugcaucaugaccagcuaccaguaccugaucauccagaacaccaccugggaggaccacugccaguucagcagacccagccccaucggcuaccugggccugcugagccagagaaccagagacaucuacaucagcagaagacugcugggcaccuucaccuggacccugagcgacagcgagggcaacgagacccccggcggcuacugccugaccagauggaugcugaucgaggccgagcugaagugcuucggcaacaccgccguggccaagugcaacgagaagcacgacgaggaguucugcgacaugcugagacuguucgacuucaacaagcaggccaucagaagacugaagaccgaggcccagaugagcauccagcugaucaacaaggccgugaacgcccugaucaacgaccagcugaucaugaagaaccaccugagagacaucaugggcauccccuacugcaacuacagcaaguacugcuaccugaaccacaccgugaccggcaagaccagccugcccagaugcugccuggugagcaacggcagcuaccugaacgagacccacuucagcgacgacaucgagcagcaggccgacaacaugaucaccgagcugcugcagaaggaguacauggacagacagggcaagaccccccugggccugguggaccuguucguguucagcaccagcuucuaccugaucagcaucuuccugcaccuggugagaauccccacccacagacacgugaucggcaagcccugccccaagccccacagacugaaccacaugggcaucugcagcugcggccuguacaagcaccccggcgugcccgugaaguggaagagaugaggacuagucccuguucccagagcccacuuuuuuuucuuuuuuugaaauaaaauagccugucuuucagaucucaaaggcucuuuucagagccaccaaaaaaaaaaaaaaaaaaaaaaaaaaaaaaaaaaaaaaaaaaaaaaaaaaaaaaaaaaaaaaaaagaauu

SEQ ID NO: 38834 - RNA, 1733 nt, Artificial Sequence
  mRNA product Design a-2 (hSL-A64-N5) comprising derived and/or modified sequence from LASV(Lassa virus/H.sapiens-wt/NGA/2018/ISTH_0959;Clade II)__AVV65099__GPCmut11 (opt4)
aggagaguccgcucagccagguugcagaagcggcuuagcguguguccuaaucuucucucugcguguagguaggccugugccgcaaacaagcuuaccaugggccagaucaucaccuucuuccaggaggugccccacgugaucgaggaggugaugaacaucgugcugaucgcccugagccugcuggccauccugaagggcaucuacaacguggugaccugcggccuguucggccuggugagcuuccugcugcugugcggcagaagcugcagcaccaccuacaagggcguguacgagcugcagacccuggagcuggacauggccagccugaacaugaccaugccccugagcugcaccaagaacaacagccaccacuacaucauggugggcaacgagaccggccuggagcugacccugaccaacaccagcaucaucaaccacaaguucugcaaccugagcgacgcccacaagaagaaccuguacgaccacgcccugaugagcaucaucagcaccuuccaccugagcauccccaacuucaaccaguacgaggccaugagcugcgacuucaacggcggcaagaucagcgugcaguacaaccugagccacgccuacgccaucgacgccgccaaccacugcggcaccaucgccaacggcgugcugcagaccuucaugagaauggccuggggcggcagcuacaucgcccuggacagcggcaagggcagcugggacugcaucaugaccagcuaccaguaccugaucauccagaacaccaccugggaggaccacugccaguucagcagacccagccccaucggcuaccugggccugcugagccagagaaccagagacaucuacaucagcagaagacugcugggcaccuucaccuggacccugagcgacagcgagggcaacgagacccccggcggcuacugccugaccagauggaugcugaucgaggccgagcugaagugcuucggcaacaccgccguggccaagugcaacgagaagcacgacgaggaguucugcgacaugcugagacuguucgacuucaacaagcaggccaucagaagacugaagaccgaggcccagaugagcauccagcugaucaacaaggccgugaacgcccugaucaacgaccagcugaucaugaagaaccaccugagagacaucaugggcauccccuacugcaacuacagcaaguacugcuaccugaaccacaccgugaccggcaagaccagccugcccagaugcugccuggugagcaacggcagcuaccugaacgagacccacuucagcgacgacaucgagcagcaggccgacaacaugaucaccgagcugcugcagaaggaguacaucgacagacagggcaagaccccccugggccugguggaccuguucguguucagcaccagcuucuaccugaucagcaucuuccugcaccuggugaagauccccacccacagacacgugaucggcaagcccugccccaagccccacagacugaaccacaugggcaucugcagcugcggccuguacaagcaccccggcgugcccgugaaguggaagagaugaggacuagucccuguucccagagcccacuuuuuuuucuuuuuuugaaauaaaauagccugucuuucagaucucaaaggcucuuuucagagccaccaaaaaaaaaaaaaaaaaaaaaaaaaaaaaaaaaaaaaaaaaaaaaaaaaaaaaaaaaaaaaaaaagaauu

SEQ ID NO: 38835 - RNA, 1733 nt, Artificial Sequence
  mRNA product Design a-2 (hSL-A64-N5) comprising derived and/or modified sequence from LASV(LASV003-NIG-2008;Clade II)__AIT17580__GPCmut11 (opt4)
aggagaguccgcucagccagguugcagaagcggcuuagcguguguccuaaucuucucucugcguguagguaggccugugccgcaaacaagcuuaccaugggccagaucaucaccuucuuccaggaggugccccacgugaucgaggaggugaugaacaucgugcugaucgcccugagccugcuggccauccugaagggcaucuacaacguggccaccugcggccuguucggccuggugagcuuccugcugcugugcggcagaagcugcagcaccaccuacaagggcguguacgagcugcagacccuggagcuggacauggccagccugaacaugaccaugccccugagcugcaccaagaacaacagccaccacuacaucauggugggcaacgagaccggccuggagcugacccugaccaacaccagcaucaucaaccacaaguucugcaaccugagcgacgcccacaagaagaaccuguacgaccacgcccugaugagcaucaucagcaccuuccaccugagcauccccaacuucaaccaguacgaggccaugagcugcgacuucaacggcggcaagaucagcgugcaguacaaccugagccacaccuacgccguggacgccgccaaccacugcggcaccaucgccaacggcgugcugcagaccuucaugagaauggccuggggcggcagcuacaucgcccuggacagcggcaagggcagcugggacugcaucaugaccagcuaccaguaccugaucauccagaacaccaccugggaggaccacugccaguucagcagacccagccccaucggcuaccugggccugcugagccagagaaccagagacaucuacaucagcagaagacugcugggcaccuucaccuggacccugagcgacagcgagagcaacgagacccccggcggcuacugccugaccagauggaugcugaucgaggccgagcugaagugcuucggcaacaccgccguggccaagugcaacgagaagcacgacgaggaguucugcgacaugcugagacuguucgacuucaacaagcaggccaucagaagacugaaggccgaggcccagaugagcauccagcugaucaacaaggccgugaacgcccugaucaacgaccagcugaucaugaagaaccaccugagagacaucaugggcauccccuacugcaacuacagcaaguacugcuaccugaaccacaccgugaccggcagaaccagccugcccagaugcugccuggugagcaacggcagcuaccugaacgagacccacuucagcgacgacaucgagcagcaggccgacaacaugaucaccgagcugcugcagaaggaguacauggacagacagggcaagaccccccugggccugguggaccuguucguguucagcaccagcuucuaccugaucagcaucuuccugcaccuggugaagauccccacccacagacacgugaucggcaagcccugccccaagccccacagacugaaccacaugggcaucugcagcugcggccuguacaagcaccccggcgugcccgugaaguggaagagaugaggacuagucccuguucccagagcccacuuuuuuuucuuuuuuugaaauaaaauagccugucuuucagaucucaaaggcucuuuucagagccaccaaaaaaaaaaaaaaaaaaaaaaaaaaaaaaaaaaaaaaaaaaaaaaaaaaaaaaaaaaaaaaaaagaauu

SEQ ID NO: 38836 - RNA, 1733 nt, Artificial Sequence
  mRNA product Design a-2 (hSL-A64-N5) comprising derived and/or modified sequence from LASV(LASV035-NIG-2009;Clade II)__AIT17588__GPCmut11 (opt4)
aggagaguccgcucagccagguugcagaagcggcuuagcguguguccuaaucuucucucugcguguagguaggccugugccgcaaacaagcuuaccaugggccagaucaucaccuucuuccaggaggugccccacgugaucgaggaggugaugaacaucgugcugaucgcccugagccugcuggccauccugaagggcaucuacaacguggccaccugcggccuguucggccuggugagcuuccugcugcugugcggcagaagcugcagcaccaccuacaagggcguguacgagcugcagacccuggagcuggacauggccagccugaacaugaccaugccccugagcugcaccaagaacaacagccaccacuacaucauggugggcaacgagaccggccuggagcugacccugaccaacaccagcaucaucaaccacaaguucugcaaccugagcgacgcccacaagaagaaccuguacgaccacgcccugaugagcaucaucagcaccuuccaccugagcauccccaacuucaaccaguacgaggccaugagcugcgacuucaacggcggcaagaucagcgugcaguacaaccugagccacgccuacgccguggacgccgccaaccacugcggcaccaucgccaacggcgugcugcagaccuucaugagaauggccuggggcggcagcuacaucgcccuggacagcggcaagggcagcugggacugcaucaugaccagcuaccaguaccugaucauccagaacaccaccugggaggaccacugccaguucagcagacccagccccaucggcuaccugggccugcugagccagagaaccagagacaucuacaucagcagaagacugcugggcaccuucaccuggacccugagcgacagcgagggcaacgagacccccggcggcuacugccugaccagauggaugcugaucgaggccgagcugaagugcuucggcaacaccgccguggccaagugcaacgagaagcacgacgaggaguucugcgacaugcugagacuguucgacuucaacaagcaggccaucagaagacugaaggccgaggcccagaugagcauccagcugaucaacaaggccgugaacgcccugaucaacgaccagcugaucaugaagaaccaccugagagacaucaugggcauccccuacugcaacuacagcaaguacugcuaccugaaccacaccgugaccggcaagaccagccugcccagaugcugccuggugagcaacggcagcuaccugaacgagacccacuucagcgacgacaucgagcagcaggccgacaacaugaucaccgagcugcugcagaaggaguacaucgacagacagggcaagaccccccugggccugguggaccuguucguguucagcaccagcuucuaccugaucagcaucuuccugcaccuggugaagauccccacccacagacacgugaucggcaagcccugccccaagccccacagacugaaccacaugggcaucugcagcugcggccuguacaagcaccccggcgugcccgugaaguggaagagaugaggacuagucccuguucccagagcccacuuuuuuuucuuuuuuugaaauaaaauagccugucuuucagaucucaaaggcucuuuucagagccaccaaaaaaaaaaaaaaaaaaaaaaaaaaaaaaaaaaaaaaaaaaaaaaaaaaaaaaaaaaaaaaaaagaauu

SEQ ID NO: 38837 - RNA, 1733 nt, Artificial Sequence
  mRNA product Design a-2 (hSL-A64-N5) comprising derived and/or modified sequence from LASV(LASV1000-NIG-2009;Clade II)__AIT17782__GPCmut11 (opt4)
aggagaguccgcucagccagguugcagaagcggcuuagcguguguccuaaucuucucucugcguguagguaggccugugccgcaaacaagcuuaccaugggccagaucaucaccuucuuccaggaggugccccacgugaucgaggaggugaugaacaucgugcugaucgcccugagccugcuggccauccugaagggcaucuacaacguggccaccugcggccuguucggccuggugagcuuccugcugcugugcggcagaagcugcagcaccaccuacaagggcguguacgagcugcagacccuggagcuggacauggccagccugaacaugaccaugccccugagcugcaccaagaacaacagccaccacuacaucauggugggcaacgagaccggccuggagcugacccugaccaacaccagcaucaucaaccacaaguucugcaaccugagcgacgcccacaagaagaaccuguacgaccacgcccugaugagcaucaucagcaccuuccaccugagcauccccaacuucaaccaguacgaggccaugagcugcgacuucaacggcggcaagaucagcgugcaguacaaccugagccacaccuacgccguggacgccgccaaccacugcggcaccaucgccaacggcgugcugcagaccuucaugagaauggccuggggcggcagcuacaucgcccuggacagcggcaagggcagcugggacugcaucaugaccagcuaccaguaccugaucauccagaacaccaccugggaggaccacugccaguucagcagacccagccccaucggcuaccugggccugcugagccagagaaccagagacaucuacaucagcagaagacugcugggcaccuucaccuggacccugagcgacagcgagggcaacgagacccccggcggcuacugccugaccagauggaugcugaucgaggccgagcugaagugcuucggcaacaccgccguggccaagugcaacgagaagcacgacgaggaguucugcgacaugcugagacuguucgacuucaacaagcaggccaucaagagacugaagaccgaggcccagaugagcauccagcugaucaacaaggccgugaacgcccugaucaacgaccagcugaucaugaagaaccaccugagagacaucaugggcauccccuacugcaacuacagcaaguacugcuaccugaaccacaccgugaccggcaagaccagccugcccagaugcugccuggugagcaacggcagcuaccugaacgagacccacuucagcgacgacaucgagcagcaggccgacaacaugaucaccgagcugcugcagaaggaguacaucgacagacagggcaagaccccccugggccugguggaccuguucguguucagcaccagcuucuaccugaucagcaucuuccugcaccuggugaagauccccacccacagacacguggugggcaagcccugccccaagccccacagacugaaccacaugggcaucugcagcugcggccuguacaagcaccccggcgugcccgugaaguggaagagaugaggacuagucccuguucccagagcccacuuuuuuuucuuuuuuugaaauaaaauagccugucuuucagaucucaaaggcucuuuucagagccaccaaaaaaaaaaaaaaaaaaaaaaaaaaaaaaaaaaaaaaaaaaaaaaaaaaaaaaaaaaaaaaaaagaauu

SEQ ID NO: 38838 - RNA, 1733 nt, Artificial Sequence
  mRNA product Design a-2 (hSL-A64-N5) comprising derived and/or modified sequence from LASV(LASV221-NIG-2010;Clade II)__AIT17624__GPCmut11 (opt4)
aggagaguccgcucagccagguugcagaagcggcuuagcguguguccuaaucuucucucugcguguagguaggccugugccgcaaacaagcuuaccaugggccagaucaucaccuucuuccaggaggugccccacgugaucgaggaggugaugaacaucgugcugaucgcccugagccugcuggccauccugaagggcaucuacaacguggccaccugcggccuguucggccuggugagcuuccugcugcugugcggcagaagcugcagcaccaccuacaagggcguguacgagcugcagacccuggagcuggacauggccagccugaacaugaccaugccccugagcugcaccaagaacaacagccaccacuacaucauggugggcaacgagaccggccuggagcugacccugaccaacaccagcaucaucaaccacaaguucugcaaccugagcgacgcccacaagaagaaccuguacgaccacgcccugaugagcaucaucagcaccuuccaccugagcauccccaacuucaaccaguacgaggccaugagcugcgacuucaacggcggcaagaucagcgugcaguacaaccugagccacaccuacgccaucgacgccgccaaccacugcggcaccaucgccaacggcgugcugcagaccuucaugagaauggccuggggcggcagcuacaucgcccuggacagcggcaagggcagcugggacugcaucaugaccagcuaccaguaccugaucauccagaacaccaccugggaggaccacugccaguucagcagacccagccccaucggcuaccugggccugcugagccagagaaccagagacaucuacaucagcagaagacugcugggcaccuucaccuggacccugagcgacagcgagggcaacgagacccccggcggcuacugccugaccagauggaugcugaucgaggccgagcugaagugcuucggcaacaccgccguggccaagugcaacgagaagcacgacgaggaguucugcgacaugcugagacuguucgacuucaacaagcaggccaucagaagacugaagaccgaggcccagaugagcauccagcugaucaacaaggccgugaacgcccugaucaacgaccagcugaucaugaagaaccaccugagagacaucaugggcauccccuacugcaacuacagcaaguacugcuaccugaaccacaccgugaccggcaagaccagccugcccagaugcugccuggugagcaacggcagcuaccugaacgagacccacuucagcgacgacaucgagcagcaggccgacaacaugaucaccgagaugcugcagaaggaguacauggacagacagggcaagaccccccugggccugguggaccuguucguguucagcaccagcuucuaccugaucagcaucuuccugcaccuggugaagauccccacccacagacacgugaucggcaagcccugccccaagccccacagacugaaccacaugggcaucugcagcugcggccuguacaagcaccccggcgugcccgugaaguggaagagaugaggacuagucccuguucccagagcccacuuuuuuuucuuuuuuugaaauaaaauagccugucuuucagaucucaaaggcucuuuucagagccaccaaaaaaaaaaaaaaaaaaaaaaaaaaaaaaaaaaaaaaaaaaaaaaaaaaaaaaaaaaaaaaaaagaauu

SEQ ID NO: 38839 - RNA, 1733 nt, Artificial Sequence
  mRNA product Design a-2 (hSL-A64-N5) comprising derived and/or modified sequence from LASV(LASV237-NIG-2010;Clade II)__AIT17638__GPCmut11 (opt4)
aggagaguccgcucagccagguugcagaagcggcuuagcguguguccuaaucuucucucugcguguagguaggccugugccgcaaacaagcuuaccaugggccagaucaucaccuucuuccaggaggugccccacgugaucgaggaggugaugaacaucgugcugaucgcccugagccugcuggccauccugaagggcaucuacaacguggccaccugcggccuguucggccuggugagcuuccugcugcugugcggcagaagcugcagcaccaccuacaagggcguguacgagcugcagacccuggagcuggacauggccagccugaacaugaccaugccccugagcugcaccaagaacaacagccaccacuacaucauggugggcaacgagaccggccuggagcugacccugaccaacaccagcaucaucaaccacaaguucugcaaccugagcgacgcccacaagaaggaccuguacgaccacgcccugaugagcaucaucagcaccuuccaccugagcauccccaacuucaaccaguacgaggccaugagcugcgacuucaacggcggcaagaucagcgugcaguacaaccugagccacaccuacgccguggacgccgccaaccacugcggcaccaucgccaacggcgugcugcagaccuucaugagaauggccuggggcggcagcuacaucgcccuggacagcggcaagggcagcugggacugcaucaugaccagcuaccaguaccugaucauccagaacaccaccugggaggaccacugccaguucagcagacccagccccaucggcuaccugggccugcugagccagagaaccagagacaucuacaucagcagaagacugcugggcaccuucaccuggacccugagcgacagcgagggcaacgagacccccggcggcuacugccugaccagauggaugcugaucgaggccgagcugaagugcuucggcaacaccgccguggccaagugcaacgagaagcacgacgaggaguucugcgacaugcugagacuguucgacuucaacaagcaggccaucagaagacugaagaccgaggcccagaugagcauccagcugaucaacaaggccgugaacgcccugaucaacgaccagcugaucaugaagaaccaccugagagacaucaugggcauccccuacugcaacuacagcaaguacugcuaccugaaccacaccgugaccggcaagaccagccugcccagaugcugccuggugagcaacggcagcuaccugaacgagacccacuucagcgacgacaucgagcagcaggccgacaacaugaucaccgagcugcugcagaaggaguacauggacagacagggcaagaccccccugggccugguggaccuguucguguucagcaccagcuucuaccugaucagcaucuuccugcaccugaucaagauccccacccacagacacaucaccggcaagcccugccccaagccccacagacugaaccacaugggcaucugcagcugcggccuguacaagcaccccggcgugcccgugaaguggaagagaugaggacuagucccuguucccagagcccacuuuuuuuucuuuuuuugaaauaaaauagccugucuuucagaucucaaaggcucuuuucagagccaccaaaaaaaaaaaaaaaaaaaaaaaaaaaaaaaaaaaaaaaaaaaaaaaaaaaaaaaaaaaaaaaaagaauu

SEQ ID NO: 38840 - RNA, 1733 nt, Artificial Sequence
  mRNA product Design a-2 (hSL-A64-N5) comprising derived and/or modified sequence from LASV(LASV253-NIG-2011;Clade II)__AIT17670__GPCmut11 (opt4)
aggagaguccgcucagccagguugcagaagcggcuuagcguguguccuaaucuucucucugcguguagguaggccugugccgcaaacaagcuuaccaugggccagaucaucaccuucuuccaggaggugccccacgugaucgaggaggugaugaacaucgugcugaucgcccugagccugcuggccauccugaagggcaucuacaacguggccaccugcggccuguucggccuggugagcuuccugcugcugugcggcagaagcugcagcaccaccuacaagggcguguacgagcugcagacccuggagcuggacauggccagccugaacaugaccaugccccugagcugcaccaagaacaacagccaccacuacaucauggugggcaacgagaccggccuggagcugacccugaccaacaccagcaucaucaaccacaaguucugcaaccugagcgacgcccacaagaagaaccuguacgaccacgcccugaugagcaucaucagcaccuuccaccugagcauccccaacuucaaccaguacgaggccaugagcugcgacuucaacggcggcaagaucagcgugcaguacaaccugagccacaccuacgccguggacgccgccaaccacugcggcaccaucgccaacggcgugcugcagaccuucaugagaauggccuggggcggcagcuacaucgcccuggacagcggcaagggcagcugggacugcaucaugaccagcuaccaguaccugaucauccagaacaccaccugggaggaccacugccaguucagcagacccagccccaucggcuaccugggccugcugagccagagaaccagagacaucuacaucagcagaagacugcugggcaccuucaccuggacccugagcgacagcgagggcaacgagacccccggcggcuacugccugaccagauggaugcugaucgaggccgagcugaagugcuucggcaacaccgccguggccaagugcaacgagaagcacgacgaggaguucugcgacaugcugagacuguucgacuucaacaagcaggccaucagaagacugaaggccgaggcccagaugagcauccagcugaucaacaaggccgugaacgcccugaucaacgaccagcugaucaugaagaaccaccugagagacaucaugggcauccccuacugcaacuacagcaaguacugcuaccugaaccacaccgugaccggcagaaccagccugcccagaugcugccuggugagcaacggcagcuaccugaacgagacccacuucagcgacgacaucgagcagcaggccgacaacaugaucaccgagcugcugcagaaggaguacaucgacagacagggcaagaccccccugggccugguggaccuguucguguucagcaccagcuucuaccugaucagcaucuuccugcaccuggugaagauccccacccacagacacaucaucggcaagcccugccccaagccccacagacugaaccacaugggcaucugcagcugcggccuguacaagcaccccggcgugcccgugaaguggaagagaugaggacuagucccuguucccagagcccacuuuuuuuucuuuuuuugaaauaaaauagccugucuuucagaucucaaaggcucuuuucagagccaccaaaaaaaaaaaaaaaaaaaaaaaaaaaaaaaaaaaaaaaaaaaaaaaaaaaaaaaaaaaaaaaaagaauu

SEQ ID NO: 38841 - RNA, 1733 nt, Artificial Sequence
  mRNA product Design a-2 (hSL-A64-N5) comprising derived and/or modified sequence from LASV(LASV254-NIG-2011;Clade II)__AIT17674__GPCmut11 (opt4)
aggagaguccgcucagccagguugcagaagcggcuuagcguguguccuaaucuucucucugcguguagguaggccugugccgcaaacaagcuuaccaugggccagaucaucaccuucuuccaggaggugccccacgugaucgaggaggugaugaacaucgugcugaucgcccugagccugcuggccauccugaagggcaucuacaacguggccaccugcggccuguucggccuggugagcuuccugcugcugugcggcagaagcugcagcaccaccuacaagggcguguacgagcugcagacccuggagcuggacaugaccaaccugaacaugaccaugccccugagcugcaccaagaacaacagccaccacuacaucauggugggcaacgagaccggccuggagcugacccugaccaacaccagcaucaucaaccacaaguucugcaaccugagcgacgcccacaagaagaaccuguacaaccacgcccugaugagcaucaucagcaccuuccaccugagcauccccaacuucaaccaguacgaggccaugagcugcgacuucaacggcggcaagaucagcgugcaguacaaccugagccacagcuacgccguggacgccgccaaccacugcggcaccaucgccaacggcgugcugcagaccuucaugagaauggccuggggcggcagcuacaucgcccuggacagcggcaagggcaacugggacugcaucaugaccagcuaccaguaccugaucauccagaacaccaccugggaggaccacugccaguucagcagacccagccccaucggcuaccugggccugcugagccagagaaccagagacaucuacaucagcagaagacugcugggcaccuucaccuggacccugagcgacagcgagggcaacgagacccccggcggcuacugccugaccagauggaugcugaucgaggccgagcugaagugcuucggcaacaccgccguggccaagugcaacgagaagcacgacgaggaguucugcgacaugcugagacuguucgacuucaacaagcaggccaucagaagacugaagaccgaggcccaggccaacauccagcugaucaacaaggccgugaacgcccugaucaacgaccagcugaucaugaagaaccaccugagagacaucaugggcauccccuacugcaacuacagcaaguacugcuaccugaaccacaccgugaccggcaagaccagccugcccagaugcugccuggugagcaacggcagcuaccugaacgagacccacuucagcgacgacaucgagcagcaggccgacaacaugaucaccgagcugcugcagaaggaguacauggacagacagggcaagaccccccugggccugguggaccuguucguguucagcaccagcuucuaccugaucagcaucuuccugcaccuggugaagauccccacccacagacacgugaucggcaagcccugccccaagccccacagacugaaccacaugggcaucugcagcugcggccuguacaagcaccccggcgugcccgugaaguggaagagaugaggacuagucccuguucccagagcccacuuuuuuuucuuuuuuugaaauaaaauagccugucuuucagaucucaaaggcucuuuucagagccaccaaaaaaaaaaaaaaaaaaaaaaaaaaaaaaaaaaaaaaaaaaaaaaaaaaaaaaaaaaaaaaaaagaauu

SEQ ID NO: 38842 - RNA, 1733 nt, Artificial Sequence
  mRNA product Design a-2 (hSL-A64-N5) comprising derived and/or modified sequence from LASV(Nig08-A19;Clade III)__ADU56618__GPCmut11 (opt4)
aggagaguccgcucagccagguugcagaagcggcuuagcguguguccuaaucuucucucugcguguagguaggccugugccgcaaacaagcuuaccaugggccagaucgugaccuucuuccaggaggugccccacgugaucgaggaggugaugaacaucgugcugaucgcccugagcauccuggccauccugaagggccuguacaacaucgccaccugcggccugaucggccuggugaccuuccugcugcugagcggcagaagcugcagcaugaccuacaagggcguguacgagcugcagacccuggagcugaacaugaacacccugaacaugaccaugccccugagcugcaccaagaacaacagccaccacuacaucauggugggcaacgagaccggccuggagcugacccugaccaacaccagccugcugcaccacaaguucugcaaccugagcgacgcccacaagaagaaccuguacgaccacacccugaugagcaucaucagcaccuuccaccugagcauccccaacuucaaccaguacgaggccaugagcugcgacuucaacggcggcaagaucaccgugcaguacaaccugagccacagcuacgccaucgacgccgccaaccacugcggcaccguggccaacggcgugcugcagaccuucaugagaauggccuggggcggcagcuacaucgcccuggacagcggcagaggcaagugggacugcaucaugaccagcuaccaguaccugaucauccagaacaccaccugggaggaccacugccaguucagcagacccagccccaucggcuaccugggccugcugagccagagaaccagagacaucuacaucagcagaagacugcugggcaccuucaccuggacccugagcgacagcgagggcaacgagacccccggcggcuacugccugaccagauggaugcugaucgaggccgagcugaagugcuucggcaacaccgccguggccaagugcaacgagaagcacgacgaggaguucugcgacaugcugagacuguucgacuucaacaagcaggccaucagaagacugaaggccgaggcccagaugagcauccagcugaucaacaaggccgugaacgcccugaucaacgaccagcugaucaugaagaaccaccugagagacaucaugggcauccccuacugcaacuacagcaaguacugcuaccugaaccacaccagcaccggcagaaccagccugcccagaugcugccuggugagcaacggcagcuaccugaacgagacccacuucagcgacgacaucgagcagcaggccgacaacaugaucaccgagaugcugcagaaggaguaccuggacagacagggcaagaccccccugggccugguggaccuguucguguucagcaccagcuucuaccugaucagcaucuuccugcaccuggugaagauccccacccacagacacaucgugggcaagcccugccccaagccccacagacugaaccacaugggcaucugcagcugcggccuguacaagcagcccggcgugcccgugagauggaagagaugaggacuagucccuguucccagagcccacuuuuuuuucuuuuuuugaaauaaaauagccugucuuucagaucucaaaggcucuuuucagagccaccaaaaaaaaaaaaaaaaaaaaaaaaaaaaaaaaaaaaaaaaaaaaaaaaaaaaaaaaaaaaaaaaagaauu

SEQ ID NO: 38843 - RNA, 1736 nt, Artificial Sequence
  mRNA product Design a-2 (hSL-A64-N5) comprising derived and/or modified sequence from LASV(G1180-SLE-2010;Clade IV)__AIT17168__GPCmut11 (opt4)
aggagaguccgcucagccagguugcagaagcggcuuagcguguguccuaaucuucucucugcguguagguaggccugugccgcaaacaagcuuaccaugggccagaucgugaccuucuuccaggaggugccccacgugaucgaggaggugaugaacaucgugcugaucgcccugagcauccuggccgugcugaagggccuguacaacuucgccaccugcggccuggugggccugcugaccuuccugcugcugugcggcagaagcugcaccgccagcagauacaagggcguguacgagcugcagacccuggagcugaacauggagacccugaacaugaccaugccccugagcugcaccaagaacaacagccaccacuacaucauggugggcaacgagaccggccuggagcugacccugaccaacaccagcaucaucaaccacaaguucugcaaccugagcgacgcccacaagaagaaccuguacgaccacgcccugaugagcaucaucagcaccuuccaccugagcauccccaacuucaaccaguacgaggccaugagcugcgacuucaacggcggcaagaucagcgugcaguacaaccugagccacagcuacgccggcgacgccgccaaccacugcggcaccguggccaacggcgugcugcagaccuucaugagaauggccuggggcggcagcuacaucgcccuggacagcggccacggcagcugggacugcaucaugaccagcuaccaguaccugaucauccagaacaccaccugggaggaccacugccaguucagcagacccagccccaucggcuaccugggccugcugagccagagaaccagagacaucuacaucagcagaagacugcugggcaccuucaccuggacccugagcgacagcgagggcaaggacacccccggcggcuacugccugaccagauggaugcugaucgaggccgagcugaagugcuucggcaacaccgccguggccaagugcaacgagaagcacgacgaggaguucugcgacaugcugagacuguucgacuucaacaagcaggccauccagagacugaaggccgaggcccagaugagcauccagcugaucaacaaggccgugaacgcccugaucaacgaccagcugaucaugaagaaccaccugagagacaucaugggcauccccuacugcaacuacagcaaguacugcuaccugaaccacaccaccaccggcaagaccagccugcccaagugcugccuggugagcaacggcagcuaccugaacgagacccacuucagcgacgacaucgagcagcaggccgacaacaugaucaccgagaugcugcagaaggaguacauggagagacagggcaagaccccccugggccugguggaccuguucguguucagcaccagcuucuaccugaucagcaucuuccugcaccuggugaagauccccacccacagacacaucgugggcaagagcugccccaagccccacagacugaaccacaugggcaucugcagcugcggccuguacaagcagcccggcgugcccgugaaguggaagagaugaggacuagucccuguucccagagcccacuuuuuuuucuuuuuuugaaauaaaauagccugucuuucagaucucaaaggcucuuuucagagccaccaaaaaaaaaaaaaaaaaaaaaaaaaaaaaaaaaaaaaaaaaaaaaaaaaaaaaaaaaaaaaaaaagaauu

SEQ ID NO: 38844 - RNA, 1736 nt, Artificial Sequence
  mRNA product Design a-2 (hSL-A64-N5) comprising derived and/or modified sequence from LASV(G1442-SLE-2011;Clade IV)__AIT17180__GPCmut11 (opt4)
aggagaguccgcucagccagguugcagaagcggcuuagcguguguccuaaucuucucucugcguguagguaggccugugccgcaaacaagcuuaccaugggccagaucgugaccuucuuccaggaggugccccacgugaucgaggaggugaugaacaucgugcugaucgcccugagcauccuggccgugcugaagggccuguacaacguggccaccugcggccugaucggccuggugaccuuccugcugcugugcggcagaagcugcaccaccacccuguacaagggcguguacgagcugcagacccuggagcugaacauggagacccugaacaugaccaugccccugagcugcaccaagaacaacagccaccacuacaucagagugggcaacgagaccggccuggagcugacccugaccaacaccagcaucaucaaccacaaguucugcaaccugagcgacgcccacaagaagaaccuguacgaccacgcccugaugagcaucaucagcaccuuccaccugagcauccccaacuucaaccaguacgaggccaugagcugcgacuucaacggcggcaagaucagcgugcaguacaaccugagccacagcuacgccggcgacgccgccaaccacugcggcaccguggccaacggcgugcugcagaccuucaugagaauggccuggggcggcagcuacaucgcccuggacagcggcagaggcaacugggacugcaucaugaccagcuaccaguaccugaucauccagaacaccaccugggacgaccacugccaguucagcagacccagccccaucggcuaccugggccugcugagccagagaaccagagacguguacaucagcagaagacugcugggcaccuucaccuggacccugagcgacagcgagggcaaggacacccccggcggcuacugccugaccagauggaugcugaucgaggccgagcugaagugcuucggcaacaccgccguggccaagugcaacgagaagcacgacgaggaguucugcgacaugcugagacuguucgacuucaacaagcaggccauccagagacugaaggccgaggcccagaugagcauccagcugaucaacaaggccgugaacgcccugaucaacgaccagcugaucaugaagaaccaccugagagacaucaugggcauccccuacugcaacuacagcaaguacugcuaccugaacaacaccgccaccggcaagaccagccugcccaagugcugccugaucagcaacggcagcuaccugaacgagacccacuucagcgacgacaucgagcaggaggccgacaacaugaucaccgagaugcugcagaaggaguacauggagagacagggcaagaccccccugggccugguggaccuguucguguucagcaccagcuucuaccugaucagcaucuuccugcaccuggugaagauccccacccacagacacaucgugggcaagagcugccccaagccccacagacugaaccacaugggcaucugcagcugcggccuguacaagcagcccggcgugcccgugagauggaagagaugaggacuagucccuguucccagagcccacuuuuuuuucuuuuuuugaaauaaaauagccugucuuucagaucucaaaggcucuuuucagagccaccaaaaaaaaaaaaaaaaaaaaaaaaaaaaaaaaaaaaaaaaaaaaaaaaaaaaaaaaaaaaaaaaagaauu

SEQ ID NO: 38845 - RNA, 1736 nt, Artificial Sequence
  mRNA product Design a-2 (hSL-A64-N5) comprising derived and/or modified sequence from LASV(G3010-SLE-2013;Clade IV)__AIT17344__GPCmut11 (opt4)
aggagaguccgcucagccagguugcagaagcggcuuagcguguguccuaaucuucucucugcguguagguaggccugugccgcaaacaagcuuaccaugggccagaucgugaccuucuuccaggaggugccccacgugaucgaggaggugaugaacaucgugcugaucgcccugagcauccuggccgugcugaagggccuguacaacuucgccaccugcggccuggugggccuggugaccuuccugcugcugugcggcagaagcugcaccaccagccuguacaagggcguguacgagcugcagacccuggagcugaacauggagacccugaacaugaccaugccccugagcugcaccaagaacaacagccaccacuacaucauggugggcaacgagaccggccuggagcugacccugaccaacaccagcaucaucaaccacaaguucugcaaccugagcgacgcccacaagaagaaccuguacaaccacgcccugaugagcaucaucagcaccuuccaccugagcauccccaacuucaaccaguacgaggccaugagcugcgacuucaacggcggcaagaucagcgugcaguacaaccugagccacagcuacgccggcgacgccgccagccacugcggcaccguggccaacggcgugcugcagaccuucaugagaauggccuggggcggcagcuacaucgcccuggacagcggcuacggcaagugggacugcaucaugaccagcuaccaguaccugaucauccagaacaccaccugggaggaccacugccaguucagcagacccagccccaucggcuaccugggccugcugagccagagaaccagagacaucuacaucagcagaagacugcugggcaccuucaccuggacccugagcgacagcgagggcaaggacacccccggcggcuacugccugaccagauggaugcugaucgaggccgagcugaagugcuucggcaacaccgccguggccaagugcaacgagaagcacgacgaggaguucugcgacaugcugagacuguucgacuucaacaagcaggccauccagagacugaagaccgaggcccagaugagcauccagcugaucaacaaggccgugaacgcccugaucaacgaccagcugaucaugaagaaccaccugagagacaucaugggcauccccuacugcaacuacagcaaguacugcuaccugaaccacaccaccaccggcaagaccagccugcccaagugcugccuggugagcaacggcagcuaccugaacgagacccacuucagcgacgacaucgagcagcaggccgacaacaugaucaccgagaugcugcagaaggaguacauggagagacagggcaagaccccccugggccugguggaccuguucguguucagcaccagcuucuaccugaucagcaucuuccugcaccuggugaagauccccacccacagacacaucgugggcaagagcugccccaagccccacagacugaaccacaugggcaucugcagcugcggccuguacaagcagcccggcgugcccgugagauggaagagaugaggacuagucccuguucccagagcccacuuuuuuuucuuuuuuugaaauaaaauagccugucuuucagaucucaaaggcucuuuucagagccaccaaaaaaaaaaaaaaaaaaaaaaaaaaaaaaaaaaaaaaaaaaaaaaaaaaaaaaaaaaaaaaaaagaauu

SEQ ID NO: 38846 - RNA, 1736 nt, Artificial Sequence
  mRNA product Design a-2 (hSL-A64-N5) comprising derived and/or modified sequence from LASV(G502-SLE-2009;Clade IV)__AIT17126__GPCmut11 (opt4)
aggagaguccgcucagccagguugcagaagcggcuuagcguguguccuaaucuucucucugcguguagguaggccugugccgcaaacaagcuuaccaugggccagaucgugaccuucuuccaggaggugccccacgugaucgaggaggugaugaacaucgugcugaucgcccugagcauccuggccgugcugaagggccuguacaacuucgccaccugcggccuggugggccugcugaccuuccugcugcugugcggcagaagcugcaccaccggccuguacaagggcguguacgagcugcagacccuggagcugaacauggagacccugaacaugaccaugccccugagcugcaccaagaacaacagccaccacuacaucauggugggcaacgagaccggccuggagcugacccugaccaacaccagcaucaucaaccacaaguucugcaaccugagcgacgcccacaagaagaaccuguacgaccacgcccugaugagcaucaucagcaccuuccaccugagcauccccaacuucaaccaguacgaggccaugagcugcgacuucaacggcggcaagaucagcgugcaguacaaccugagccacagcuacgccggcgacgccgccgaccacugcggcaccguggccaacggcgugcugcagaccuucaugagaauggccuggggcggcagcuacaucgcccuggacagcggcagaggcagaugggacugcaucaugaccagcuaccaguaccugaucauccagaacaccaccugggaggaccacugccaguucagcagacccagccccaucggcuaccugggccugcugagccagagaaccagagacaucuacaucagcagaagacugcugggcaccuucaccuggacccugagcgacagcgagggcaaggacacccccggcggcuacugccugaccagauggaugcugaucgaggccgagcugaagugcuucggcaacaccgccguggccaagugcaacgagaagcacgacgaggaguucugcgacaugcugagacuguucgacuucaacaagcaggccauccagagacugaaggccgaggcccagaugagcauccagcugaucaacaaggccgugaacgcccugaucaacgaccagcuggugaugaagaaccaccugagagacaucaugggcauccccuacugcaacuacagcagauacugcuaccugaaccacaccaccaccggcagaaccagccugcccaagugcugccuggugagcaacggcagcuaccugaacgagacccacuucagcgacgacaucgagcagcaggccgacaacaugaucaccgagaugcugcagaaggaguacauggagagacagggcaagaccccccugggccugguggaccuguucguguucagcaccagcuucuaccugaucagcaucuuccugcaccuggugaagauccccacccacagacacaucgugggcaagagcugccccaagccccacagacugaaccacaugggcaucugcagcugcggccuguacaagcagcccggcgugcccgugaaguggaagagaugaggacuagucccuguucccagagcccacuuuuuuuucuuuuuuugaaauaaaauagccugucuuucagaucucaaaggcucuuuucagagccaccaaaaaaaaaaaaaaaaaaaaaaaaaaaaaaaaaaaaaaaaaaaaaaaaaaaaaaaaaaaaaaaaagaauu

SEQ ID NO: 38847 - RNA, 1736 nt, Artificial Sequence
  mRNA product Design a-2 (hSL-A64-N5) comprising derived and/or modified sequence from LASV(G733-SLE-2010;Clade IV)__AIT17154__GPCmut11 (opt4)
aggagaguccgcucagccagguugcagaagcggcuuagcguguguccuaaucuucucucugcguguagguaggccugugccgcaaacaagcuuaccaugggccagaucgugaccuucuuccaggaggugccccacgugaucgaggaggugaugaacaucgugcugaucgcccugagcauccuggccgugcugaagggccuguacaacuucgccaccugcggcaucgugggccuggugagcuuccugcugcugugcggcagaagcugcaccaccagccuguacaagggcguguacgagcugcagacccuggagcugaacauggagacccugaacaugaccaugccccugagcugcaccaagaacaacagccaccacuacaucauggugggcaacgagaccggccuggagcugacccugaccaacaccagcaucaucaaccacaaguucugcaaccugagcgacgcccacaagaagaaccuguacgaccacgcccugaugagcaucaucagcaccuuccaccugagcauccccaacuucaaccaguacgaggccaugagcugcgacuucaacggcggcaagaucagcgugcaguacaaccugagccacagcuacgccggcgacgccgccaaccacugcggcaccaucgccaacggcgugcugcagaccuucaugagaauggccuggggcggcagcuacaucgcccuggacagcggcagagacagaugggacugcaucaugaccagcuaccaguaccugaucauccagaacaccaccugggaggaccacugccaguucagcagacccagccccaucggcuaccugggccugcugagccagagaaccagagacaucuacaucagcagaagacugcugggcaccuucaccuggacccugagcgacagcgagggcaaggacacccccggcggcuacugccugaccagauggaugcugaucgaggccgagcugaagugcuucggcaacaccgccguggccaagugcaacgagaagcacgacgaggaguucugcgacaugcugagacuguucgacuucaacaagcaggccauccagagacugaaggccgaggcccagaugagcauccagcugaucaacaaggccgugaacgcccugaucaacgaccagcugaucaugaagaaccaccugagagacaucaugggcauccccuacugcaacuacagcaaguacugcuaccugaaccacaccaccaccggcaagaccagccugcccaagugcugccuggugagcaacggcagcuaccugaacgagacccacuucagcgacgacaucgagcagcaggccgacaacaugaucaccgagaugcugcagaaggaguacauggagagacagggcaagaccccccugggccugguggaccuguucguguucagcaccagcuucuaccugaucagcaucuuccugcaccuggugaagauccccacccacagacacguggugggcaagagcugccccaagccccacagacugaaccacaugggcaucugcagcugcggccuguacggccagcccggcgugcccgugaaguggaagagaugaggacuagucccuguucccagagcccacuuuuuuuucuuuuuuugaaauaaaauagccugucuuucagaucucaaaggcucuuuucagagccaccaaaaaaaaaaaaaaaaaaaaaaaaaaaaaaaaaaaaaaaaaaaaaaaaaaaaaaaaaaaaaaaaagaauu

SEQ ID NO: 38848 - RNA, 1736 nt, Artificial Sequence
  mRNA product Design a-2 (hSL-A64-N5) comprising derived and/or modified sequence from MOPV/LASV reassortant(IGS-1;Clade IV)__AFY05576__GPCmut11 (opt4)
aggagaguccgcucagccagguugcagaagcggcuuagcguguguccuaaucuucucucugcguguagguaggccugugccgcaaacaagcuuaccaugggccagaucgugaccuucuuccaggaggugccccacgugaucgaggaggugaugaacaucgugcugaucgcccugagcgugcuggccgugcugaagggccuguacaacuucgccaccugcggccuggugggccuggugaccuuccugcugcugugcggcagaagcugcaccaccagccuguacaagggcguguacgagcugcagacccuggagcugaacauggagacccugaacaugaccaugccccugagcugcaccaagaacaacagccaccacuacaucauggugggcaacgagaccggccuggagcugacccugaccaacaccagcaucaucaaccacaaguucugcaaccugagcgacgcccacaagaagaaccuguacgaccacgcccugaugagcaucaucagcaccuuccaccugagcauccccaacuucaaccaguacgaggccaugagcugcgacuucaacggcggcaagaucagcgugcaguacaaccugagccacagcuacgccggcgacgccgccaaccacugcggcaccguggccaacggcgugcugcagaccuucaugagaauggccuggggcggcagcuacaucgcccuggacagcggcagaggcaacugggacugcaucaugaccagcuaccaguaccugaucauccagaacaccaccugggaggaccacugccaguucagcagacccagccccaucggcuaccugggccugcugagccagagaaccagagacaucuacaucagcagaagacugcugggcaccuucaccuggacccugagcgacagcgagggcgaggacacccccggcggcuacugccugaccagauggaugcugaucgaggccgagcugaagugcuucggcaacaccgccguggccaagugcaacgagaagcacgacgaggaguucugcgacaugcugagacuguucgacuucaacaagcaggccauccagagacugaaggccgaggcccagaugagcauccagcugaucaacaaggccgugaacgcccugaucaacgaccagcugaucaugaagaaccaccugagagacaucaugggcauccccuacugcaacuacagcaaguacugcuaccugaaccacaccaccaccggcagaaccagccugcccaagugcugccuggugagcaacggcagcuaccugaacgagacccacuucagcgacgacaucgagcagcaggccgacaacaugaucaccgagaugcugcagaaggaguacauggagagacagggcaagaccccccugggccugguggaccuguucguguucagcaccagcuucuaccugaucagcaucuuccugcaccuggugaagauccccacccacagacacaucgugggcaagagcugccccaagccccacagacugaaccacaugggcaucugcagcugcggccuguacaagcagcccggcgugcccgugaaguggaagagaugaggacuagucccuguucccagagcccacuuuuuuuucuuuuuuugaaauaaaauagccugucuuucagaucucaaaggcucuuuucagagccaccaaaaaaaaaaaaaaaaaaaaaaaaaaaaaaaaaaaaaaaaaaaaaaaaaaaaaaaaaaaaaaaaagaauu

SEQ ID NO: 38849 - RNA, 1736 nt, Artificial Sequence
  mRNA product Design a-2 (hSL-A64-N5) comprising derived and/or modified sequence from LASV(LM765-SLE-2012;Clade IV)__AIT17814__GPCmut11 (opt4)
aggagaguccgcucagccagguugcagaagcggcuuagcguguguccuaaucuucucucugcguguagguaggccugugccgcaaacaagcuuaccaugggccagaucgugaccuucuuccaggaggugccccacgugaucgaggaggugaugaacaucgugcugaucgcccugagcauccuggccgugcugaagggccuguacaacuucgccaccugcggccuggugggccuggugaccuuccugcugcugugcggcagaagcugcaccaccagccuguacaagggcguguacgagcugcagacccuggagcugaacauggagacccugaacaugaccaugccccugagcugcaccaagaacaacagccaccacuacaucauggugggcaacgagaccggccuggagcugacccugaccaacaccagcaucaucgaccacaaguucugcaaccugagcgacgcccacagaaagaaccuguacgaccacgcccugaugagcaucaucagcaccuuccaccugagcauccccaacuucaaccaguacgaggccaugagcugcgacuucaacggcggcaagaucagcgugcaguacaaccugagccacagcuacgccaaggacgccgccgaccacugcggcaccguggccaacggcgugcugcagaccuucaugagaauggccuggggcggcagcuacaucgcccuggacagcggcagaggcagaugggacugcaucaugaccagcuaccaguaccugaucauccagaacaccaccugggaggaccacugccaguucagcagacccagccccaucggcuaccugggccugcugagccagagaaccagagacaucuacaucagcagaagacugcugggcaccuucaccuggacccugagcgacagcgagggcaaggacacccccggcggcuacugccugaccagauggaugcugaucgaggccgagcugaagugcuucggcaacaccgccguggccaagugcaacgagaagcacgacgaggaguucugcgacaugcugagacuguucgacuucaacaagcaggccauccagagacugaaggccgaggcccagaugagcauccagcugaucaacaaggccgugaacgcccugaucaacgaccagcugaucaugaagaaccaccugagagacaucaugggcauccccuacugcaacuacagcaaguacugcuaccugaaccacaccaccaccggcaagaccagccugcccaagugcugccuggugagcaacggcagcuaccugaacgagacccacuucagcgacgacaucgagcagcaggccgacaacaugaucaccgagaugcugcagaaggaguacauggagagacagggcaagaccccccugggccugguggaccuguucguguucagcaccagcuucuaccugaucagcaucuuccugcaccuggugaagauccccacccacagacacaucgugggcaagcccugccccaagccccacagacugaaccacaugggcaucugcagcugcggccuguacaagcagcccggcgugcccgugaaguggaagagaugaggacuagucccuguucccagagcccacuuuuuuuucuuuuuuugaaauaaaauagccugucuuucagaucucaaaggcucuuuucagagccaccaaaaaaaaaaaaaaaaaaaaaaaaaaaaaaaaaaaaaaaaaaaaaaaaaaaaaaaaaaaaaaaaagaauu

SEQ ID NO: 38850 - RNA, 1736 nt, Artificial Sequence
  mRNA product Design a-2 (hSL-A64-N5) comprising derived and/or modified sequence from LASV(LM776-SLE-2012;Clade IV)__AIT17824__GPCmut11 (opt4)
aggagaguccgcucagccagguugcagaagcggcuuagcguguguccuaaucuucucucugcguguagguaggccugugccgcaaacaagcuuaccaugggccagaucgugaccuucuuccaggaggugccccacgugaucgaggaggugaugaacaucgugcugaucgcccugagcauccuggccgugcugaagggccuguacaacuucgccaccugcggccuggugggccuggugaccuuccugcugcugugcggcagaagcugcaccaccagcguguacaagggcguguacgagcugcagacccuggagcugaacauggagacccugaacaugaccaugccccugagcugcaccaagaacaacagccaccacuacaucauggugggcaacgagaccggccuggagcugacccugaccaacaccagcaucaucaaccacaaguucugcaaccugagcgacgcccacaagaagaaccuguacgaccacgcccugaugagcaucaucagcaccuuccaccugagcauccccaacuucaaccaguacgaggccaugagcugcgacuucaacggcggcaagaucagcgugcaguacaaccugagccacagcuacgccggcgacgccgccaaccacugcggcaccguggccaacggcgugcugcagaccuucaugagaauggccuggggcggcagcuacaucgcccuggacagcggccacggcaagugggacugcaucaugaccagcuaccaguaccugaucauccagaacaccaccugggaggaccacugccaguucagcagacccagccccaucggcuaccugggccugcugagccagagaaccagagacaucuacaucagcagaagacugcugggcaccuucaccuggacccugagcgacagcgagggcaaggacacccccggcggcuacugccugaccagauggaugcugaucgaggccgagcugaagugcuucggcaacaccgccguggccaagugcaacgagaagcacgacgaggaguucugcgacaugcugagacuguucgacuucaacaagcaggccauccagagacugaaggccgaggcccagaugagcauccagcugaucaacaaggccgugaacgcccugaucaacgaccagcugaucaugaagaaccaccugagagacaucaugggcauccccuacugcaacuacagcaaguacugcuaccugaaccacaccaccaccggcaagaccagccugcccaagugcugccuggugagcaacggcagcuaccugaacgagacccacuucagcgacgacaucgagcagcaggccgacaacaugaucaccgagaugcugcagaaggaguacauggagagacagggcaagaccccccugggccugguggaccuguucguguucagcaccagcuucuaccugaucagcaucuuccugcaccuggugaagauccccacccacagacacaucgugggcaagagcugccccaagccccacagacugaaccacaugggcaucugcagcugcggccuguacaagcagcccggcgugcccgugagauggaagagaugaggacuagucccuguucccagagcccacuuuuuuuucuuuuuuugaaauaaaauagccugucuuucagaucucaaaggcucuuuucagagccaccaaaaaaaaaaaaaaaaaaaaaaaaaaaaaaaaaaaaaaaaaaaaaaaaaaaaaaaaaaaaaaaaagaauu

SEQ ID NO: 38851 - RNA, 1736 nt, Artificial Sequence
  mRNA product Design a-2 (hSL-A64-N5) comprising derived and/or modified sequence from LASV(Mad39;Clade IV)__ANH09722__GPCmut11 (opt4)
aggagaguccgcucagccagguugcagaagcggcuuagcguguguccuaaucuucucucugcguguagguaggccugugccgcaaacaagcuuaccaugggccagaucgugaccuucuuccaggaggugccccacgugaucgaggaggugaugaacaucgugcugaucgcccugagcauccuggccgugcugaagggccuguacaacguggccaccugcggccugaucggccuggugaccuuccugcugcugugcggcagaagcugcaccaccacccuguacaagggcguguacgagcugcaggcccuggagcugaacauggagacccugaacaugaccaugccccugagcugcaccaagaacaacagccaccacuacaucagagugggcaacgagaccggccuggagcugacccugaccaacaccagccugaucaaccacaaguucugcaaccugagcgacgcccacaagaagaaccuguacgaccacgcccugaugagcaucaucagcaccuuccaccugagcauccccaacuucaaccaguacgaggccaugagcugcgacuucaacgacggcaagaucagcgugcaguacaaccugagccacaccuacgccggcgacaccgccaaccacugcggcaccguggccaacggcgugcugcagaccuucaugagaauggccuggggcggcagcuacaucgcccuggacagcggcagaggcggcugggacugcaucaugaccagcuaccaguaccugaucauccagaacaccaccugggaggaccacugccaguucagcagacccagccccaucggcuaccugggccugcugagccagagaaccagagacaucuacaucagcagaagacugcugggcaccuucaccuggacccugagcgacagcgagggcaaggacacccccggcggcuacugccugaccagauggaugcugaucgaggccgagcugaagugcuucggcaacaccgccguggccaagugcaacgagaagcacgacgaggaguucugcgacaugcugagacuguucgacuucaacaagcaggccauccagagacugaaggccgaggcccagaugagcauccagcugaucaacaaggccgugaacgcccugaucaacgaccagcugaucaugaagaaccaccugagagacaucaugggcauccccuacugcaacuacagcaaguacugcuaccugaaccacaccgugaccggcaagaccagccugcccaagugcugccuggugagcaacggcagcuaccugaacgagacccacuucagcgacgacaucgagcagcaggccgacaacaugaucaccgagaugcugcagaaggaguacauggagagacagggcaagaccccccugggccugguggaccuguucguguucagcaccagcuucuaccugaucagcaucuuccugcaccuggugaagauccccacccacagacacguggugggcaagcccugccccaagccccacagacugaaccacaugggcaucugcagcugcggcuucuacaagcagcccggcgugcccgugagauggaagagaugaggacuagucccuguucccagagcccacuuuuuuuucuuuuuuugaaauaaaauagccugucuuucagaucucaaaggcucuuuucagagccaccaaaaaaaaaaaaaaaaaaaaaaaaaaaaaaaaaaaaaaaaaaaaaaaaaaaaaaaaaaaaaaaaagaauu

SEQ ID NO: 38852 - RNA, 1736 nt, Artificial Sequence
  mRNA product Design a-2 (hSL-A64-N5) comprising derived and/or modified sequence from LASV(Z0947-SLE-2011;Clade IV)__AIT17840__GPCmut11 (opt4)
aggagaguccgcucagccagguugcagaagcggcuuagcguguguccuaaucuucucucugcguguagguaggccugugccgcaaacaagcuuaccaugggccagaucgugaccuucuuccaggaggugccccacgugaucgaggaggugaugaacaucgugcugaucgcccugagcauccuggccgugcugaagggccuguacaacuucgccaccugcggccuggugggccuggugaccuuccugcugcugugcggcagaagcugcaccaucagccuguacaagggcguguacgagcugcagacccuggagcugaacauggagacccugaacaugaccaugccccugagcugcaccaagaacaacagccaccacuacaucauggugggcaacgagaccggccuggagcugacccugaccaacaccagcaucaucaaccacaaguucugcaaccugagcgacgcccacaagaagaaccuguacgaccacgcccugaugagcaucaucagcaccuuccaccugagcauccccaacuucaaccaguacgaggccaugagcugcgacuucaacggcggcaagaucagcgugcaguacaaccugagccacagcuacgccggcgacgccgccaaccacugcggcaccguggccaacggcgugcugcagaccuucaugagaauggccuggggcggcagcuacaucgcccuggacagcggcagagacagaugggacugcaucaugaccagcuaccaguaccugaucauccagaacaccaccugggaggaccacugccaguucagcagacccagccccaucggcuaccugggccugcugagccagagaaccagagacaucuacaucagcagaagacugcugggcaccuucaccuggacccugagcgacagcgagggcaaggacacccccggcggcuacugccugaccagauggaugcugaucgaggccgagcugaagugcuucggcaacaccgccguggccaagugcaacgagaagcacgacgaggaguucugcgacaugcugagacuguucgacuucaacaagcaggccauccagagacugaaggccgaggcccagaugagcauccagcugaucaacaaggccgugaacgcccugaucaacgaccagcugaucaugaagaaccaccugagagacaucaugggcauccccuacugcaacuacagcaaguacugcuaccugaaccacaccaccaccggcaagaccagccugcccaagugcugccuggugagcaacggcagcuaccugaacgagacccacuucagcgacgacaucgagcagcaggccgacaacaugaucaccgagaugcugcagaaggaguacauggagagacagggcaagaccccccugggccugguggaccuguucguguucagcaccagcuucuaccugaucagcaucuuccugcaccuggugaagauccccacccacagacacaucgugggcaagcccugccccaagccccacagacugaaccacaugggcaucugcagcugcggccuguacaagcagcccggcgugcccgugaaguggaagagaugaggacuagucccuguucccagagcccacuuuuuuuucuuuuuuugaaauaaaauagccugucuuucagaucucaaaggcucuuuucagagccaccaaaaaaaaaaaaaaaaaaaaaaaaaaaaaaaaaaaaaaaaaaaaaaaaaaaaaaaaaaaaaaaaagaauu

SEQ ID NO: 38853 - RNA, 1736 nt, Artificial Sequence
  mRNA product Design a-2 (hSL-A64-N5) comprising derived and/or modified sequence from LASV(Josiah;Clade IV)__NP_694870__GPCmut11 (opt5)
aggagaguccgcucagccagguugcagaagcggcuuagcguguguccuaaucuucucucugcguguagguaggccugugccgcaaacaagcuuaccaugggccagaucgugaccuucuuucaagaggucccccacguuauugaagaggugaugaacaucgugcugauugcccucagcguccuggcugugcuuaaggggcuguacaauuucgccacaugcggacucguuggccuggugacguuucuucugcucugugggagauccugcaccacaucucuguauaaaggagucuacgaacugcagacccucgagcugaacauggaaacacuuaauaugaccaugccucugagcuguacaaagaacaauucccaucacuauaucauggugggcaacgagaccgggcucgagcugacgcuuaccaauacaucuauuaucaaccauaaauucugcaaucugagcgacgcgcacaagaaaaaccucuacgaucaugcucugauguccaucauuucuaccuuucaccugagcaucccgaauuucaaccaguaugaagccauguccugugacuuuaauggaggcaagauuagcguucaguacaaccucucucacuccuaugccggcgaugcugccaaucauugcgggacaguggcuaacggaguccugcaaaccuucaugcggauggccuggggcgggagcuacaucgcgcuugacucuggacgcggcaacugggauuguauuaugacguccuaccaguaucugaucauucagaauacaaccugggaggaccacugccaguuuagcagacccucuccuaucggguaccucggacugcuuucccaacggacacgcgauaucuauauuagcagacggcugcucggcaccuucaccuggacacuguccgacucugaaggcaaggauacgcccgggggauacugucugacccgcuggaugcucaucgaggccgagcugaaaugcuuuggcaacacagcuguggccaaguguaaugaaaaacaugacgaggaguucugcgauaugcuuagacuguuugacuucaacaagcaggcuauucagcggcucaaagccgaagcgcagaugagcauccaacugauuaauaaggccgugaacgcucuuaucaaugaucagcugaucaugaagaaccaccuccgcgacauuauggggaucccuuauugcaauuacuccaaauauuguuaccugaaccacaccacaaccggaagaacgagccugcccaagugcugucucgucucuaauggcuccuaccugaacgaaacacauuucagcgacgauauugagcagcaagccgacaauaugaucaccgagaugcuucagaaagaauauauggagcggcaggggaagaccccucugggacucguugaucuguuuguguucucuaccagcuuuuaccugauuuccaucuuccuucaccucgugaaaaucccgacacaucgccacauugucggcaagucuugccccaaaccucauagacugaaccacaugggcaucuguagcugcgggcuguauaagcagcccggagugccuguuaaguggaaacggugaggacuagucccuguucccagagcccacuuuuuuuucuuuuuuugaaauaaaauagccugucuuucagaucucaaaggcucuuuucagagccaccaaaaaaaaaaaaaaaaaaaaaaaaaaaaaaaaaaaaaaaaaaaaaaaaaaaaaaaaaaaaaaaaagaauu

SEQ ID NO: 38854 - RNA, 1733 nt, Artificial Sequence
  mRNA product Design a-2 (hSL-A64-N5) comprising derived and/or modified sequence from LASV(LP;Clade I)__AAF86701__GPCmut11 (opt5)
aggagaguccgcucagccagguugcagaagcggcuuagcguguguccuaaucuucucucugcguguagguaggccugugccgcaaacaagcuuaccaugggccagaucauuaccuucuuucaagaggugccccacgucaucgaagagguuaugaacauugugcugaucgcccucagccugcuugcuauucugaaggggcucuacaauaucgccacaugcggaaucauuggccugguggcguuccuuuuucugugugggaaauccugcucucucacgcugaagggaggcuaugaacugcagacccucgagcugaacauggaaacacuuaauaugaccaugccucugagcuguaccaaaaacuccucucaucacuacaucagagucgggaaugagacaggacucgagcugacacuuaccaacacgagcauuaucaaucauaaguucugcaaccuguccgacgcucacaaaaagaaucucuaugaucaugcccugaugucuauuaucagcaccuuucaccuguccauuccgaacuucaaucaguacgaagccaugagcugugacuuuaacggcggcaagaucucugugcaguauaaucucucccacagcuacgcuggggaugccgcugagcauugcggaacaguugccaacggcgugcugcaaaccuucaugcggauggcguggggagggcgcuauaucgcccuugacucuggcaaagggaauugggauuguauuaugacauccuaccaguaccugaucauucagaacaccacgugggaagaccacugccaguuuagcagacccucuccuaucggauaucucggccugcuuucccaacggacacgcgauauuuacaucagcagacggcugcucggcaccuucacauggacccuguccgacucugaggggaacgagacccccggaggcuauugucugacacgcuggaugcucaucgaagcugagcugaagugcuuugggaauacggccgucgcuaaauguaacgaaaagcaugaugaggaguucugcgacaugcuuagacuguuugauuucaauaaacaggccauucggcgccucaaggcggaagcccagaugagcauccagcugauuaacaaggcugugaaugcccuuaucaacgaccaacugauuaugaaaaaucaccucagagauaucaugggaaucccuuacugcaacuauuccaaguacuguuaucugaaucacaccagcucuggccggacaucccugcccaaaugcugucucauuagcaacgggucuuaccugaaugagacccaguucagcgacgacaucgaacagcaagcugauaacaugauuacagagaugcuucagaaggaauacaucgagcgccagggaaaaaccccucugggccucguugacauuuuuaucuucuccacgucuuuuuaucugauuagcaucuuccugcaucuuaucaagauuccgacacacagacauaucgugggcaaacccugcccuaagccccaccggcucaaucauaugggggucuguuccugcggacuguacaagcacccuggcgugcccaccaaauggaagcgcugaggacuagucccuguucccagagcccacuuuuuuuucuuuuuuugaaauaaaauagccugucuuucagaucucaaaggcucuuuucagagccaccaaaaaaaaaaaaaaaaaaaaaaaaaaaaaaaaaaaaaaaaaaaaaaaaaaaaaaaaaaaaaaaaagaauu

SEQ ID NO: 38855 - RNA, 1733 nt, Artificial Sequence
  mRNA product Design a-2 (hSL-A64-N5) comprising derived and/or modified sequence from LASV(803213;Clade II)__AAF86703__GPCmut11 (opt5)
aggagaguccgcucagccagguugcagaagcggcuuagcguguguccuaaucuucucucugcguguagguaggccugugccgcaaacaagcuuaccaugggccagaucauuaccuucuuucaagaggugccccacgucaucgaagagguuaugaacauugugcugaucgcccucagccugcuugcuauucugaaggggaucuacaauguggccacaugcggacucuucggccugaucuccuuucuucugcucugugggagaucuugcagcgucacguauaaaggaguguacgaacugcagacccuggagcucaacauggcgaaucugaacaugacaaugccucuuuccuguaccaagaauaacucucaucacuauauuaugguuggcaaugaaacagggcuggagcucacccugacaaacaccagcaucauuaaucauaaauucugcaaccuuuccgacgcucacaagaaaaaucuguacgaucaugcccucaugucuaucauuagcacguuucaccuguccaucccgaacuucaaucaguaugaggccaugagcugugacuuuaacggaggcaagauuucugugcaguacaaucugucccacagcuucgcugucgaugccgcuaaccauugcggcaccaucgccaacggggugcuccaaacauuuaugcggauggcguggggaggcucuuauaucgcccuggacuccgggaagggaaauugggauuguauuaugaccagcuaccaguaccuuaucauucagaacacaaccugggaagaccacugccaguucucucgccccuccccuaucggcuaucuggggcuccugagccaaagaacgcgggauauuuacaucucccgcagacuucugggaacauuuaccuggacacucucugacagcgagggcaaugaagcucccggcggguauugucugacccgguggaugcugaucgaggccgagcucaaaugcuucggaaacaccgcuguugccaaguguaaugaaaaacaugaugaggaauuuugcgacaugcugcgccuuuucgauuucaacaagcaggcgauuaaaagacugaagacagaggcccagauguccauccagcucauuaauaaggcugugaacgcccugaucaaugaccaacuuauuaugaaaaaccaucugcgggauaucaugggcaucccuuacugcaauuauagccgcuacuguuaucucaaccacacggucaccgggaagacaucucugcccagaugcugucugguguccaauggaagcuaccucaacgaaacccacuuuucugacgacauugagcagcaggcugauaauaugaucacagagaugcugcaaaaagaauacauggaccggcagggcaagaccccucuugggcugguggaucucuucgucuuuagcacguccuucuaucugauuucuaucuuucugcaccuuguuaaaauuccgacacaucgccacaucgugggaaagcccugcccuaaaccccauagacucaaccacaugggcauuuguagcugcggccuguacaagcacccuggggugcccgucaaguggaaacggugaggacuagucccuguucccagagcccacuuuuuuuucuuuuuuugaaauaaaauagccugucuuucagaucucaaaggcucuuuucagagccaccaaaaaaaaaaaaaaaaaaaaaaaaaaaaaaaaaaaaaaaaaaaaaaaaaaaaaaaaaaaaaaaaagaauu

SEQ ID NO: 38856 - RNA, 1733 nt, Artificial Sequence
  mRNA product Design a-2 (hSL-A64-N5) comprising derived and/or modified sequence from LASV(GA391;Clade III)__CAA36645__GPCmut11 (opt5)
aggagaguccgcucagccagguugcagaagcggcuuagcguguguccuaaucuucucucugcguguagguaggccugugccgcaaacaagcuuaccaugggccagaucgugaccuucuuucaagaggucccccacguuauugaagaggugaugaacaucgugcugauugcccucagcauccuggcuauucuuaaggggcuguacaaugucgccacaugcggacucaucggccuggugacguuccuucugcucuccgggagaucuuguagccugaucuauaaaggaaccuacgaacugcagacacucgagcugaacauggaaacccuuaauaugacaaugccucuguccugcaccaagaacaauucucaucacuauauucggguuggcaacgagacagggcucgagcugacccuuacgaauaccagcauccugaaccauaaauuuuguaaucucuccgacgcgcacaagcgcaaccuguacgaucauucucugaugagcauuaucuccacauuccaccucagcauuccgaauuuuaaccaguaugaagcuaugucuugcgacuucaauggaggcaaaaucaccgugcaguacaaccugucccacagcuuugccgucgaugccgcuggccauugugggacacuugccaauggagugcugcaaaccuucaugagaauggcuuggggcgggucuuauauugcccucgacuccggacggggcaacugggauugcaucaugacgagcuaccaguaccugaucauucagaacacaaccugggacgaucacugucaguuuucucgccccuccccuaucggguaucuuggacugcucagccaaagaacacgggacauuuacaucucccgcagacugcugggcaccuucaccuggacacucucugauagcgagggcaaugaaacgcccgggggauauugccugacccgguggaugcuuauugaggcggagcugaaguguuuuggcaacacagccguugcuaagugcaaugaaaaacaugacgaggaguucugugauaugcuccgccuguuugacuucaacaagcaggccaucagacggcuuaaaaccgaagcucagauguccauccagcugauuaauaaggccgugaacgcgcucaucaaugaucaacugauuaugaaaaaccaucugcgcgacaucauggggauuccuuacugcaauuauagcagauacugcuaucucaaccacacaucuaccggaaagacgucccugccccgguguugccuuaucagcaauggcucuuaccugaacgaaacaaaguucagcgacgauaucgagcagcaggccgacaauaugauuaccgagaugcuccaaaaagaauacaucgaucgccaggggaagaccccucugggacuggucgaccuuuuuguguucuccacaucuuuuuaucucauuagcaucuuccugcaccuggugaaaauuccgacccacagacauaucgucggcaagcccuguccuaaaccccaccggcucaaccauaugggcauuugcuccugugggcuguacaagcagccuggaguucccgugagauggaaacgcugaggacuagucccuguucccagagcccacuuuuuuuucuuuuuuugaaauaaaauagccugucuuucagaucucaaaggcucuuuucagagccaccaaaaaaaaaaaaaaaaaaaaaaaaaaaaaaaaaaaaaaaaaaaaaaaaaaaaaaaaaaaaaaaaagaauu

SEQ ID NO: 38857 - RNA, 1736 nt, Artificial Sequence
  mRNA product Design a-2 (hSL-A64-N5) comprising derived and/or modified sequence from LASV(AV;Clade V)__CCA30314__GPCmut11 (opt5)
aggagaguccgcucagccagguugcagaagcggcuuagcguguguccuaaucuucucucugcguguagguaggccugugccgcaaacaagcuuaccaugggccagaucgugaccuucuuucaagaggucccccacguuauugaagaggugaugaacaucgugcugauugcccucagcauccuggcuguccuuaaggggcuguacaauauugccacaugcggacucaucggccugaucacguuccuucugcucugugggagauccugcucuagcaaccuguauaaaggaguguacgaacugcagucccucgaccugaauauggagacccuuaacaugacaaugccucugucuuguaccaagaauaacagccaucacuauauucggguuggcaaugauacagggcucgaacugacccuuacaaacaccuccauccugaaucauaaauuuugcaaccucucugacgcgcacaagaaagaucuguacgaccaugcucugaugagcauuaucuccacguuccaccucagcauuccgaauuuuaaccaguaugaggccaugucuugugauuucaauggaggcaagaucuccgugcaguacaaccugagccacucuuaugccauugacgcugccaaucauugcggcaccgucgcuaacgggauccuucaaacauuuaugcgcauggccuggggaggcuccuacaucgcgcuggauagcgggagaggaaacugggacuguauuaugaccucuuaccaguaucucaucauucagaauacaaccugggagaaccacugccaguucucccggcccagcccuaucggcuaccuggggcuucugucccaacgcacgagagauauuuauaucucucggcgccuccugggaacauuuaccuggacacugagcgacuccgaaggcaaugccacccccggcggguacugucucaccagauggaugcugaucgaggcugaacuuaagugcuucggaaacacagccguggcuaaauguaaugagaagcaugaugaggaauuuugcgacaugcugcgccucuucgauuuuaacaaacaggccauuagccggcugaagucugaggcgcagauguccauccagcuuauuaauaaagccguuaacgcucugaucaaugaccaacucauuaugaagaaccaccugagagacaucaugggcaucccuuauugcaauuacagcaaguauuguuaccugaaccacacgauuaccgggaaaacaucucuccccaagugcugucuggugagcaauggauccuaccuuaacgaaacccauuucucugaugacaucgagcagcaggccgauaauaugauuacagaaaugcugcaaaaagaguauauggagcggcagggcaagaccccucucgggcuggucgaccuguucguguuuagcacguccuucuaccuuaucagcauuuuucuccgccuggugaaaaucccgacacacagacauauugucggaaagcccugcccuaaaccccaccggcugaaccauaugggcaucuguucuugcggccucuauaagcagccugggguucccgugcgcuggaagagaugaggacuagucccuguucccagagcccacuuuuuuuucuuuuuuugaaauaaaauagccugucuuucagaucucaaaggcucuuuucagagccaccaaaaaaaaaaaaaaaaaaaaaaaaaaaaaaaaaaaaaaaaaaaaaaaaaaaaaaaaaaaaaaaaagaauu

SEQ ID NO: 38858 - RNA, 1733 nt, Artificial Sequence
  mRNA product Design a-2 (hSL-A64-N5) comprising derived and/or modified sequence from LASV(Togo/2016/7082;Clade VI)__AMR44577__GPCmut11 (opt5)
aggagaguccgcucagccagguugcagaagcggcuuagcguguguccuaaucuucucucugcguguagguaggccugugccgcaaacaagcuuaccaugggccagaucauuaccuucuuucaagaggugccccacgucaucgaagagguuaugaacauugugcugaucgcccucagccugcuugcuauucugaaggggguguacaaugucgccacaugcggaaucaucggccucgugacguuccuguuucuuugugggagauccugcucucugauuuauaaaggaagcuacgaacuccagacccuggagcugaacauggaaacacucaauaugaccaugccucuguccuguacaaagaacucuagccaucacuauauccggguuggcaaugagaccgggcuugagcugacacucaccaacacguccauuaucaaucauaaauucugcaaccugucugacgcgcacaagcgcaaucuuuacgaucaugcucugaugagcauucucuccaccuuucaccugagcaucccgaacuucaaucaguaugaagccaugucuugugacuuuaacggaggcaaaauuuccgugcaguacaaucugagccacgccuaugcugucgaugccgcugagcauugcggcacaguggccaacgggguucuccaaaccuucaugagaauggcguggggaggcucuuacaucgcccuggacuccgggcggggaaauugggauuguaucaugacaagcuaccaguaucuuauuauccagaacaccacgugggaagaccacugccaguuuucucgccccuccccuauuggcuaccuggggcuccugagccaaagaacacgggauaucuauauuucccgcagacuucugggaaccuucacauggacccucucugacagcgagggcaacgagacccccggcggguacugucugacacgguggaugcugaucgaagcugagcucaagugcuuuggaaauacggccguggcuaaguguaacgaaaaacaugaugaggaguucugcgacaugcugcgccuuuuugauuucaauaagcaggccauccagagacugaaauccgaagcgcagaugagcauucaacucaucaacaaggccgucaaugcucugauuaacgaccagcuuaucaugaaaaaucaucugcgggauaugaugggcauuccuuauugcaacuacucuaaguauuguuaccucaaucacaccuccagcgggcgcacaucucugcccaagugcugucuggugagcaacggauccuaccucaaugagacccacuucucugacgacaucgaacagcaagccgauaacaugaucacagagaugcugcagaaagaauauauugacagacagggcaagaccccucuugggcugguggaucucuuugucuucagcacguccuuuuaccugaucagcauuuuccugcaccuuaucaaaauuccgacacaucggcacaucguuggaaagcccugcccuaaaccccaucgccucaaucacaugggcauuuguucuugcggccuguauaagcagccuggggugcccaccagauggaaacggugaggacuagucccuguucccagagcccacuuuuuuuucuuuuuuugaaauaaaauagccugucuuucagaucucaaaggcucuuuucagagccaccaaaaaaaaaaaaaaaaaaaaaaaaaaaaaaaaaaaaaaaaaaaaaaaaaaaaaaaaaaaaaaaaagaauu

SEQ ID NO: 38859 - RNA, 1733 nt, Artificial Sequence
  mRNA product Design a-2 (hSL-A64-N5) comprising derived and/or modified sequence from LASV(KAK-428;Clade n.d. (VII))__ANH09740__GPCmut11 (opt5)
aggagaguccgcucagccagguugcagaagcggcuuagcguguguccuaaucuucucucugcguguagguaggccugugccgcaaacaagcuuaccaugggccagaucgugaccuucuuucaagaggucccccacguuauugaagaggugaugaacaucgugcugauugcccucagccugcuugcuauccugaaggggcucuacaauuucgccacaugcggagucauuggccugaucacguuucuucugcucugugggagauccugcucugcgaccuauaaaggacaguacgaacugcagacacuggagcucaacauggaaagccugaauaugaccaugccucuuuccuguacaaagaacaauucucaucacuauauccgggcuggcaacaauaccgggcuggagcucacacugaccaacacgagcauuaucucccauaaauucugcaaucuuucugacgcccacaagaaaaaccuguacgaucauacccucaugagcauuaucacaaccuuucaccuguccauuccgaauuucaaccaguaugaggccaugagcugugacuuuaauggaggcaagaucucuauucaauacaaccugucccacagcuaugcuggcgaugccgcucagcauugcgggacaguggccaauggaguucuccagaccuucaugcgcauggcguggggcgggucuuaccuggcccuugacuccggaagacggggcugggauuguaucaucagcucuuaccaguaucugauuauccaaaacacgacaugggacgaucacugccaguuuucccgccccagcccuauuggguaccucggauucgugucccagaagaccagagacaucuauauuucucggcgccugcuuggcacauuuaccuggacccugagcgauuccgaaggccaugacaugcccgggggauacugucucacaagauggaugcugaucgaggcugaucugaaaugcuucggcaacacggccgucgcuaaguguaaugaaaaacacgacgaggaguuuugcgauauguggcgccucuucgacuucaacaagcaggccauccaacggcugaaagcggaagcccagaugaauauucagcuuaucaacaaggcugugaaugcccugauuaacgaccaacucaugaugaagaaucaccugagagauaucauggggauuccuuauugcaacuacagcaaauuuuguuaucuuaauaacaccacaaccggacggacaucucugccccgcugcugucucaucuccaauggcagcuaccugaacgagacccauuucucugacgauaucgaacagcaggcugacaauaugauuacggagaugcugcagaaggaauacauggauagacaagggaaaacaccucucggacugguugaccuuuuuguguucagcaccuccuuuuaucugaucaccauuuuccuccaccuggucaagaucccgacacaucggcacauugugggcaaacccugcccuaagccccaucgccugaaccacaugggcaucuguucuugcgggcuuuacaaacagccuggagugcccgucagauggaagcggugaggacuagucccuguucccagagcccacuuuuuuuucuuuuuuugaaauaaaauagccugucuuucagaucucaaaggcucuuuucagagccaccaaaaaaaaaaaaaaaaaaaaaaaaaaaaaaaaaaaaaaaaaaaaaaaaaaaaaaaaaaaaaaaaagaauu

SEQ ID NO: 38860 - RNA, 1733 nt, Artificial Sequence; identical to SEQ ID NO: 38854
  mRNA product Design a-2 (hSL-A64-N5) comprising derived and/or modified sequence from LASV(Pinneo-NIG-1969;Clade I)__AIT17836__GPCmut11 (opt5)

SEQ ID NO: 38861 - RNA, 1733 nt, Artificial Sequence
  mRNA product Design a-2 (hSL-A64-N5) comprising derived and/or modified sequence from LASV(ISTH0009-NIG-2011;Clade II)__AIT17404__GPCmut11 (opt5)
aggagaguccgcucagccagguugcagaagcggcuuagcguguguccuaaucuucucucugcguguagguaggccugugccgcaaacaagcuuaccaugggccagaucauuaccuucuuucaagaggugccccacgucaucgaagagguuaugaacauugugcugaucgcccucagccugcuugcuauucugaaggggaucuacaauguggccacaugcggacucuucggccuggucuccuuucuucugcucugugggagaucuugcagcacgaccuauaaaggaguguacgaacugcagacacuggagcucgacauggcgucccugaacaugaccaugccucuuucuuguacaaagaauaacagccaucacuauaucaugguuggcaaugaaaccgggcuggagcucacacugaccaacacguccauuaucaaucauaaauucugcaaccuuucugaugcucacaagaaaaaucuguacgaccaugcccucaugagcauuaucuccaccuuucaccugagcauuccgaacuucaaucaguaugaggccaugucuugugauuuuaacggaggcaagaucuccgugcaguacaaucugagccacgcuuaugccgucgacgcugccaaccauugcggcacaauugcgaauggggugcuccaaaccuucaugcggauggccuggggaggcucuuacaucgcucuggauuccgggaagggaagcugggacuguaucaugacaucuuaccaguaucuuauuauccagaacaccacgugggaagaucacugccaguuuucccgccccagcccuauuggcuaccuggggcuccugucccaaagaacacgggacaucuauauuucucgcagacuucugggaaccuucacauggacccucagcgauuccgagggcaacgaaacccccggcggguacugucugacacgguggaugcugaucgaggccgagcucaaaugcuuuggaaauacggcuguugccaaguguaacgaaaaacaugacgaggaguucugcgauaugcugcgccuuuuugacuucaauaagcaggcgaucagacggcugaaaaccgaagcccagaugagcauucagcucaucaacaaggcugugaaugcccugauuaacgaucaacuuaucaugaagaaucaucugcgcgacauuaugggcaucccuuauugcaacuacucuaaauauuguuaccucaaucacacagucaccgggaagacaucccugcccagaugcugucuggugagcaacggaucuuaccucaaugaaacccacuucagcgacgauaucgagcagcaggcugacaacaugauuacggagcugcuucaaaaagaauauauggaucggcagggcaagacaccucuggggcucguggaccuguuugucuucuccaccucuuuuuaccugaucagcauuuuccuucaccucaucaaaauuccgacccaucgccacaucacaggaaagcccugcccuaaaccccauagacugaaucacaugggcauuuguuccugcggccuguauaagcacccugggguucccgugaaguggaaacggugaggacuagucccuguucccagagcccacuuuuuuuucuuuuuuugaaauaaaauagccugucuuucagaucucaaaggcucuuuucagagccaccaaaaaaaaaaaaaaaaaaaaaaaaaaaaaaaaaaaaaaaaaaaaaaaaaaaaaaaaaaaaaaaaagaauu

SEQ ID NO: 38862 - RNA, 1733 nt, Artificial Sequence
  mRNA product Design a-2 (hSL-A64-N5) comprising derived and/or modified sequence from LASV(ISTH2010-NIG-2012;Clade II)__AIT17482__GPCmut11 (opt5)
aggagaguccgcucagccagguugcagaagcggcuuagcguguguccuaaucuucucucugcguguagguaggccugugccgcaaacaagcuuaccaugggccagaucauuaccuucuuucaagaggugccccacgucaucgaagagguuaugaacauugugcugaucgcccucagccugcuugcuauucugaaggggaucuacaauguggccacaugcggacucuucggccuggucuccuuucuucugcucugugggagaucuugcagcacgaccuauaaaggaguguacgaacugcagacacuggagcucgacauggcgucccugaacaugaccaugccucuuucuuguacaaagaauaacagccaucacuauaucaugguuggcaaugaaaccgggcuggagcucacacugaccaacacguccauuaucaaucauaaauucugcaaccuuucugaugcucacaagaaaaaucuguacgaccaugcccucaugagcauuaucuccaccuuucaccugagcauuccgaacuucaaucaguaugaggccaugucuugugauuuuaacggaggcaagaucuccgugcaguacaaucugagccacgcuuaugccgucgacgcugccaaccauugcggcacaauugcgaauggggugcuccaaaccuucaugcggauggccuggggaggcucuuacaucgcucuggauuccgggaagggaagcugggacuguaucaugacaucuuaccaguaucuuauuauccagaacauuaccugggaagaucacugccaguuuucccgccccagcccuaucggcuaccuggggcuccugucccaaagaacgcgggacauuuauaucucucgcagacuucugggaacauucaccuggacacucagcgauuccgagggcaacgaaacccccggcggguacugucugacccgguggaugcugaucgaggccgagcucaaaugcuuuggaaauacagcuguugccaaguguaacgaaaaacaugacgaggaguucugcgauaugcugcgccuuuuugacuucaauaagcaggcgauuagacggcugaaaacggaagcccagaugagcauccagcucauuaacaaggcugugaaugcccugaucaacgaucaacuuauuaugaagaaucaucugcgcgacaucaugggcaucccuuauugcaacuacucuaaauauuguuaccucaaucacaccgucacagggaagaccucccugcccagaugcugucuggugagcaacggaucuuaccucaaugaaacacacuucagcgacgauauugagcagcaggcugacaacaugaucaccgagcugcuucaaaaagaauauauugaucggcagggcaagacgccucuggggcucguggaccuguuugucuucuccacaucuuuuuaccugaucagcauuuuccuucaccucguuaaaaucccgacccaucgccacguggugggaaagcccugcccuaaaccccauagacugaaucacaugggcauuuguuccugcggccuguauaagcacccugggguccccgugaaguggaaacggugaggacuagucccuguucccagagcccacuuuuuuuucuuuuuuugaaauaaaauagccugucuuucagaucucaaaggcucuuuucagagccaccaaaaaaaaaaaaaaaaaaaaaaaaaaaaaaaaaaaaaaaaaaaaaaaaaaaaaaaaaaaaaaaaagaauu

SEQ ID NO: 38863 - RNA, 1733 nt, Artificial Sequence
  mRNA product Design a-2 (hSL-A64-N5) comprising derived and/or modified sequence from LASV(Lassa virus/H.sapiens-wt/NGA/2015/ISTH_0543;Clade II)__AVO03639__GPCmut11 (opt5)
aggagaguccgcucagccagguugcagaagcggcuuagcguguguccuaaucuucucucugcguguagguaggccugugccgcaaacaagcuuaccaugggccagaucauuaccuucuuucaagaggugccccacgucaucgaagagguuaugaacauugugcugaucgcccucagccugcuugcuauucugaaggggaucuacaauguggccacaugcggacucuucggccuggucuccuuucuucugcucugugggagaucuugcagcacgaccuauaaaggaguguacgaacugcagacacuggagcucgacauggcgaaccugaauaugaccaugccucuuuccuguacaaagaacaauucucaucacuauaucaugguuggcaacgaaaccgggcuggagcucacacugaccaauacgagcauuaucaaccauaaauucugcaaucuuuccgaugcucacaagaaaaaccuguacgaccaugcccucaugucuauuaucagcaccuuucaccuguccauuccgaauuucaaccaguaugaggccaugagcugugauuuuaauggaggcaagaucucugugcaguacaaccugucccacacauaugcugucgacgccgcuaaucauugcggcaccauugccaacggggugcuccaaacauucaugcggauggcguggggaggcagcuacaucgcccuggauucugggaagggauccugggacuguaucaugaccagcuaccaguaucuuguuauucagaacacgacaugggaagaucacugccaguuuucucgccccuccccuaucggcuaccuggggcuccugagccaaagaacccgggacauuuauaucucccgcagacuucugggaacauucaccuggacccucucugauagcgagggcaaugaaacacccggcggguacugucugacgcgguggaugcugauugaggcugagcucaaaugcuuuggaaacaccgccguggcuaaguguaaugaaaaacaugacgaggaguucugcgauaugcugcgccuuuuugacuucaacaagcaggccaucagacggcugaaaacagaagcgcagauguccauccagcucauuaauaaggccgucaacgcucugaucaaugaucaacuuauuaugaagaaccaucugcgcgacaucaugggcauuccuuauugcaauuacagcaaauauuguuaccucaaccacaccgugacagggaagaccucucugcccagaugcugucugguguccaauggaagcuaccucaacgaaacgcacuucucugacgauaucgagcagcaggccgacaauaugaucacagagcugcuucaaaaagaauauauugaucggcagggcaagaccccucuggggcucgucgaccuguuuguuuucagcaccuccuuuuaccugaucucuauuuuccuucaccucgugaaaaucccgacacaucgccacauuaccggaaagcccugcccuaaaccccauagacugaaccacaugggcaucuguagcugcggccuguauaagcacccuggggugcccgucaaguggaaacggugaggacuagucccuguucccagagcccacuuuuuuuucuuuuuuugaaauaaaauagccugucuuucagaucucaaaggcucuuuucagagccaccaaaaaaaaaaaaaaaaaaaaaaaaaaaaaaaaaaaaaaaaaaaaaaaaaaaaaaaaaaaaaaaaagaauu

SEQ ID NO: 38864 - RNA, 1733 nt, Artificial Sequence
  mRNA product Design a-2 (hSL-A64-N5) comprising derived and/or modified sequence from LASV(Lassa virus/H.sapiens-wt/NGA/2016/ISTH_0009;Clade II)__AVO03571__GPCmut11 (opt5)
aggagaguccgcucagccagguugcagaagcggcuuagcguguguccuaaucuucucucugcguguagguaggccugugccgcaaacaagcuuaccaugggccagaucauuaccuucuuucaagaggugccccacgucaucgaagagguuaugaacauugugcugaucgcccucagccugcuugcuauucugaaggggaucuacaauguggccacaugcggacuccugggccuugucuccuuccugcuccugugugggagaucuugcagcacgaccuauaaaggaguguacgaacugcagacacucgagcuggacauggcgucccuuaacaugaccaugccucugucuuguacaaagaauaacagccaucacuauaucaugguuggcaaugaaaccgggcucgagcugacacuuaccaacacguccauuaucaaucauaaauuuugcaaccugucugaugcucacaagaaaaaucucuacgaccaugcccugaugagcauuaucuccaccuuccaccugagcauuccgaacuuuaaucaguaugaggccaugucuugugauuucaacggaggccggaucuccgugcaguacaaucucagccacucuuaugcugucgacgccgcuaaccauugcggcacaauugccaauggggugcugcaaaccuuuaugcgcauggcguggggaggcuccuacaucgcccuugauagcgggaagggaucuugggacuguaucaugacauccuaccaguaucugauuauccagaacaccacgugggaagaucacugccaguucagcagacccuccccuauuggcuaccucgggcugcuuucucaacggacacgcgacaucuauauuagcagacggcugcucggaaccuuuacauggacccuguccgauagcgagggcaacgaaacccccggcggguacugucugacacgcuggaugcucaucgaggcugagcugaagugcuucggaaauacggccguugcuaaauguaacgaaaagcaugacgaggaauuuugcgauaugcuuagacuguucgacuuuaauaaacaggccauccggcgccucaagaccgaggcgcagaugucuauucagcugaucaacaaagccgugaaugcucuuauuaacgaucaacugaucaugaagaaucaccucagagacauuaugggcaucccuuauugcaacuacuccaaguauuguuaccugaaucacacagucaccgggaaaacaagccugccccggugcugucucgugucuaacggaagcuaccugaaugaaacccauuucuccgacgauaucgagcagcaggccgacaacaugauuacggagcuucugcaaaaggaauauaucgaucgccagggcaaaacaccucucgggcugguggaccuguucgucuuuucuaccagcuucuaccuuauuuccaucuuucuccaccugguuaagauuccgacccauagacacaucacaggaaaacccugcccuaagccccaucggcugaaucacaugggcauuuguagcugcggccucuauaaccacccuggggugcccgugaaauggaagcgcugaggacuagucccuguucccagagcccacuuuuuuuucuuuuuuugaaauaaaauagccugucuuucagaucucaaaggcucuuuucagagccaccaaaaaaaaaaaaaaaaaaaaaaaaaaaaaaaaaaaaaaaaaaaaaaaaaaaaaaaaaaaaaaaaagaauu

SEQ ID NO: 38865 - RNA, 1733 nt, Artificial Sequence
  mRNA product Design a-2 (hSL-A64-N5) comprising derived and/or modified sequence from LASV(Lassa virus/H.sapiens-wt/NGA/2016/ISTH_0017;Clade II)__AVO03567__GPCmut11 (opt5)
aggagaguccgcucagccagguugcagaagcggcuuagcguguguccuaaucuucucucugcguguagguaggccugugccgcaaacaagcuuaccaugggccagaucauuaccuucuuucaagaggugccccacgucaucgaagagguuaugaacauugugcugaucgcccucagccugcuugcuauucugaaggggaucuacaauguggccacaugcggacucuucggccuggucuccuuucuucugcucugugggagaucuugcagcacgaccuauaaaggaguguacgaacugcagacacuggagcucgacauggcgucccugaacaugaccaugccucuuucuuguacaaagaauaacagccaucacuauaucaugguuggcaaugaaaccgggcuggagcucacacugaccaacacguccauuaucaaucauaaauucugcaaccuuucugaugcucacaagaaaaaucuguacgaccaugcccucaugagcauuaucuccaccuuucaccugagcauuccgaacuucaaucaguaugaggccaugucuugugauuuuaacggaggcaagaucuccgugcaguacaaucugagccacacauaugcuauugacgccgcuaaccauugcggcaccaucgccaaugggguccuccaaacauucaugcggauggcguggggaggcucuuacaucgcccuggauuccgggaagggaagcugggacuguauuaugaccucuuaccaguaucuuaucauucagaacacgacaugggaagaucacugccaguuuucccgccccagcccuaucggcuaccuggggcuccugucccaaagaacccgggacauuuauaucucucgcagacuucugggaacauucaccuggacccucagcgauuccgagggcaacgaaacacccggcggguacugucugacgcgguggaugcugaucgaggcugagcucaaaugcuuuggaaauaccgccguggcuaaguguaacgaaaaacaugacgaggaguucugcgauaugcugcgccuuuuugacuucaauaagcaggccauuagacggcugaaaacagaagcgcagaugagcauccagcucauuaacaaggccguuaaugcucugaucaacgaucaacuuauuaugaagaaucaucugcgcgacaucaugggcaucccuuauugcaacuacucuaaauauuguuaccucaaucacaccgugacagggaagaccucccugcccagaugcugucuggucagcaacggaucuuaccucaaugaaacgcacuucagcgacgauauugagcagcaggccgacaacaugaucacagagcugcuucaaaaagaauauauggaucggcagggcaagaccccucuggggcucguggaccuguuuguguucuccaccucuuuuuaccugauuagcaucuuccuucaccucguccgcauuccgacacauagacacguuaucggaaaacccugcccuaagccccaucggcugaaucacaugggcauuuguuccugcggccuguauaaacacccuggggugcccgugaaguggaagcgcugaggacuagucccuguucccagagcccacuuuuuuuucuuuuuuugaaauaaaauagccugucuuucagaucucaaaggcucuuuucagagccaccaaaaaaaaaaaaaaaaaaaaaaaaaaaaaaaaaaaaaaaaaaaaaaaaaaaaaaaaaaaaaaaaagaauu

SEQ ID NO: 38866 - RNA, 1733 nt, Artificial Sequence
  mRNA product Design a-2 (hSL-A64-N5) comprising derived and/or modified sequence from LASV(Lassa virus/H.sapiens-wt/NGA/2018/ISTH_0959;Clade II)__AVV65099__GPCmut11 (opt5)
aggagaguccgcucagccagguugcagaagcggcuuagcguguguccuaaucuucucucugcguguagguaggccugugccgcaaacaagcuuaccaugggccagaucauuaccuucuuucaagaggugccccacgucaucgaagagguuaugaacauugugcugaucgcccucagccugcuugcuauucugaaggggaucuacaauguggucacaugcggacucuucggccugguguccuuucuucugcucugugggagaucuugcagcacgaccuauaaaggaguuuacgaacugcagacacuggagcucgacauggccucccugaacaugaccaugccucuuucuuguacaaagaauaacagccaucacuauaucauggugggcaaugaaaccgggcuggagcucacacugaccaacacguccauuaucaaucauaaauucugcaaccuuucugaugcgcacaagaaaaaucuguacgaccaugcucucaugagcauuaucuccaccuuucaccugagcauuccgaacuucaaucaguaugaggccaugucuugugauuuuaacggaggcaagaucuccguccaguacaaucugagccacgccuaugcuauugacgccgcuaaccauugcggcacaaucgccaauggggugcuccaaaccuucaugcggauggcguggggaggcucuuacaucgcccuggauuccgggaagggaagcugggacuguauuaugacaucuuaccaguaucuuaucauucagaacaccacgugggaagaucacugccaguuuucccgccccagcccuaucggcuaccuggggcuccugucccaaagaacacgggacauuuauaucucucgcagacuucugggaaccuucacauggacccucagcgauuccgagggcaacgaaacccccggcggguacugucugacacgguggaugcugaucgaggcugagcucaaaugcuuuggaaauacggccguugcuaaguguaacgaaaaacaugacgaggaguucugcgauaugcugcgccuuuuugacuucaauaagcaggccauuagacggcugaaaaccgaagcgcagaugagcauccagcucauuaacaaggccgugaaugcucugaucaacgaucaacuuauuaugaagaaucaucugcgcgacaucaugggcaucccuuauugcaacuacucuaaauauuguuaccucaaucacacagucaccgggaagacaucccugcccagaugcugucuggugagcaacggaucuuaccucaaugaaacccacuucagcgacgauauugagcagcaggccgacaacaugaucacggagcugcuucaaaaagaauauauugaucggcagggcaagacaccucuggggcucguggaccuguuugucuucuccaccucuuuuuaccugaucagcauuuuccuucaccucguuaaaaucccgacccaucgccacgugauuggaaagcccugcccuaaaccccauagacugaaucacaugggcaucuguuccugcggccuguauaagcacccuggggugcccgucaaguggaaacggugaggacuagucccuguucccagagcccacuuuuuuuucuuuuuuugaaauaaaauagccugucuuucagaucucaaaggcucuuuucagagccaccaaaaaaaaaaaaaaaaaaaaaaaaaaaaaaaaaaaaaaaaaaaaaaaaaaaaaaaaaaaaaaaaagaauu

SEQ ID NO: 38867 - RNA, 1733 nt, Artificial Sequence
  mRNA product Design a-2 (hSL-A64-N5) comprising derived and/or modified sequence from LASV(LASV003-NIG-2008;Clade II)__AIT17580__GPCmut11 (opt5)
aggagaguccgcucagccagguugcagaagcggcuuagcguguguccuaaucuucucucugcguguagguaggccugugccgcaaacaagcuuaccaugggccagaucauuaccuucuuucaagaggugccccacgucaucgaagagguuaugaacauugugcugaucgcccucagccugcuugcuauucugaaggggaucuacaauguggccacaugcggacucuucggccuggucuccuuucuucugcucugugggagaucuugcagcacgaccuauaaaggaguguacgaacugcagacacuggagcucgacauggcgucccugaacaugaccaugccucuuucuuguacaaagaauaacagccaucacuauaucaugguuggcaaugaaaccgggcuggagcucacacugaccaacacguccauuaucaaucauaaauucugcaaccuuucugaugcucacaagaaaaaucuguacgaccaugcccucaugagcauuaucuccaccuuucaccugagcauuccgaacuucaaucaguaugaggccaugucuugugauuuuaacggaggcaagaucuccgugcaguacaaucugagccacacauaugcugucgacgccgcuaaccauugcggcaccauugccaauggggugcuccaaacauucaugcggauggcguggggaggcucuuacaucgcccuggauuccgggaagggaagcugggacuguaucaugaccucuuaccaguaucuuauuauccagaacacgacaugggaagaucacugccaguuuucccgccccagcccuauuggcuaccuggggcuccugucccaaagaacccgggacaucuauauuucucgcagacuucugggaacauucaccuggacccucagcgauuccgagagcaacgaaacacccggcggcuacugucugacgcgguggaugcugaucgaggcugagcucaaaugcuuugggaauaccgccguugcuaaguguaacgaaaaacaugacgaggaguucugcgauaugcugcgccuuuuugacuucaauaagcaggccaucagacggcugaaagcggaagcccagaugucuauucagcucaucaacaaggcugugaaugcccugauuaacgaucaacuuaucaugaagaaucaucugcgcgacauuaugggaaucccuuauugcaacuacuccaaauauuguuaccucaaucacacagucaccggcagaacaagccugccccggugcugucuggugucuaacgggagcuaccucaaugaaacccacuucuccgacgauaucgagcagcaggcugacaacaugauuacggagcugcuucaaaaggaauauauggaucgccagggaaaaacaccucugggccucguggaccuguuugucuucucuaccagcuuuuaccugaucuccauuuuccuucaccucguuaagaucccgacccauagacacgugauugggaaacccugcccuaagccccaucggcugaaucacaugggaaucuguagcugcggccuguauaaacacccuggcgugcccgucaaguggaagcgcugaggacuagucccuguucccagagcccacuuuuuuuucuuuuuuugaaauaaaauagccugucuuucagaucucaaaggcucuuuucagagccaccaaaaaaaaaaaaaaaaaaaaaaaaaaaaaaaaaaaaaaaaaaaaaaaaaaaaaaaaaaaaaaaaagaauu

SEQ ID NO: 38868 - RNA, 1733 nt, Artificial Sequence
  mRNA product Design a-2 (hSL-A64-N5) comprising derived and/or modified sequence from LASV(LASV035-NIG-2009;Clade II)__AIT17588__GPCmut11 (opt5)
aggagaguccgcucagccagguugcagaagcggcuuagcguguguccuaaucuucucucugcguguagguaggccugugccgcaaacaagcuuaccaugggccagaucauuaccuucuuucaagaggugccccacgucaucgaagagguuaugaacauugugcugaucgcccucagccugcuugcuauucugaaggggaucuacaauguggccacaugcggacucuucggccuggucuccuuucuucugcucugugggagaucuugcagcacgaccuauaaaggaguguacgaacugcagacacuggagcucgacauggcgucccugaacaugaccaugccucuuucuuguacaaagaauaacagccaucacuauaucaugguuggcaaugaaaccgggcuggagcucacacugaccaacacguccauuaucaaucauaaauucugcaaccuuucugaugcucacaagaaaaaucuguacgaccaugcccucaugagcauuaucuccaccuuucaccugagcauuccgaacuucaaucaguaugaggccaugucuugugauuuuaacggaggcaagaucuccgugcaguacaaucugagccacgcuuaugccgucgacgcugccaaccauugcggcacaauugcgaauggggugcuccaaaccuucaugcggauggccuggggaggcucuuacaucgcucuggauuccgggaagggaagcugggacuguaucaugacaucuuaccaguaucuuauuauccagaacaccacgugggaagaucacugccaguuuucccgccccagcccuauuggcuaccuggggcuccugucccaaagaacacgggacaucuauauuucucgcagacuucugggaaccuucacauggacccucagcgauuccgagggcaacgaaacccccggcggguacugucugacacgguggaugcugaucgaggccgagcucaaaugcuuuggaaauacggcuguugccaaguguaacgaaaaacaugacgaggaguucugcgauaugcugcgccuuuuugacuucaauaagcaggcgaucagacggcugaaagccgaagcucagaugagcauucagcucaucaacaaggccgugaaugcucugauuaacgaucaacuuaucaugaagaaucaucugcgcgacauuaugggcaucccuuauugcaacuacucuaaauauuguuaccucaaucacaccgucacagggaagaccucccugcccagaugcugucuggugagcaacggaucuuaccucaaugaaacacacuucagcgacgauaucgagcagcaggccgacaacaugauuaccgagcugcuucaaaaagaauauaucgaucggcagggcaagacgccucuggggcucguggaccuguuugucuucuccacaucuuuuuaccugauuagcaucuuccuucaccucguuaaaauuccgacccaucgccacgugaucggaaagcccugcccuaaaccccauagacugaaucacaugggcauuuguuccugcggccuguauaagcacccuggggugcccgucaaguggaaacggugaggacuagucccuguucccagagcccacuuuuuuuucuuuuuuugaaauaaaauagccugucuuucagaucucaaaggcucuuuucagagccaccaaaaaaaaaaaaaaaaaaaaaaaaaaaaaaaaaaaaaaaaaaaaaaaaaaaaaaaaaaaaaaaaagaauu

SEQ ID NO: 38869 - RNA, 1733 nt, Artificial Sequence
  mRNA product Design a-2 (hSL-A64-N5) comprising derived and/or modified sequence from LASV(LASV1000-NIG-2009;Clade II)__AIT17782__GPCmut11 (opt5)
aggagaguccgcucagccagguugcagaagcggcuuagcguguguccuaaucuucucucugcguguagguaggccugugccgcaaacaagcuuaccaugggccagaucauuaccuucuuucaagaggugccccacgucaucgaagagguuaugaacauugugcugaucgcccucagccugcuugcuauucugaaggggaucuacaauguggccacaugcggacucuucggccuggucuccuuucuucugcucugugggagaucuugcagcacgaccuauaaaggaguguacgaacugcagacacuggagcucgacauggcgucccugaacaugaccaugccucuuucuuguacaaagaauaacagccaucacuauaucaugguuggcaaugaaaccgggcuggagcucacacugaccaacacguccauuaucaaucauaaauucugcaaccuuucugaugcucacaagaaaaaucuguacgaccaugcccucaugagcauuaucuccaccuuucaccugagcauuccgaacuucaaucaguaugaggccaugucuugugauuuuaacggaggcaagaucuccgugcaguacaaucugagccacacauaugcugucgacgccgcuaaccauugcggcaccauugccaauggggugcuccaaacauucaugcggauggcguggggaggcucuuacaucgcccuggauuccgggaagggaagcugggacuguaucaugaccucuuaccaguaucuuauuauccagaacacgacaugggaagaucacugccaguuuucccgccccagcccuauuggcuaccuggggcuccugucccaaagaacccgggacaucuauauuucucgcagacuucugggaacauucaccuggacccucagcgauuccgagggcaacgaaacacccggcggguacugucugacgcgguggaugcugaucgaggcugagcucaaaugcuuuggaaauaccgccguugcuaaguguaacgaaaaacaugacgaggaguucugcgauaugcugcgccuuuuugacuucaauaagcaggccaucaaaagacugaagacagaagcgcagaugagcauucagcucaucaacaaggccgugaaugcucugauuaacgaucaacuuaucaugaaaaaucaucugcgggacauuaugggcaucccuuauugcaacuacucuaaguauuguuaccucaaucacaccgucacagggaaaaccucccugccccgcugcugucuggugagcaacggaucuuaccucaaugaaacgcacuucagcgacgauaucgagcagcaggccgacaacaugauuacagagcugcuucaaaaggaauauaucgauagacagggcaaaaccccucuggggcucguggaccuguuugucuucuccaccucuuuuuaccugauuagcaucuuccuucaccucguuaagauuccgacacaucggcacguggugggaaaacccugcccuaagccccaucgccugaaucacaugggcaucuguuccugcggccuguauaagcacccugggguccccgugaaauggaagagaugaggacuagucccuguucccagagcccacuuuuuuuucuuuuuuugaaauaaaauagccugucuuucagaucucaaaggcucuuuucagagccaccaaaaaaaaaaaaaaaaaaaaaaaaaaaaaaaaaaaaaaaaaaaaaaaaaaaaaaaaaaaaaaaaagaauu

SEQ ID NO: 38870 - RNA, 1733 nt, Artificial Sequence
  mRNA product Design a-2 (hSL-A64-N5) comprising derived and/or modified sequence from LASV(LASV221-NIG-2010;Clade II)__AIT17624__GPCmut11 (opt5)
aggagaguccgcucagccagguugcagaagcggcuuagcguguguccuaaucuucucucugcguguagguaggccugugccgcaaacaagcuuaccaugggccagaucauuaccuucuuucaagaggugccccacgucaucgaagagguuaugaacauugugcugaucgcccucagccugcuugcuauucugaaggggaucuacaauguggccacaugcggacucuucggccuggucuccuuucuucugcucugugggagaucuugcagcacgaccuauaaaggaguguacgaacugcagacacuggagcucgacauggcgucccugaacaugaccaugccucuuucuuguacaaagaauaacagccaucacuauaucaugguuggcaaugaaaccgggcuggagcucacacugaccaacacguccauuaucaaucauaaauucugcaaccuuucugaugcucacaagaaaaaucuguacgaccaugcccucaugagcauuaucuccaccuuucaccugagcauuccgaacuucaaucaguaugaggccaugucuugugauuuuaacggaggcaagaucuccgugcaguacaaucugagccacacauaugcuauugacgccgcuaaccauugcggcaccaucgccaaugggguccuccaaacauucaugcggauggcguggggaggcucuuacaucgcccuggauuccgggaagggaagcugggacuguauuaugaccucuuaccaguaucuuaucauucagaacacgacaugggaagaucacugccaguuuucccgccccagcccuaucggcuaccuggggcuccugucccaaagaacccgggacauuuauaucucucgcagacuucugggaacauucaccuggacccucagcgauuccgagggcaacgaaacacccggcggguacugucugacgcgguggaugcugaucgaggcugagcucaaaugcuuuggaaauaccgccguggcuaaguguaacgaaaaacaugacgaggaguucugcgauaugcugcgccuuuuugacuucaauaagcaggccauuagacggcugaaaacagaagcgcagaugagcauccagcucauuaacaaggccguuaaugcucugaucaacgaucaacuuauuaugaagaaucaucugcgcgacaucaugggcaucccuuauugcaacuacucuaaauauuguuaccucaaucacaccgugacagggaagaccucccugcccagaugcugucuggucagcaacggaucuuaccucaaugaaacgcacuucagcgacgauauugagcagcaggccgacaacaugaucacagagaugcugcaaaaagaauauauggaucggcagggcaagaccccucuugggcugguggaccucuuuguguucuccaccucuuuuuaccugauuagcaucuuccugcaccuugucaaaauuccgacacaucgccacguuaucggaaagcccugcccuaaaccccauagacucaaucacaugggcauuuguuccugcggccuguauaagcacccuggggugcccgugaaguggaaacggugaggacuagucccuguucccagagcccacuuuuuuuucuuuuuuugaaauaaaauagccugucuuucagaucucaaaggcucuuuucagagccaccaaaaaaaaaaaaaaaaaaaaaaaaaaaaaaaaaaaaaaaaaaaaaaaaaaaaaaaaaaaaaaaaagaauu

SEQ ID NO: 38871 - RNA, 1733 nt, Artificial Sequence
  mRNA product Design a-2 (hSL-A64-N5) comprising derived and/or modified sequence from LASV(LASV237-NIG-2010;Clade II)__AIT17638__GPCmut11 (opt5)
aggagaguccgcucagccagguugcagaagcggcuuagcguguguccuaaucuucucucugcguguagguaggccugugccgcaaacaagcuuaccaugggccagaucauuaccuucuuucaagaggugccccacgucaucgaagagguuaugaacauugugcugaucgcccucagccugcuugcuauucugaaggggaucuacaauguggccacaugcggacucuucggccuggucuccuuucuucugcucugugggagaucuugcagcacgaccuauaaaggaguguacgaacugcagacacuggagcucgacauggcgucccugaacaugaccaugccucuuucuuguacaaagaauaacagccaucacuauaucaugguuggcaaugaaaccgggcuggagcucacacugaccaacacguccauuaucaaucauaaauucugcaaccuuucugaugcucacaagaaagaccuguacgaucaugcccucaugagcauuaucuccaccuuucaccugagcauuccgaauuucaaccaguaugaggccaugucuugugacuuuaauggaggcaagaucuccgugcaguacaaccugagccacacauaugcugucgaugccgcuaaucauugcggcaccauugccaacggggugcuccaaacauucaugcggauggcguggggaggcucuuacaucgcccuggacuccgggaagggaagcugggauuguaucaugaccucuuaccaguaucuuauuauccagaauacgacaugggaagaccacugccaguuuucccgccccagcccuauuggcuaccuggggcuccugucccaaagaacccgggauaucuauauuucucgcagacuucugggaacauucaccuggacccucagcgacuccgagggcaacgaaacacccggcggguacugucugacgcgguggaugcugaucgaggcugagcucaaaugcuuuggaaacaccgccguugcuaaguguaaugaaaaacaugaugaggaguucugcgacaugcugcgccuuuuugauuucaacaagcaggccaucagacggcugaaaacagaagcgcagaugagcauucagcucaucaauaaggccgugaacgcucugauuaaugaccaacuuaucaugaagaaccaucugcgcgacauuaugggcaucccuuauugcaauuacucuaaauauuguuaccucaaccacaccgucacagggaagaccucccugcccagaugcugucuggugagcaauggaucuuaccucaacgaaacgcacuucagcgaugacaucgagcagcaggccgauaauaugauuacagagcugcuucaaaaagaauauauggaccggcagggcaagaccccucuggggcucguggaucuguuugucuucuccaccucuuuuuaccugaucagcauuuuccuucaccucaucaaaauuccgacacaucgccacaucaccggaaagcccugcccuaaaccccauagacugaaccacaugggcauuuguuccugcggccuguauaagcacccugggguucccgugaaguggaaacggugaggacuagucccuguucccagagcccacuuuuuuuucuuuuuuugaaauaaaauagccugucuuucagaucucaaaggcucuuuucagagccaccaaaaaaaaaaaaaaaaaaaaaaaaaaaaaaaaaaaaaaaaaaaaaaaaaaaaaaaaaaaaaaaaagaauu

SEQ ID NO: 38872 - RNA, 1733 nt, Artificial Sequence
  mRNA product Design a-2 (hSL-A64-N5) comprising derived and/or modified sequence from LASV(LASV253-NIG-2011;Clade II)__AIT17670__GPCmut11 (opt5)
aggagaguccgcucagccagguugcagaagcggcuuagcguguguccuaaucuucucucugcguguagguaggccugugccgcaaacaagcuuaccaugggccagaucauuaccuucuuucaagaggugccccacgucaucgaagagguuaugaacauugugcugaucgcccucagccugcuugcuauucugaaggggaucuacaauguggccacaugcggacucuucggccuggucuccuuucuucugcucugugggagaucuugcagcacgaccuauaaaggaguguacgaacugcagacacuggagcucgacauggcgucccugaacaugaccaugccucuuucuuguacaaagaauaacagccaucacuauaucaugguuggcaaugaaaccgggcuggagcucacacugaccaacacguccauuaucaaucauaaauucugcaaccuuucugaugcucacaagaaaaaucuguacgaccaugcccucaugagcauuaucuccaccuuucaccugagcauuccgaacuucaaucaguaugaggccaugucuugugauuuuaacggaggcaagaucuccgugcaguacaaucugagccacacauaugcugucgacgccgcuaaccauugcggcaccauugccaauggggugcuccaaacauucaugcggauggcguggggaggcucuuacaucgcccuggauuccgggaagggaagcugggacuguaucaugaccucuuaccaguaucuuauuauccagaacacgacaugggaagaucacugccaguuuucccgccccagcccuauuggcuaccuggggcuccugucccaaagaacccgggacaucuauauuucucgcagacuucugggaacauucaccuggacccucagcgauuccgagggcaacgaaacacccggcggguacugucugacgcgguggaugcugaucgaggcugagcucaaaugcuuuggaaauaccgccguugcuaaguguaacgaaaaacaugacgaggaguucugcgauaugcugcgccuuuuugacuucaauaagcaggccaucagacggcugaaagcggaagcccagaugagcauucagcucaucaacaaggcugugaaugcccugauuaacgaucaacuuaucaugaagaaucaucugcgcgacauuaugggcaucccuuauugcaacuacucuaaauauuguuaccucaaucacacagucaccgggagaacaucccugccccggugcugucuggugagcaacggaucuuaccucaaugaaacccacuucagcgacgauaucgagcagcaggcugacaacaugauuacggagcugcuucaaaaggaauauaucgaucgccagggcaaaacaccucuggggcucguggaccuguuugucuucuccaccucuuuuuaccugauuagcaucuuccuucaccucguuaagauuccgacccauagacacaucauuggaaaacccugcccuaagccccaucggcugaaucacaugggcaucuguuccugcggccuguauaaacacccuggggugcccgugaaguggaagcgcugaggacuagucccuguucccagagcccacuuuuuuuucuuuuuuugaaauaaaauagccugucuuucagaucucaaaggcucuuuucagagccaccaaaaaaaaaaaaaaaaaaaaaaaaaaaaaaaaaaaaaaaaaaaaaaaaaaaaaaaaaaaaaaaaagaauu

SEQ ID NO: 38873 - RNA, 1733 nt, Artificial Sequence
  mRNA product Design a-2 (hSL-A64-N5) comprising derived and/or modified sequence from LASV(LASV254-NIG-2011;Clade II)__AIT17674__GPCmut11 (opt5)
aggagaguccgcucagccagguugcagaagcggcuuagcguguguccuaaucuucucucugcguguagguaggccugugccgcaaacaagcuuaccaugggccagaucauuaccuucuuucaagaggugccccacgucaucgaagagguuaugaacauugugcugaucgcccucagccugcuugcuauucugaaggggaucuacaauguggccacaugcggacucuucggccuggucuccuuucuucugcucugugggagaucuugcagcacgaccuauaaaggaguguacgaacugcagacacuggagcucgacaugaccaaccugaauaugacaaugccucuuuccuguaccaagaacaauucucaucacuauaucaugguuggcaacgaaacagggcuggagcucacccugacgaauaccagcauuaucaaccauaaauucugcaaucuuuccgaugcgcacaagaaaaaccuguacaaucaugcucucaugucuauuaucagcacauuucaccuguccauuccgaacuucaaucaguaugaggccaugagcugugacuuuaacggaggcaagaucucugugcaguacaaucugucccacagcuaugccgucgaugcugccaaccauugcggcaccauugcuaacggggugcuccaaacauucaugcggauggccuggggaggcucuuacaucgcgcuggacuccgggaagggaaauugggauuguaucaugaccagcuaccaguaucuuauuauccagaacacgacaugggaagaccacugccaguuuucucgccccuccccuauuggcuaccuggggcuccugagccaaagaacccgggauaucuauauuucccgcagacuucugggaacauucaccuggacccucucugacagcgagggcaaugaaacacccggcggguacugucugacgcgguggaugcugaucgaggccgagcucaaaugcuuuggaaacaccgcuguugccaaguguaaugaaaaacaugaugaggaguucugcgacaugcugcgccuuuuugauuucaacaagcaggcuaucagacggcugaaaacagaagcccaggcgaauauucagcucaucaacaaggccgugaaugcucugauuaacgaccaacuuaucaugaagaaucaucugcgcgauauuaugggcaucccuuauugcaacuacuccaaauauuguuaccucaaucacaccgucacagggaagaccagccugcccagaugcugucuggugucuaacggauccuaccucaaugaaacgcacuucagcgacgacaucgagcagcaggccgauaacaugauuacagagcugcuucaaaaagaauauauggaccggcagggcaagaccccucuggggcucguggaucuguuugucuucucuaccagcuuuuaccugaucuccauuuuccuucaccucguuaaaaucccgacacaucgccacgugauuggaaagcccugcccuaaaccccauagacugaaccacaugggcaucuguucuugcggccuguauaagcacccuggggugcccgucaaguggaaacggugaggacuagucccuguucccagagcccacuuuuuuuucuuuuuuugaaauaaaauagccugucuuucagaucucaaaggcucuuuucagagccaccaaaaaaaaaaaaaaaaaaaaaaaaaaaaaaaaaaaaaaaaaaaaaaaaaaaaaaaaaaaaaaaaagaauu

SEQ ID NO: 38874 - RNA, 1733 nt, Artificial Sequence
  mRNA product Design a-2 (hSL-A64-N5) comprising derived and/or modified sequence from LASV(Nig08-A19;Clade III)__ADU56618__GPCmut11 (opt5)
aggagaguccgcucagccagguugcagaagcggcuuagcguguguccuaaucuucucucugcguguagguaggccugugccgcaaacaagcuuaccaugggccagaucgugaccuucuuucaagaggucccccacguuauugaagaggugaugaacaucgugcugauugcccucagcauccuggcuauucuuaaggggcuguacaauaucgccacaugcggacucaucggccuggucacguuccuucugcucuccgggagaucuuguagcaugaccuauaaaggaguguacgaacugcagacacuggagcucaacaugaauacccugaacaugacaaugccucuuuccugcaccaagaauaacucucaucacuauauuaugguuggcaaugaaacagggcuggagcucacccugacgaacaccagccuucugcaucacaaauuuuguaaucucuccgacgcgcauaagaaaaaccuguacgaucacacacugaugucuaucauuagcaccuuccaccucuccaucccgaauuuuaaccaguaugaggcuaugagcugcgacuucaauggaggcaagauuacagugcaguacaaccugucucauuccuaugccaucgaugccgcuaaucacuguggcaccgucgccaacggggugcuucaaacguuuaugcggauggcuuggggaggcagcuacauugcccuggacucugggcgcggaaagugggauugcaucaugacauccuaccaguaucucaucauucagaacaccacaugggaagaccauugucaguucagcagacccucuccuaucggcuaccuggggcuucugucccaacggacccgcgauauuuauaucagcagacggcuccugggaaccuuuacauggacgcuguccgacucugagggcaaugaaacccccggcggguacugccucacacgcuggaugcugauugaggcggagcuuaaauguuucggaaacaccgccguugcuaagugcaaugaaaaacacgaugaggaauuuugugacaugcugagacucuucgauuuuaacaagcaggccauccggcgccugaaagcugaggcccagaugagcauccagcuuauuaauaaggcggugaacgcccugaucaaugaccaacucauuaugaagaaccaccugagagauaucaugggcauuccuuauugcaauuacuccaaauauugcuaccugaaccauacaagcaccgggcggacgucucucccccgcuguugccuggucuccaauggaagcuaccuuaacgaaacacacuucucugacgacaucgagcagcaggcugauaauaugaucaccgagaugcugcaaaaggaauaucucgacagacagggcaaaaccccucuggggcugguggaucuuuucguguuuagcacauccuucuaccucauuucuaucuuucugcaucuggucaagauuccgacccaccggcauaucguuggaaaacccuguccuaagccccaccgccucaaccacaugggcauuugcagcuguggccuguauaaacagccuggggugcccgugagauggaagcggugaggacuagucccuguucccagagcccacuuuuuuuucuuuuuuugaaauaaaauagccugucuuucagaucucaaaggcucuuuucagagccaccaaaaaaaaaaaaaaaaaaaaaaaaaaaaaaaaaaaaaaaaaaaaaaaaaaaaaaaaaaaaaaaaagaauu

SEQ ID NO: 38875 - RNA, 1736 nt, Artificial Sequence
  mRNA product Design a-2 (hSL-A64-N5) comprising derived and/or modified sequence from LASV(G1180-SLE-2010;Clade IV)__AIT17168__GPCmut11 (opt5)
aggagaguccgcucagccagguugcagaagcggcuuagcguguguccuaaucuucucucugcguguagguaggccugugccgcaaacaagcuuaccaugggccagaucgugaccuucuuucaagaggucccccacguuauugaagaggugaugaacaucgugcugauugcccucagcauccuggcuguccuuaaggggcuguacaauuucgccacaugcggacucgugggccugcuuacguuucugcuccugugugggagauccugcaccgcgucucgguauaaaggaguuuacgaacugcagacacucgagcugaacauggaaacccuuaauaugacaaugccucugagcuguaccaagaacaauucccaucacuauauuauggugggcaacgagacagggcucgagcugacccuuacgaauaccucuaucaucaaccauaaauucugcaaucugagcgacgcucacaagaaaaaccucuacgaucaugcccugauguccauuaucucuacauuucaccugagcauuccgaauuucaaccaguaugaagccauguccugugacuuuaauggaggcaagaucagcguccaguacaaccucucucacuccuaugcuggcgaugccgcuaaucauugcgggaccguggccaacggaguucugcaaacauucaugcgcauggcguggggcgggagcuacauugcccuugacucuggacacggcuccugggauuguaucaugaccagcuaccaguaucugauuauccagaacacgacaugggaggaccauugccaguuuucuagacccuccccuaucggguaccucggacugcuuagccaacggacccgcgauauuuauaucuccagacggcugcucggcacauucaccuggacccugucugacagcgaaggcaaggauacacccgggggauacugucugacgcgcuggaugcucauugaggcugagcugaaaugcuuuggcaauaccgccguggcuaaguguaacgaaaaacacgacgaggaguucugcgauaugcuuagacuguuugacuucaauaagcaggccauccagcggcucaaagcggaagcccagauguccauucaacugaucaacaaggcugucaaugcccuuaucaacgaucagcugauuaugaagaaucaccuccgcgacaucauggggauuccuuauugcaacuacagcaaauauuguuaccugaaucauacaaccacaggaaagaccucucugcccaaaugcugucucguguccaacggcagcuaccugaaugaaacgcacuucucugacgauaucgagcagcaagcugacaacaugauuacagagaugcuucagaaggaauauauggagagacaggggaaaaccccucugggacucguggaucuguuugucuucagcaccuccuuuuaccugaucucuaucuuccuucaucucguuaagauuccgacacaccggcauaucgugggcaaaagcugccccaagccucaccgccugaaucacaugggcauuuguuccugcgggcuguauaagcagcccggagugccugucaaauggaagagaugaggacuagucccuguucccagagcccacuuuuuuuucuuuuuuugaaauaaaauagccugucuuucagaucucaaaggcucuuuucagagccaccaaaaaaaaaaaaaaaaaaaaaaaaaaaaaaaaaaaaaaaaaaaaaaaaaaaaaaaaaaaaaaaaagaauu

SEQ ID NO: 38876 - RNA, 1736 nt, Artificial Sequence
  mRNA product Design a-2 (hSL-A64-N5) comprising derived and/or modified sequence from LASV(G1442-SLE-2011;Clade IV)__AIT17180__GPCmut11 (opt5)
aggagaguccgcucagccagguugcagaagcggcuuagcguguguccuaaucuucucucugcguguagguaggccugugccgcaaacaagcuuaccaugggccagaucgugaccuucuuucaagaggucccccacguuauugaagaggugaugaacaucgugcugauugcccucagcauccuggcuguccuuaaggggcuguacaauguggccacaugcggacucauuggccugguuacguuccuucugcucugugggagauccugcaccacaacccuguauaaaggaguguacgaacugcagacacucgagcugaacauggaaacccuuaauaugacaaugccucugucuuguaccaagaacaauagccaucacuauauccgggucggcaacgagacggggcucgagcugacccuuacaaauaccuccaucauuaaccauaaauuuugcaaucugucugacgcgcacaagaaaaaccucuacgaucaugcucugaugagcaucauuuccacauuccaccugucuaucccgaauuuuaaccaguaugaagccaugagcugugacuucaauggaggcaagauuuccgugcaguacaaccucagccacucuuaugccggcgaugcugccaaucauugcgggaccguugcuaacggagugcugcaaacguuuaugcgcauggccuggggcggguccuacaucgcgcuugacagcggaagaggcaacugggauuguauuaugacaucuuaccaguaucugaucauccagaauaccacaugggacgaucacugccaguucucccggcccagcccuauuggguaccucggacugcuuucucaacgcaccagagacgucuauaucucccggcgccugcucggcaccuuuacauggacgcugagcgauuccgagggcaaggacacccccgggggauacugucugacaagauggaugcucauugaagccgagcugaaaugcuucggcaacaccgcuguggccaaguguaaugagaaacaugaugaagaguuuugcgacaugcuucggcuguucgauuuuaacaagcaggcuauccagcgccucaaagccgaagcgcagaugucuauucaacugaucaauaaggccgugaacgcucuuaucaaugaccagcugauuaugaagaaccaccucagagacaucauggggauuccuuauugcaauuacagcaaauauuguuaccugaacaauacagccaccggaaagacgucccugcccaaaugcugucucaucagcaacggcucuuaccugaaugagacacacuucuccgaugacauugaacaggaggcugauaacaugaucaccgagaugcuucaaaaggaauauauggagcggcaggggaaaaccccucugggacucgucgaccuguucguuuuuagcacaucuuucuaccugaucagcauuuuucuucaucucgugaagaucccgacccaccgccauauugugggcaaauccugccccaagccucacagacugaaucauaugggcaucuguucuugcgggcuguauaagcagcccggagucccugugcgguggaaacgcugaggacuagucccuguucccagagcccacuuuuuuuucuuuuuuugaaauaaaauagccugucuuucagaucucaaaggcucuuuucagagccaccaaaaaaaaaaaaaaaaaaaaaaaaaaaaaaaaaaaaaaaaaaaaaaaaaaaaaaaaaaaaaaaaagaauu

SEQ ID NO: 38877 - RNA, 1736 nt, Artificial Sequence
  mRNA product Design a-2 (hSL-A64-N5) comprising derived and/or modified sequence from LASV(G3010-SLE-2013;Clade IV)__AIT17344__GPCmut11 (opt5)
aggagaguccgcucagccagguugcagaagcggcuuagcguguguccuaaucuucucucugcguguagguaggccugugccgcaaacaagcuuaccaugggccagaucgugaccuucuuucaagaggucccccacguuauugaagaggugaugaacaucgugcugauugcccucagcauccuggcuguccuuaaggggcuguacaauuucgccacaugcggacucgugggccugguuacguuucuucugcucugugggagauccugcaccacaucucuguauaaaggaguguacgaacugcagacccucgagcugaacauggaaacacuuaauaugaccaugccucugagcuguacaaagaacaauucccaucacuauauuauggucggcaacgagaccgggcucgagcugacgcuuaccaauacaucuaucaucaaccauaaauucugcaaucugagcgacgcgcacaagaaaaaccucuacaaucaugcucugauguccauuaucucuaccuuucaccugagcauuccgaacuucaaucaguaugaagccauguccugugauuuuaacggaggcaagaucagcgugcaguacaaucucucucacuccuaugccggcgacgcugccagccauugcgggacaguugcuaacggagugcugcaaaccuucaugcggauggccuggggcgggucuuacauugcgcuugauuccggauacggcaagugggacuguaucaugacgagcuaucaguaccugauuauccagaacacaaccugggaggaucacugccaguuuucucgccccuccccuaucggguaucucggacugcuuagccaaagaacacgggacauuuacaucucccgcagacugcucggcaccuucaccuggacacugucugauagcgaaggcaaagacacgcccgggggauauugucugacccgguggaugcucauugaggccgagcugaagugcuuuggcaauacagcugucgccaaauguaacgaaaagcaugaugaggaguucugcgacaugcuucgccuguuugauuucaauaaacaggcuauccagagacucaagaccgaagcccagauguccauucaacugaucaacaaggcggugaaugcccuuaucaacgaccagcugauuaugaaaaaucaccuccgggauaucauggggauuccuuacugcaacuauagcaaguacuguuaccugaaucacacaaccacgggaaaaacaucucugcccaagugcugucucguguccaacggcagcuaucugaaugaaacccauuucucugacgacaucgagcagcaagcugauaacaugauuaccgagaugcuucagaaagaauacauggagcgccaggggaagacaccucugggacucgucgaccuguuuguuuucagcaccuccuuuuaucugaucucuaucuuccuucaccucgugaaaauuccgacacauagacacaucgugggcaagagcugccccaagccucaucggcugaaucacaugggcauuuguuccugcgggcuguacaaacagcccggagucccugugcgcuggaagagaugaggacuagucccuguucccagagcccacuuuuuuuucuuuuuuugaaauaaaauagccugucuuucagaucucaaaggcucuuuucagagccaccaaaaaaaaaaaaaaaaaaaaaaaaaaaaaaaaaaaaaaaaaaaaaaaaaaaaaaaaaaaaaaaaagaauu

SEQ ID NO: 38878 - RNA, 1736 nt, Artificial Sequence
  mRNA product Design a-2 (hSL-A64-N5) comprising derived and/or modified sequence from LASV(G502-SLE-2009;Clade IV)__AIT17126__GPCmut11 (opt5)
aggagaguccgcucagccagguugcagaagcggcuuagcguguguccuaaucuucucucugcguguagguaggccugugccgcaaacaagcuuaccaugggccagaucgugaccuucuuucaagaggucccccacguuauugaagaggugaugaacaucgugcugauugcccucagcauccuggcuguccuuaaggggcuguacaauuucgccacaugcggacucgugggccugcuuacguuucugcuccugugugggagauccugcaccacaggacuguauaaaggcguuuacgaacuccagacccuggagcuuaacauggaaacacugaauaugaccaugccucucucuuguacaaagaacaauagccaucacuauauuaugguggggaacgagaccggacuggagcuuacgcugaccaauacauccaucaucaaccauaaauucugcaaucucucugacgcgcacaagaaaaaccuguacgaucaugcucugaugagcauuaucuccaccuuucaccucucuauuccgaauuucaaccaguaugaagccaugagcugugacuuuaauggcggcaagaucuccguccaguacaaccugagccacucuuaugccggggaugcugccgaccauugcggaacaguggcuaauggcguucuucaaaccuucaugcggauggccuggggaggguccuacauugcgcuggauagcggccgcgggagaugggacuguaucaugacgucuuaccaguaucucauuauccagaacacaaccugggaggaucacugccaguuuucccggcccagcccuaucggauaccugggccuucugucucaacgcacaagagacauuuauaucucccggcgccuccugggcaccuucaccuggacacugagcgauuccgaagggaaggacacgcccggaggcuacugucucaccagauggaugcugauugaggccgagcuuaaaugcuuugggaacacagcuguggccaaguguaaugaaaaacaugaugaggaguucugcgacaugcugcggcucuuugauuucaacaagcaggcuauccagcgccugaaagccgaagcgcagaugucuauucaacuuaucaauaaggccgucaacgcucugaucaaugaccagcucgugaugaagaaccaccugagagacauuaugggaaucccuuauugcaauuacagccgguauuguuaccugaaccacaccacaaccggccgcacgucccuccccaaaugcugucuggugagcaaugggucuuaccuuaacgaaacacauuucuccgaugacauugagcagcaagccgauaauaugaucaccgagaugcugcagaaggaauauauggagagacagggaaaaaccccucucggccuggucgaccuguuuguuuucagcacaucuuuuuaccuuauuagcaucuuccuccaccuggugaagaucccgacccaucggcacauugugggcaaauccugccccaagccucaucgccugaaccacauggggaucuguucuugcggacucuauaaacagcccggcgucccugugaaguggaagagaugaggacuagucccuguucccagagcccacuuuuuuuucuuuuuuugaaauaaaauagccugucuuucagaucucaaaggcucuuuucagagccaccaaaaaaaaaaaaaaaaaaaaaaaaaaaaaaaaaaaaaaaaaaaaaaaaaaaaaaaaaaaaaaaaagaauu

SEQ ID NO: 38879 - RNA, 1736 nt, Artificial Sequence
  mRNA product Design a-2 (hSL-A64-N5) comprising derived and/or modified sequence from LASV(G733-SLE-2010;Clade IV)__AIT17154__GPCmut11 (opt5)
aggagaguccgcucagccagguugcagaagcggcuuagcguguguccuaaucuucucucugcguguagguaggccugugccgcaaacaagcuuaccaugggccagaucgugaccuucuuucaagaggucccccacguuauugaagaggugaugaacaucgugcugauugcccucagcauccuggcuguccuuaaggggcuguacaauuucgccacaugcggaauugugggccucguuuccuuucugcuucugugugggagaucuugcacgaccagccucuauaaaggaguguacgaacugcagacacuggagcucaacauggaaacccugaauaugacaaugccucuuuccuguaccaagaacaauucucaucacuauaucauggucggcaacgagacagggcuggagcucacccugacgaauaccagcaucauuaaccauaaauucugcaaucuuuccgacgcgcacaagaaaaaccuguacgaucaugcucucaugucuaucauuagcacauuucaccuguccaucccgaauuucaaccaguaugaagccaugagcugugacuuuaauggaggcaagauuucugugcaguacaaccugucccacagcuaugccggcgaugcugccaaucauugcgggaccaucgcuaacggaguucuccaaacauucaugcggauggccuggggcgggucuuacauugcgcuggacuccggacgcgauagaugggacuguaucaugaccagcuaccaguaucuuaucauucagaacacgacaugggaggaucacugccaguuuucucggcccuccccuaucggcuaccuggggcuccugagccaacgcaccagagacauuuauaucucccggcgccuucugggaacauucaccuggacccucucugauagcgaaggcaaggacacacccggcggguacugucugacgagauggaugcugauugaggccgagcucaaaugcuuuggaaauaccgcuguggccaaguguaacgaaaaacaugaugaggaguucugcgacaugcugcggcuuuuugauuucaauaagcaggcuauccagcgccugaaagccgaagcgcagauguccauccaacucauuaacaaggccgucaaugcucugaucaacgaccagcuuauuaugaagaaucaccugagagacaucaugggcauuccuuauugcaacuacagcaaauauuguuaccucaaucacacaaccacagggaagaccucucugcccaaaugcugucugguguccaacggaagcuaccucaaugaaacgcauuucucugaugacaucgagcagcaagccgauaacaugaucacagagaugcugcagaaggaauauauggagcggcagggcaaaaccccucuugggcugguggaccucuuugucuucagcaccuccuuuuaccugauuucuaucuuccugcaccuuguuaagauuccgacacaucgccacguggugggaaaaagcugccccaagccucauagacucaaucacaugggcaucuguuccugcggccuguaugggcagcccggagucccugugaaguggaaacggugaggacuagucccuguucccagagcccacuuuuuuuucuuuuuuugaaauaaaauagccugucuuucagaucucaaaggcucuuuucagagccaccaaaaaaaaaaaaaaaaaaaaaaaaaaaaaaaaaaaaaaaaaaaaaaaaaaaaaaaaaaaaaaaaagaauu

SEQ ID NO: 38880 - RNA, 1736 nt, Artificial Sequence
  mRNA product Design a-2 (hSL-A64-N5) comprising derived and/or modified sequence from MOPV/LASV reassortant(IGS-1;Clade IV)__AFY05576__GPCmut11 (opt5)
aggagaguccgcucagccagguugcagaagcggcuuagcguguguccuaaucuucucucugcguguagguaggccugugccgcaaacaagcuuaccaugggccagaucgugaccuucuuucaagaggucccccacguuauugaagaggugaugaacaucgugcugauugcccucagcguccuggcugugcuuaaggggcuguacaauuucgccacaugcggacucguuggccuggugacguuucuucugcucugugggagauccugcaccacaucucuguauaaaggagucuacgaacugcagacccucgagcugaacauggaaacacuuaauaugaccaugccucugagcuguacaaagaacaauucccaucacuauaucauggugggcaacgagaccgggcucgagcugacgcuuaccaauacaucuauuaucaaccauaaauucugcaaucugagcgacgcgcacaagaaaaaccucuacgaucaugcucugauguccaucauuucuaccuuucaccugagcaucccgaauuucaaccaguaugaagccauguccugugacuuuaauggaggcaagauuagcguucaguacaaccucucucacuccuaugccggcgaugcugccaaucauugcgggacaguggcuaacggaguccugcaaaccuucaugcggauggccuggggcgggagcuacaucgcgcuugacucuggacgcggcaacugggauuguauuaugacguccuaccaguaucugaucauucagaauacaaccugggaggaccacugccaguuuagcagacccucuccuaucggguaccucggacugcuuucccaacggacacgcgauaucuauauuagcagacggcugcucggcaccuucaccuggacacuguccgacucugaaggcgaggauacgcccgggggauacugucugacccgcuggaugcucaucgaggccgaacugaagugcuuuggcaacacagcuguggccaaauguaaugagaagcaugacgaagaguucugcgauaugcuuagacuguuugacuucaacaaacaggcuauucagcggcucaaggccgaagcgcagaugagcauccaacugauuaauaaagccgugaacgcucuuaucaaugaucagcugaucaugaagaaccaccuccgcgacauuauggggaucccuuauugcaauuacuccaaguauuguuaccugaaccacaccacaaccggaagaacgagccugcccaaaugcugucucgucucuaauggcuccuaccugaacgagacacauuucagcgacgauauugagcagcaagccgacaauaugaucaccgaaaugcuucagaaggaguauauggaacggcaggggaaaaccccucugggacucguugaucuguuuguguucucuaccagcuuuuaccugauuuccaucuuccuucaccucgugaagaucccgacacaucgccacauugucggcaaaucuugccccaagccucauagacugaaccacaugggcaucuguagcugcgggcuguauaaacagcccggagugccuguuaaguggaagcggugaggacuagucccuguucccagagcccacuuuuuuuucuuuuuuugaaauaaaauagccugucuuucagaucucaaaggcucuuuucagagccaccaaaaaaaaaaaaaaaaaaaaaaaaaaaaaaaaaaaaaaaaaaaaaaaaaaaaaaaaaaaaaaaaagaauu

SEQ ID NO: 38881 - RNA, 1736 nt, Artificial Sequence
  mRNA product Design a-2 (hSL-A64-N5) comprising derived and/or modified sequence from LASV(LM765-SLE-2012;Clade IV)__AIT17814__GPCmut11 (opt5)
aggagaguccgcucagccagguugcagaagcggcuuagcguguguccuaaucuucucucugcguguagguaggccugugccgcaaacaagcuuaccaugggccagaucgugaccuucuuucaagaggucccccacguuauugaagaggugaugaacaucgugcugauugcccucagcauccuggcuguccuuaaggggcuguacaauuucgccacaugcggacucgugggccugguuacguuucuucugcucugugggagauccugcaccacaucucuguauaaaggaguguacgaacugcagacccucgagcugaacauggaaacacuuaauaugaccaugccucugagcuguacaaagaacaauucccaucacuauauuauggucggcaacgagaccgggcucgagcugacgcuuaccaauacaucuaucaucgaccauaaauucugcaaccugagcgaugcgcaccggaagaaucucuacgaccaugcucugauguccauuaucucuaccuuucaccugagcauuccgaacuucaaucaguaugaagccauguccugugauuuuaacggaggcaaaaucagcgugcaguacaaucucucucacuccuaugccaaggacgcugccgaucauugcggcacaguugcuaacggggugcugcaaaccuucaugcgcauggccuggggaggcagcuacauugcgcuugacucugggagaggacggugggauuguaucaugacguccuaccaguaucugauuauccagaauacaaccugggaggaccacugccaguuuagccgccccucuccuaucggcuaccucgggcugcuuucccaaagaacacgggauauuuauaucagccgcagacugcucggaaccuucaccuggacacuguccgacucugaaggcaaggauacgcccggcggguacugucugacccgguggaugcucauugaggccgagcugaaaugcuuuggaaacacagcugucgccaaguguaacgaaaaacaugacgaggaguucugcgauaugcuucgccuguuugacuucaauaagcaggcuauccagagacucaaagccgaagcgcagaugagcauucaacugaucaacaaggccgugaaugcucuuaucaacgaccagcugauuaugaagaaucaccuccgggauaucaugggcauuccuuauugcaacuacuccaaauauuguuaccugaaucacaccacaaccgggaagacgagccugcccaaaugcugucucgugucuaacggauccuaccugaaugaaacacauuucagcgacgauaucgagcagcaagccgacaacaugauuaccgagaugcuucagaaggaauauauggagcgccagggcaaaaccccucuggggcucgucgaucuguuuguuuucucuaccagcuuuuaccugaucuccaucuuccuucaccucgugaagauuccgacacauagacacaucgugggaaaacccugcccuaagccccaucggcugaaucacaugggcauuuguucuugcggccuguauaagcagccugggguccccgugaaauggaagcgcugaggacuagucccuguucccagagcccacuuuuuuuucuuuuuuugaaauaaaauagccugucuuucagaucucaaaggcucuuuucagagccaccaaaaaaaaaaaaaaaaaaaaaaaaaaaaaaaaaaaaaaaaaaaaaaaaaaaaaaaaaaaaaaaaagaauu

SEQ ID NO: 38882 - RNA, 1736 nt, Artificial Sequence
  mRNA product Design a-2 (hSL-A64-N5) comprising derived and/or modified sequence from LASV(LM776-SLE-2012;Clade IV)__AIT17824__GPCmut11 (opt5)
aggagaguccgcucagccagguugcagaagcggcuuagcguguguccuaaucuucucucugcguguagguaggccugugccgcaaacaagcuuaccaugggccagaucgugaccuucuuucaagaggucccccacguuauugaagaggugaugaacaucgugcugauugcccucagcauccuggcuguccuuaaggggcuguacaauuucgccacaugcggacucgugggccugguuacguuucuucugcucugugggagauccugcaccacaucuguguauaaaggagucuacgaacugcagacccuggagcucaacauggaaacacugaauaugaccaugccucuuagcuguacaaagaacaauucccaucacuauauuauggugggcaacgagaccgggcuggagcucacgcugaccaauacaucuaucaucaaccauaaauucugcaaucuuagcgacgcgcacaagaaaaaccuguacgaucaugcucucauguccauuaucucuaccuuucaccugagcauuccgaauuucaaccaguaugaagccauguccugugacuuuaauggaggcaagaucagcguucaguacaaccugucucacuccuaugccggcgaugcugccaaucauugcgggacaguggcuaacggaguccuccaaaccuucaugcggauggccuggggcgggagcuacauugcgcuggacucuggacacggcaagugggauuguaucaugacguccuaccaguaucuuauuauccagaacacaaccugggaggaccauugccaguuuagccgccccucuccuaucggguaccugggacuccugucccaaagaacacgggauauuuauaucagccgcagacuucugggcaccuucaccuggacacucuccgacucugaaggcaaagauacgcccgggggauacugucugacccgguggaugcugauugaggccgagcucaagugcuuuggcaauacagcuguggccaaauguaacgaaaagcacgacgaggaguucugcgauaugcugcgccuuuuugacuucaauaaacaggcuauccagagacugaaggccgaagcgcagaugagcauucaacucaucaacaaggccgugaaugcucugaucaacgaucagcuuauuaugaaaaaucaucugcgggacaucauggggauuccuuauugcaacuacuccaaguauuguuaccucaaucacaccacaaccggaaaaacgagccugcccaagugcugucuggucucuaacggcuccuaccucaaugaaacacacuucagcgacgauaucgagcagcaagccgacaacaugauuaccgagaugcugcagaaagaauauauggagcgccaggggaagaccccucuuggacugguugaucucuuuguguucucuaccagcuuuuaccugaucuccaucuuccugcaucuugugaaaauuccgacacacagacauaucgucggcaagucuugccccaagccucaccggcucaaucacaugggcauuuguagcugcgggcuguauaaacagcccggagugccuguucgcuggaagagaugaggacuagucccuguucccagagcccacuuuuuuuucuuuuuuugaaauaaaauagccugucuuucagaucucaaaggcucuuuucagagccaccaaaaaaaaaaaaaaaaaaaaaaaaaaaaaaaaaaaaaaaaaaaaaaaaaaaaaaaaaaaaaaaaagaauu

SEQ ID NO: 38883 - RNA, 1736 nt, Artificial Sequence
  mRNA product Design a-2 (hSL-A64-N5) comprising derived and/or modified sequence from LASV(Mad39;Clade IV)__ANH09722__GPCmut11 (opt5)
aggagaguccgcucagccagguugcagaagcggcuuagcguguguccuaaucuucucucugcguguagguaggccugugccgcaaacaagcuuaccaugggccagaucgugaccuucuuucaagaggucccccacguuauugaagaggugaugaacaucgugcugauugcccucagcauccuggcuguccuuaaggggcuguacaauguggccacaugcggacucauuggccugguuacguuccuucugcucugugggagauccugcaccacaacccuguauaaaggaguguacgaacugcaggcgcucgagcugaacauggaaacacuuaauaugaccaugccucugucuuguacaaagaacaauagccaucacuauauccgggucggcaacgagaccgggcucgagcugacgcuuaccaauacaucccugaucaaccauaaauuuugcaaucucucugacgcucacaagaaaaaccuguacgaucaugcccugaugagcauuaucuccaccuuccaccucucuauuccgaauuuuaaccaguaugaagccaugagcugugacuucaaugauggaaagaucuccgugcaguacaaccugagccacacauaugcuggcgacaccgccaaucauugcggcacgguugcuaacggggugcuucaaacauuuaugcgcauggccuggggaggcucuuacauugcgcuggauuccgggagaggaggcugggacuguaucaugaccagcuaccaguaucucauuauccagaacacaaccugggaggaucacugccaguucucucggcccuccccuaucggguaccugggacuucugagccaacgcaccagagacauuuauaucucucggcgccuccugggcacauuuacguggacccuguccgauagcgaaggcaaggacacacccgggggauacugucucaccagauggaugcugauugaggccgagcuuaaaugcuucggcaauacagcugucgccaaguguaacgaaaaacaugaugaggaauuuugcgacaugcugcgccucuucgauuuuaauaagcaggcuauccagcggcugaaagccgaggcgcagauguccauucaacuuaucaacaaggccgugaaugcucugaucaacgaccagcucauuaugaagaaucaccugagagacaucauggggauuccuuauugcaacuacucuaaauauuguuaccugaaucacaccgugacgggaaagacaagccuccccaaaugcugucuggucuccaacggcagcuaccuuaaugaaacccauuucucugaugacaucgagcagcaagccgauaacaugauuaccgagaugcugcagaaggaauauauggagcggcaggggaaaacaccucucggacugguugaccuguucguguuuuccaccagcuucuaccuuaucucuaucuuucuccaccuggugaagauuccgacacaucgccacgucgugggcaaacccugcccuaagccccauagacugaaucacaugggcaucuguagcugcggguucuauaagcagccuggaguucccgugcgguggaaacgcugaggacuagucccuguucccagagcccacuuuuuuuucuuuuuuugaaauaaaauagccugucuuucagaucucaaaggcucuuuucagagccaccaaaaaaaaaaaaaaaaaaaaaaaaaaaaaaaaaaaaaaaaaaaaaaaaaaaaaaaaaaaaaaaaagaauu

SEQ ID NO: 38884 - RNA, 1736 nt, Artificial Sequence
  mRNA product Design a-2 (hSL-A64-N5) comprising derived and/or modified sequence from LASV(Z0947-SLE-2011;Clade IV)__AIT17840__GPCmut11 (opt5)
aggagaguccgcucagccagguugcagaagcggcuuagcguguguccuaaucuucucucugcguguagguaggccugugccgcaaacaagcuuaccaugggccagaucgugaccuucuuucaagaggucccccacguuauugaagaggugaugaacaucgugcugauugcccucagcauccuggcuguccuuaaggggcuguacaauuucgccacaugcggacucgugggccugguuacguuucuucugcucugugggagauccugcaccauuucucuguauaaaggaguguacgaacugcagacacucgagcugaacauggaaacccuuaauaugacaaugccucugagcuguaccaagaacaauucccaucacuauaucauggucggcaacgagacagggcucgagcugacccuuacgaauaccucuaucauuaaccauaaauucugcaaucugagcgacgcgcacaagaaaaaccucuacgaucaugcucugauguccaucauuucuacauuucaccugagcaucccgaauuucaaccaguaugaagccauguccugugacuuuaauggaggcaagauuagcgugcaguacaaccucucucacuccuaugccggcgaugcugccaaucauugcgggaccguugcuaacggagugcugcaaacauucaugcggauggccuggggcgggagcuacaucgcgcuugacucuggacgcgauagaugggacuguauuaugaccuccuaccaguaucugaucauccagaacacgacaugggaggaucacugccaguuuagccggcccucuccuauuggcuaccucgggcugcuuucccaacgcaccagagacaucuauauuagccggcgccugcucggaacauucaccuggacccuguccgauucugaaggcaaggacacacccggcggguacugucugacgagauggaugcucaucgaggccgagcugaaaugcuuuggaaauaccgcugucgccaaguguaacgaaaaacaugaugaggaguucugcgacaugcuucggcuguuugauuucaauaagcaggcuauucagcgccucaaagccgaagcgcagaugagcauccaacugaucaacaaggccgugaaugcucuuauuaacgaccagcugaucaugaagaaucaccucagagacauuaugggcaucccuuauugcaacuacuccaaauauuguuaccugaaucacacaaccacagggaagaccagccugcccaaaugcugucucgugucuaacggauccuaccugaaugaaacgcauuucagcgaugacauugagcagcaagccgauaacaugaucacagagaugcuucagaaggaauauauggagcggcagggcaaaaccccucuggggcucgucgaccuguuuguuuucucuaccagcuuuuaccugaucuccauuuuccuucaccucgugaagaucccgacacaucgccacauugugggaaaacccugcccuaagccccauagacugaaucacaugggcaucuguucuugcggccuguauaagcagccugggguccccgugaaauggaagcggugaggacuagucccuguucccagagcccacuuuuuuuucuuuuuuugaaauaaaauagccugucuuucagaucucaaaggcucuuuucagagccaccaaaaaaaaaaaaaaaaaaaaaaaaaaaaaaaaaaaaaaaaaaaaaaaaaaaaaaaaaaaaaaaaagaauu

SEQ ID NO: 38885 - RNA, 1767 nt, Artificial Sequence
  mRNA product Design a-2 (hSL-A100) comprising derived and/or modified sequence from LASV(Josiah;Clade IV)__NP_694870__GPCmut11 (opt1)
aggagaguccgcucagccagguugcagaagcggcuuagcguguguccuaaucuucucucugcguguagguaggccugugccgcaaacaagcuuaccaugggccagaucgugaccuucuuccaggaggucccccacgugaucgaggaggugaugaacaucguccugaucgcccucagcgugcuggccgugcugaaggggcucuacaacuucgcgaccugcggccuggucgggcuggugacguuccuccugcugugcggccgcuccugcaccaccagccucuacaaggggguguacgagcugcagacccuggagcucaacauggagacgcugaacaugaccaugccgcuguccugcaccaagaacaacagccaccacuacaucauggucggcaacgagaccggccucgagcugacgcugaccaacaccuccaucaucaaccacaaguucugcaaccucagcgacgcccacaagaagaaccuguacgaccacgcccugauguccaucaucagcaccuuccaccucuccauccccaacuucaaccaguacgaggccaugagcugcgacuucaacgggggcaagaucuccgugcaguacaaccugagccacuccuacgccggggacgcggccaaccacugcggcacgguggccaacgggguccugcagaccuucaugcggauggccuggggcggcagcuacaucgcgcucgacuccgggcgcggcaacugggacugcaucaugaccagcuaccaguaccugaucauccagaacaccacgugggaggaccacugccaguucucccggcccagccccaucggguaccugggccuccugucccagcgcacccgggacaucuacaucagccgccggcugcucggcaccuucaccuggacgcugagcgacuccgaggggaaggacaccccgggcggguacugccugacccgcuggaugcucaucgaggccgagcugaagugcuucggcaacaccgccguggccaagugcaacgagaagcacgacgaggaguucugcgacaugcugcggcuguucgacuucaacaagcaggccauccagcgccugaaggcggaggcccagaugagcauccagcugaucaacaaggccgugaacgcccucaucaacgaccagcugaucaugaagaaccaccuccgggacaucauggggauccccuacugcaacuacuccaaguacugcuaccucaaccacacgaccaccggccgcaccagccugcccaagugcugccuggucuccaacggcagcuaccucaacgagacgcacuucuccgacgacaucgagcagcaggccgacaacaugaucaccgagaugcugcagaaggaguacauggagcggcaggggaagacgccccugggccucguggaccuguucguguucagcaccuccuucuaccugaucagcaucuuccugcaccucgucaagaucccgacccaccgccacaucguggggaaguccugccccaagccccaccggcugaaccacaugggcaucugcagcugcgggcuguacaagcagcccggcgugccggucaaguggaagcgcugaggacuagucccuguucccagagcccacuuuuuuuucuuuuuuugaaauaaaauagccugucuuucagaucucaaaggcucuuuucagagccaccaaaaaaaaaaaaaaaaaaaaaaaaaaaaaaaaaaaaaaaaaaaaaaaaaaaaaaaaaaaaaaaaaaaaaaaaaaaaaaaaaaaaaaaaaaaaaaaaaaaaa

SEQ ID NO: 38886 - RNA, 1764 nt, Artificial Sequence
  mRNA product Design a-2 (hSL-A100) comprising derived and/or modified sequence from LASV(LP;Clade I)__AAF86701__GPCmut11 (opt1)
aggagaguccgcucagccagguugcagaagcggcuuagcguguguccuaaucuucucucugcguguagguaggccugugccgcaaacaagcuuaccaugggccagaucaucaccuucuuccaggaggugccccacgucaucgaggaggugaugaacaucgugcugaucgcccucagccugcuggccauccucaaggggcuguacaacaucgcgaccugcggcaucaucgggcuggucgccuuccucuuccugugcggcaaguccugcagccugacgcucaagggcggguacgagcugcagacccuggagcucaacauggagacccugaacaugaccaugccgcuguccugcacgaagaacagcucccaccacuacauccgcgugggcaacgagaccgggcucgagcugacccugaccaacacgagcaucaucaaccacaaguucugcaaccucuccgacgcccacaagaagaaccuguacgaccacgcccugaugagcaucaucuccaccuuccaccucagcauccccaacuucaaccaguacgaggccauguccugcgacuucaacggcgggaagaucagcgugcaguacaaccugucccacagcuacgcgggcgacgccgccgagcacugcgggaccgucgccaacggcgugcugcagaccuucaugcggauggcguggggcgggcgcuacaucgcccucgacuccggcaaggggaacugggacugcaucaugacgagcuaccaguaccugaucauccagaacaccaccugggaggaccacugccaguucucccggcccagccccaucggcuaccugggccuccugucccagcgcacccgggacaucuacaucagccgccggcugcucgggacguucaccuggacccugagcgacuccgagggcaacgagacccccgggggcuacugccugacgcgcuggaugcucaucgaggccgagcugaagugcuucgggaacaccgccguggccaagugcaacgagaagcacgacgaggaguucugcgacaugcugcggcuguucgacuucaacaagcaggcgauccgccggcugaaggccgaggcccagaugagcauccagcugaucaacaaggccgucaacgcccucaucaacgaccagcugaucaugaagaaccaccuccgcgacaucaugggcauccccuacugcaacuacuccaaguacugcuaccucaaccacaccagcuccggccggaccagccugcccaagugcugccugaucuccaacgggagcuaccucaacgagacgcaguucuccgacgacaucgagcagcaggcggacaacaugaucaccgagaugcugcagaaggaguacaucgagcgccagggcaagaccccgcuggggcucguggacaucuucaucuucagcaccuccuucuaccugaucagcaucuuccugcaccugaucaagaucccgacgcaccggcacaucgugggcaagcccugccccaagccccaccgccucaaccacaugggggucugcuccugcggccuguacaagcacccgggcgugcccaccaaguggaagcggugaggacuagucccuguucccagagcccacuuuuuuuucuuuuuuugaaauaaaauagccugucuuucagaucucaaaggcucuuuucagagccaccaaaaaaaaaaaaaaaaaaaaaaaaaaaaaaaaaaaaaaaaaaaaaaaaaaaaaaaaaaaaaaaaaaaaaaaaaaaaaaaaaaaaaaaaaaaaaaaaaaaaa

SEQ ID NO: 38887 - RNA, 1764 nt, Artificial Sequence
  mRNA product Design a-2 (hSL-A100) comprising derived and/or modified sequence from LASV(803213;Clade II)__AAF86703__GPCmut11 (opt1)
aggagaguccgcucagccagguugcagaagcggcuuagcguguguccuaaucuucucucugcguguagguaggccugugccgcaaacaagcuuaccaugggccagaucaucaccuucuuccaggaggugccccacgucaucgaggaggugaugaacaucgugcugaucgcccucagccugcuggccauccucaaggggaucuacaacgucgcgaccugcggccuguucgggcugaucuccuuccuccugcugugcggccgcagcugcuccgugacguacaaggggguguacgagcuccagacccuggagcugaacauggccaaccucaacaugaccaugccgcugagcugcaccaagaacaacucccaccacuacaucauggucggcaacgagacgggccuggagcucacccugaccaacaccagcaucaucaaccacaaguucugcaaccuguccgacgcccacaagaagaaccucuacgaccacgcccugaugagcaucaucuccacguuccaccugagcauccccaacuucaaccaguacgaggccauguccugcgacuucaacgggggcaagaucagcgugcaguacaaccucucccacagcuucgcgguggacgccgccaaccacugcgggaccaucgccaacggcguccugcagaccuucaugcggauggcguggggcggguccuacaucgcccuggacagcggcaaggggaacugggacugcaucaugaccuccuaccaguaccucaucauccagaacacgaccugggaggaccacugccaguucagccgccccucccccaucggcuaccuggggcugcucagccagcggacccgcgacaucuacaucagccggcgccugcugggcaccuucacguggacccucuccgacagcgagggcaacgaggcccccgggggcuacugccugacccgguggaugcugaucgaggccgagcucaagugcuucgggaacaccgccguggcgaagugcaacgagaagcacgacgaggaguucugcgacaugcugcgccuguucgacuucaacaagcaggccaucaagcggcucaagacggaggcccagauguccauccagcugaucaacaaggccgugaacgcccugaucaacgaccagcucaucaugaagaaccaccuccgcgacaucaugggcauccccuacugcaacuacagccgguacugcuaccugaaccacaccgucaccgggaagaccucccugccccgcugcugccuggugagcaacggcuccuaccugaacgagacgcacuucagcgacgacaucgagcagcaggcggacaacaugaucaccgagaugcuccagaaggaguacauggaccggcagggcaagaccccgcuggggcugguggaccucuucgucuucuccaccagcuucuaccugaucuccaucuuccugcaccuggugaagaucccgacgcaccgccacaucgugggcaagcccugccccaagccccaccggcucaaccacauggggaucugcagcugcggccuguacaagcacccggggguccccgugaaguggaagcgcugaggacuagucccuguucccagagcccacuuuuuuuucuuuuuuugaaauaaaauagccugucuuucagaucucaaaggcucuuuucagagccaccaaaaaaaaaaaaaaaaaaaaaaaaaaaaaaaaaaaaaaaaaaaaaaaaaaaaaaaaaaaaaaaaaaaaaaaaaaaaaaaaaaaaaaaaaaaaaaaaaaaaa

SEQ ID NO: 38888 - RNA, 1764 nt, Artificial Sequence
  mRNA product Design a-2 (hSL-A100) comprising derived and/or modified sequence from LASV(GA391;Clade III)__CAA36645__GPCmut11 (opt1)
aggagaguccgcucagccagguugcagaagcggcuuagcguguguccuaaucuucucucugcguguagguaggccugugccgcaaacaagcuuaccaugggccagaucgugaccuucuuccaggaggucccccacgugaucgaggaggugaugaacaucguccugaucgcccucagcauccuggccauccugaaggggcucuacaacguggcgaccugcggccugaucgggcuggugacguuccuccugcuguccggccgcagcugcucccucaucuacaaggggaccuacgagcugcagacccuggagcucaacauggagacccugaacaugacgaugccgcugagcugcaccaagaacaacucccaccacuacauccgggucggcaacgagaccggccucgagcugacccugacgaacaccagcauccucaaccacaaguucugcaaccuguccgacgcccacaagcgcaaccuguacgaccacagccucauguccaucaucagcaccuuccaccuguccauccccaacuucaaccaguacgaggccaugagcugcgacuucaacgggggcaagaucaccgugcaguacaaccugucccacagcuucgccguggacgccgcggggcacugcggcacgcucgccaacgggguccugcagaccuucaugcggauggccuggggcggcuccuacaucgcccuggacagcgggcgcggcaacugggacugcaucaugaccuccuaccaguaccucaucauccagaacaccacgugggacgaccacugccaguucagccggcccucccccaucggguaccugggccugcucagccagcgcacccgggacaucuacaucagccgccggcugcugggcaccuucaccuggacgcucuccgacagcgaggggaacgagaccccgggcggguacugccugacccgcuggaugcugaucgaggcggagcucaagugcuucggcaacaccgccguggccaagugcaacgagaagcacgacgaggaguucugcgacaugcugcggcuguucgacuucaacaagcaggccauccgccggcucaagacggaggcccagauguccauccagcugaucaacaaggcggugaacgcccugaucaacgaccagcucaucaugaagaaccaccuccgcgacaucauggggauccccuacugcaacuacagccgguacugcuaccugaaccacaccuccaccggcaagaccagccugccccgcugcugccugaucuccaacggcagcuaccugaacgagacgaaguucuccgacgacaucgagcagcaggccgacaacaugaucaccgagaugcuccagaaggaguacaucgaccggcaggggaagacgccccugggccuggucgaccuguucguguucagcaccuccuucuaccucaucagcaucuuccugcaccuggugaagaucccgacccaccgccacaucgucgggaagcccugccccaagccccaccggcucaaccacaugggcaucugcuccugcgggcuguacaagcagccgggcgugcccgugcgcuggaagcggugaggacuagucccuguucccagagcccacuuuuuuuucuuuuuuugaaauaaaauagccugucuuucagaucucaaaggcucuuuucagagccaccaaaaaaaaaaaaaaaaaaaaaaaaaaaaaaaaaaaaaaaaaaaaaaaaaaaaaaaaaaaaaaaaaaaaaaaaaaaaaaaaaaaaaaaaaaaaaaaaaaaaa

SEQ ID NO: 38889 - RNA, 1767 nt, Artificial Sequence
  mRNA product Design a-2 (hSL-A100) comprising derived and/or modified sequence from LASV(AV;Clade V)__CCA30314__GPCmut11 (opt1)
aggagaguccgcucagccagguugcagaagcggcuuagcguguguccuaaucuucucucugcguguagguaggccugugccgcaaacaagcuuaccaugggccagaucgugaccuucuuccaggaggucccccacgugaucgaggaggugaugaacaucguccugaucgcccucagcauccuggccgugcugaaggggcucuacaacaucgcgaccugcggccugaucgggcugaucacguuccuccugcugugcggccgcuccugcagcuccaaccucuacaaggggguguacgagcugcagagccuggaccucaacauggagacccugaacaugaccaugccgcuguccugcaccaagaacaacagccaccacuacauccgggucggcaacgacacgggccucgagcugacccugaccaacaccuccauccucaaccacaaguucugcaaccugagcgacgcccacaagaaggaccuguacgaccacgcccucauguccaucaucagcacguuccaccuguccauccccaacuucaaccaguacgaggccaugagcugcgacuucaacgggggcaagaucuccgugcaguacaaccugagccacuccuacgccaucgacgcggccaaccacugcgggaccguggccaacggcauccuccagaccuucaugcgcauggccuggggcgggagcuacaucgcgcuggacuccggccgggggaacugggacugcaucaugaccagcuaccaguaccugaucauccagaacacgaccugggagaaccacugccaguucucccgccccagccccaucggcuaccucgggcugcugagccagcggacccgcgacaucuacaucucccggcgccuccugggcaccuucacguggacccugagcgacuccgagggcaacgccacccccgggggcuacugccucacccgguggaugcugaucgaggccgagcugaagugcuucgggaacacggccgucgccaagugcaacgagaagcacgacgaggaguucugcgacaugcuccgccuguucgacuucaacaagcaggcgaucagccggcugaaguccgaggcccagaugagcauccagcucaucaacaaggccgugaacgcccugaucaacgaccagcugaucaugaagaaccaccuccgcgacaucaugggcauccccuacugcaacuacuccaaguacugcuaccugaaccacaccaucaccgggaagaccagccugcccaagugcugccucguguccaacggcagcuaccugaacgagacgcacuucuccgacgacaucgagcagcaggccgacaacaugaucaccgagaugcugcagaaggaguacauggagcggcagggcaagaccccgcucgggcuggucgaccuguucguguucagcaccuccuucuaccugaucagcaucuuccuccgccuggugaagaucccgacgcaccggcacaucgucggcaagcccugccccaagccccaccgccugaaccacauggggaucugcuccugcggccucuacaagcagccgggggugcccgugcgguggaagcgcugaggacuagucccuguucccagagcccacuuuuuuuucuuuuuuugaaauaaaauagccugucuuucagaucucaaaggcucuuuucagagccaccaaaaaaaaaaaaaaaaaaaaaaaaaaaaaaaaaaaaaaaaaaaaaaaaaaaaaaaaaaaaaaaaaaaaaaaaaaaaaaaaaaaaaaaaaaaaaaaaaaaaa

SEQ ID NO: 38890 - RNA, 1764 nt, Artificial Sequence
  mRNA product Design a-2 (hSL-A100) comprising derived and/or modified sequence from LASV(Togo/2016/7082;Clade VI)__AMR44577__GPCmut11 (opt1)
aggagaguccgcucagccagguugcagaagcggcuuagcguguguccuaaucuucucucugcguguagguaggccugugccgcaaacaagcuuaccaugggccagaucaucaccuucuuccaggaggugccccacgucaucgaggaggugaugaacaucgugcugaucgcccucagccugcuggccauccucaagggggucuacaacguggcgaccugcggcaucaucgggcuggugacguuccuguuccucugcggccgcuccugcagccugaucuacaagggguccuacgagcugcagacccucgagcugaacauggagacccugaacaugaccaugccgcucagcugcacgaagaacuccagccaccacuacauccgggucggcaacgagaccggccuggagcugacccucaccaacacguccaucaucaaccacaaguucugcaaccugagcgacgcccacaagcgcaaccuguacgaccacgcccucauguccauccugagcaccuuccaccuguccauccccaacuucaaccaguacgaggccaugagcugcgacuucaacgggggcaagaucuccgugcaguacaaccucagccacgccuacgcgguggacgccgccgagcacugcgggaccgucgccaacggcgugcugcagaccuucaugcggauggcguggggcggguccuacaucgcccuggacagcggccgcgggaacugggacugcaucaugacguccuaccaguaccucaucauccagaacaccaccugggaggaccacugccaguucagccggcccucccccaucggcuaccuggggcugcucagccagcgcacccgggacaucuacaucagccgccggcugcugggcacguucaccuggacccucuccgacagcgagggcaacgagacccccgggggcuacugccugacgcgcuggaugcugaucgaggccgagcucaagugcuucgggaacaccgccguggccaagugcaacgagaagcacgacgaggaguucugcgacaugcugcggcuguucgacuucaacaagcaggcgauccagcgccucaaguccgaggcccagaugagcauccagcugaucaacaaggccgucaacgcccugaucaacgaccagcucaucaugaagaaccaccuccgggacaugaugggcauccccuacugcaacuacuccaaguacugcuaccugaaccacaccagcuccgggcgcaccagccugcccaagugcugccugguguccaacggcagcuaccugaacgagacgcacuucuccgacgacaucgagcagcaggccgacaacaugaucaccgagaugcuccagaaggaguacaucgaccggcagggcaagaccccgcuggggcugguggaccucuucgucuucagcaccuccuucuaccugaucagcaucuuccugcaccugaucaagaucccgacgcaccgccacaucgugggcaagcccugccccaagccccaccggcucaaccacauggggaucugcuccugcggccuguacaagcagccgggggugcccacccgcuggaagcggugaggacuagucccuguucccagagcccacuuuuuuuucuuuuuuugaaauaaaauagccugucuuucagaucucaaaggcucuuuucagagccaccaaaaaaaaaaaaaaaaaaaaaaaaaaaaaaaaaaaaaaaaaaaaaaaaaaaaaaaaaaaaaaaaaaaaaaaaaaaaaaaaaaaaaaaaaaaaaaaaaaaaa

SEQ ID NO: 38891 - RNA, 1764 nt, Artificial Sequence
  mRNA product Design a-2 (hSL-A100) comprising derived and/or modified sequence from LASV(KAK-428;Clade n.d. (VII))__ANH09740__GPCmut11 (opt1)
aggagaguccgcucagccagguugcagaagcggcuuagcguguguccuaaucuucucucugcguguagguaggccugugccgcaaacaagcuuaccaugggccagaucgugaccuucuuccaggaggucccccacgugaucgaggaggugaugaacaucguccugaucgcccucagccugcuggccauccucaaggggcuguacaacuucgcgaccugcggcgugaucgggcugaucacguuccuccugcugugcggccgcuccugcagcgccaccuacaaggggcaguacgagcuccagacccuggagcugaacauggagucccucaacaugaccaugccgcugagcugcacgaagaacaacucccaccacuacauccgggccggcaacaacaccggccuggagcucacccugaccaacacgagcaucaucucccacaaguucugcaaccugagcgacgcccacaagaagaaccucuacgaccacacccugauguccaucaucaccaccuuccaccugagcauccccaacuucaaccaguacgaggccauguccugcgacuucaacgggggcaagaucagcauccaguacaaccucucccacagcuacgcgggggacgccgcccagcacugcggcacgguggccaacgggguccugcagaccuucaugcgcauggcguggggcggcuccuaccuggcccucgacagcgggcggcgcggcugggacugcaucaucuccagcuaccaguaccugaucauccagaacaccaccugggacgaccacugccaguucucccggcccagccccaucggguaccugggcuucgugagccagaagacgcgcgacaucuacaucucccggcgccuccugggcaccuucaccuggacccugagcgacuccgaggggcacgacaugccgggcggguacugccucacgcgguggaugcugaucgaggccgaccugaagugcuucggcaacaccgccguggccaagugcaacgagaagcacgacgaggaguucugcgacauguggcgccucuucgacuucaacaagcaggcgauccagcggcugaaggccgaggcccagaugaacauccagcugaucaacaaggccgucaacgcccucaucaacgaccagcugaugaugaagaaccaccuccgcgacaucauggggauccccuacugcaacuacagcaaguucugcuaccugaacaacaccaccacgggccggaccucccugccccgcugcugccugaucagcaacggcuccuaccucaacgagacccacuucagcgacgacaucgagcagcaggcggacaacaugaucaccgagaugcugcagaaggaguacauggaccggcaggggaagacgccccugggccucguggaccuguucguguucuccaccagcuucuaccugaucaccaucuuccuccaccuggucaagaucccgacccaccgccacaucguggggaagcccugccccaagccccaccggcugaaccacaugggcaucugcuccugcgggcuguacaagcagccgggcgugcccguccgcuggaagcggugaggacuagucccuguucccagagcccacuuuuuuuucuuuuuuugaaauaaaauagccugucuuucagaucucaaaggcucuuuucagagccaccaaaaaaaaaaaaaaaaaaaaaaaaaaaaaaaaaaaaaaaaaaaaaaaaaaaaaaaaaaaaaaaaaaaaaaaaaaaaaaaaaaaaaaaaaaaaaaaaaaaaa

SEQ ID NO: 38892 - RNA, 1764 nt, Artificial Sequence; identical to SEQ ID NO: 38886
  mRNA product Design a-2 (hSL-A100) comprising derived and/or modified sequence from LASV(Pinneo-NIG-1969;Clade I)__AIT17836__GPCmut11 (opt1)

SEQ ID NO: 38893 - RNA, 1764 nt, Artificial Sequence
  mRNA product Design a-2 (hSL-A100) comprising derived and/or modified sequence from LASV(ISTH0009-NIG-2011;Clade II)__AIT17404__GPCmut11 (opt1)
aggagaguccgcucagccagguugcagaagcggcuuagcguguguccuaaucuucucucugcguguagguaggccugugccgcaaacaagcuuaccaugggccagaucaucaccuucuuccaggaggugccccacgucaucgaggaggugaugaacaucgugcugaucgcccucagccugcuggccauccucaaggggaucuacaacgucgcgaccugcggccuguucgggcugguguccuuccuccugcugugcggccgcagcugcuccacgaccuacaaggggguguacgagcuccagacccuggagcuggacauggccagccucaacaugaccaugccgcuguccugcacgaagaacaacagccaccacuacaucauggucggcaacgagaccggccuggagcucacccugaccaacacguccaucaucaaccacaaguucugcaaccugagcgacgcccacaagaagaaccucuacgaccacgcccugauguccaucaucagcaccuuccaccuguccauccccaacuucaaccaguacgaggccaugagcugcgacuucaacgggggcaagaucuccgugcaguacaaccucagccacgcguacgccguggacgccgccaaccacugcgggaccaucgcgaacggcguccugcagaccuucaugcggauggccuggggcggguccuacaucgcccuggacagcggcaagggguccugggacugcaucaugacgagcuaccaguaccucaucauccagaacaccaccugggaggaccacugccaguucucccgccccagccccaucggcuaccuggggcugcucagccagcggacccgcgacaucuacaucucccggcgccugcugggcacguucaccuggacccucagcgacuccgagggcaacgagacccccgggggcuacugccugacgcgguggaugcugaucgaggccgagcucaagugcuucgggaacaccgccguggcgaagugcaacgagaagcacgacgaggaguucugcgacaugcugcgccuguucgacuucaacaagcaggccauccggcgccucaagaccgaggcccagaugagcauccagcugaucaacaaggccgugaacgcccugaucaacgaccagcucaucaugaagaaccaccuccgggacaucaugggcaucccguacugcaacuacuccaaguacugcuaccugaaccacaccgucacggggaagaccagccugccccgcugcugccugguguccaacggcagcuaccugaacgagacccacuucuccgacgacaucgagcagcaggcggacaacaugaucaccgagcuccugcagaaggaguacauggaccggcagggcaagacgccccuggggcucguggaccuguucgucuucagcaccuccuucuaccugaucagcaucuuccugcaccucaucaagaucccgacccaccgccacaucaccggcaagcccugccccaagccccaccggcugaaccacauggggaucugcuccugcggccuguacaagcacccgggggugcccgugaaguggaagcgcugaggacuagucccuguucccagagcccacuuuuuuuucuuuuuuugaaauaaaauagccugucuuucagaucucaaaggcucuuuucagagccaccaaaaaaaaaaaaaaaaaaaaaaaaaaaaaaaaaaaaaaaaaaaaaaaaaaaaaaaaaaaaaaaaaaaaaaaaaaaaaaaaaaaaaaaaaaaaaaaaaaaaa

SEQ ID NO: 38894 - RNA, 1764 nt, Artificial Sequence
  mRNA product Design a-2 (hSL-A100) comprising derived and/or modified sequence from LASV(ISTH2010-NIG-2012;Clade II)__AIT17482__GPCmut11 (opt1)
aggagaguccgcucagccagguugcagaagcggcuuagcguguguccuaaucuucucucugcguguagguaggccugugccgcaaacaagcuuaccaugggccagaucaucaccuucuuccaggaggugccccacgucaucgaggaggugaugaacaucgugcugaucgcccucagccugcuggccauccucaaggggaucuacaacgucgcgaccugcggccuguucgggcugguguccuuccuccugcugugcggccgcagcugcuccacgaccuacaaggggguguacgagcuccagacccuggagcuggacauggccagccucaacaugaccaugccgcuguccugcacgaagaacaacagccaccacuacaucauggucggcaacgagaccggccuggagcucacccugaccaacacguccaucaucaaccacaaguucugcaaccugagcgacgcccacaagaagaaccucuacgaccacgcccugauguccaucaucagcaccuuccaccuguccauccccaacuucaaccaguacgaggccaugagcugcgacuucaacgggggcaagaucuccgugcaguacaaccucagccacgcguacgccguggacgccgccaaccacugcgggaccaucgcgaacggcguccugcagaccuucaugcggauggccuggggcggguccuacaucgcccuggacagcggcaagggguccugggacugcaucaugacgagcuaccaguaccucaucauccagaacaucaccugggaggaccacugccaguucucccgccccagccccaucggcuaccuggggcugcucagccagcggacccgcgacaucuacaucucccggcgccugcugggcaccuucacguggacccucagcgacuccgagggcaacgagacccccgggggcuacugccugacccgguggaugcugaucgaggccgagcucaagugcuucgggaacacggccguggcgaagugcaacgagaagcacgacgaggaguucugcgacaugcugcgccuguucgacuucaacaagcaggccauccggcgccucaagaccgaggcccagaugagcauccagcugaucaacaaggccgugaacgcccugaucaacgaccagcucaucaugaagaaccaccuccgggacaucaugggcauccccuacugcaacuacuccaaguacugcuaccugaaccacaccgucaccgggaagacgagccugccccgcugcugccugguguccaacggcagcuaccugaacgagacccacuucuccgacgacaucgagcagcaggcggacaacaugaucaccgagcuccugcagaaggaguacaucgaccggcagggcaagaccccgcuggggcucguggaccuguucgucuucagcacguccuucuaccugaucagcaucuuccugcaccucgugaagaucccgacccaccgccacguggucggcaagcccugccccaagccccaccggcugaaccacauggggaucugcuccugcggccuguacaagcacccgggggugcccgugaaguggaagcgcugaggacuagucccuguucccagagcccacuuuuuuuucuuuuuuugaaauaaaauagccugucuuucagaucucaaaggcucuuuucagagccaccaaaaaaaaaaaaaaaaaaaaaaaaaaaaaaaaaaaaaaaaaaaaaaaaaaaaaaaaaaaaaaaaaaaaaaaaaaaaaaaaaaaaaaaaaaaaaaaaaaaaa

SEQ ID NO: 38895 - RNA, 1764 nt, Artificial Sequence
  mRNA product Design a-2 (hSL-A100) comprising derived and/or modified sequence from LASV(Lassa virus/H.sapiens-wt/NGA/2015/ISTH_0543;Clade II)__AVO03639__GPCmut11 (opt1)
aggagaguccgcucagccagguugcagaagcggcuuagcguguguccuaaucuucucucugcguguagguaggccugugccgcaaacaagcuuaccaugggccagaucaucaccuucuuccaggaggugccccacgucaucgaggaggugaugaacaucgugcugaucgcccucagccugcuggccauccucaaggggaucuacaacgucgcgaccugcggccuguucgggcugguguccuuccuccugcugugcggccgcagcugcuccacgaccuacaaggggguguacgagcuccagacccuggagcuggacauggccaaccucaacaugaccaugccgcugagcugcacgaagaacaacucccaccacuacaucauggucggcaacgagaccggccuggagcucacccugaccaacacgagcaucaucaaccacaaguucugcaaccuguccgacgcccacaagaagaaccucuacgaccacgcccugaugagcaucaucuccaccuuccaccugagcauccccaacuucaaccaguacgaggccauguccugcgacuucaacgggggcaagaucagcgugcaguacaaccucucccacaccuacgcgguggacgccgccaaccacugcgggaccaucgccaacggcguccugcagacguucaugcggauggcguggggcgggagcuacaucgcccuggacuccggcaaggggagcugggacugcaucaugaccuccuaccaguaccucgugauccagaacaccaccugggaggaccacugccaguucagccgccccucccccaucggcuaccuggggcugcucagccagcggacgcgcgacaucuacaucagccggcgccugcugggcaccuucaccuggacccucuccgacagcgagggcaacgagacgcccgggggcuacugccugacccgguggaugcugaucgaggccgagcucaagugcuucgggaacaccgccguggccaagugcaacgagaagcacgacgaggaguucugcgacaugcugcgccuguucgacuucaacaagcaggcgauccggcgccucaagaccgaggcccagauguccauccagcugaucaacaaggccgucaacgcccugaucaacgaccagcucaucaugaagaaccaccuccgggacaucaugggcauccccuacugcaacuacagcaaguacugcuaccugaaccacacggugaccgggaagaccucccugccccgcugcugccuggugagcaacggcuccuaccugaacgagacccacuucagcgacgacaucgagcagcaggccgacaacaugaucacggagcuccugcagaaggaguacaucgaccggcagggcaagaccccgcuggggcucgucgaccuguucguguucuccaccagcuucuaccugaucuccaucuuccugcaccucgugaagaucccgacccaccgccacaucacgggcaagcccugccccaagccccaccggcugaaccacauggggaucugcagcugcggccuguacaagcacccggggguccccgugaaguggaagcgcugaggacuagucccuguucccagagcccacuuuuuuuucuuuuuuugaaauaaaauagccugucuuucagaucucaaaggcucuuuucagagccaccaaaaaaaaaaaaaaaaaaaaaaaaaaaaaaaaaaaaaaaaaaaaaaaaaaaaaaaaaaaaaaaaaaaaaaaaaaaaaaaaaaaaaaaaaaaaaaaaaaaaa

SEQ ID NO: 38896 - RNA, 1764 nt, Artificial Sequence
  mRNA product Design a-2 (hSL-A100) comprising derived and/or modified sequence from LASV(Lassa virus/H.sapiens-wt/NGA/2016/ISTH_0009;Clade II)__AVO03571__GPCmut11 (opt1)
aggagaguccgcucagccagguugcagaagcggcuuagcguguguccuaaucuucucucugcguguagguaggccugugccgcaaacaagcuuaccaugggccagaucaucaccuucuuccaggaggugccccacgucaucgaggaggugaugaacaucgugcugaucgcccucagccugcuggccauccucaaggggaucuacaacgucgcgaccugcggccugcuggggcucguguccuuccugcugcucugcggccgcagcugcuccacgaccuacaaggggguguacgagcugcagacccuggagcucgacauggccagccugaacaugaccaugccgcuguccugcacgaagaacaacagccaccacuacaucauggucggcaacgagaccggccucgagcugacccugaccaacacguccaucaucaaccacaaguucugcaaccucagcgacgcccacaagaagaaccuguacgaccacgcccugauguccaucaucagcaccuuccaccucuccauccccaacuucaaccaguacgaggccaugagcugcgacuucaacgggggccggaucuccgugcaguacaaccugagccacuccuacgcgguggacgccgccaaccacugcgggaccaucgccaacggcguccugcagaccuucaugcgcauggcguggggcgggagcuacaucgcccucgacuccggcaaggggagcugggacugcaucaugacguccuaccaguaccugaucauccagaacaccaccugggaggaccacugccaguucagccggcccagccccaucggcuaccuggggcuccugucccagcgcacccgggacaucuacaucagccgccggcugcucggcacguucaccuggacccuguccgacagcgagggcaacgagacccccgggggcuacugccugacgcgcuggaugcucaucgaggccgagcugaagugcuucgggaacaccgccguggccaagugcaacgagaagcacgacgaggaguucugcgacaugcugcggcuguucgacuucaacaagcaggcgauccgccggcugaagaccgaggcccagauguccauccagcugaucaacaaggccgugaacgcccucaucaacgaccagcugaucaugaagaaccaccuccgcgacaucaugggcaucccguacugcaacuacagcaaguacugcuaccucaaccacaccgucacggggaagaccucccugccccggugcugccuggugagcaacggcuccuaccucaacgagacccacuucagcgacgacaucgagcagcaggccgacaacaugaucaccgagcugcugcagaaggaguacaucgaccgccagggcaagacgccccucgggcugguggaccuguucgucuucuccaccagcuucuaccugaucuccaucuuccuccaccuggugaagaucccgacccaccggcacaucaccggcaagcccugccccaagccccaccgccugaaccacauggggaucugcagcugcggccucuacaaccacccgggggugcccgucaaguggaagcggugaggacuagucccuguucccagagcccacuuuuuuuucuuuuuuugaaauaaaauagccugucuuucagaucucaaaggcucuuuucagagccaccaaaaaaaaaaaaaaaaaaaaaaaaaaaaaaaaaaaaaaaaaaaaaaaaaaaaaaaaaaaaaaaaaaaaaaaaaaaaaaaaaaaaaaaaaaaaaaaaaaaaa

SEQ ID NO: 38897 - RNA, 1764 nt, Artificial Sequence
  mRNA product Design a-2 (hSL-A100) comprising derived and/or modified sequence from LASV(Lassa virus/H.sapiens-wt/NGA/2016/ISTH_0017;Clade II)__AVO03567__GPCmut11 (opt1)
aggagaguccgcucagccagguugcagaagcggcuuagcguguguccuaaucuucucucugcguguagguaggccugugccgcaaacaagcuuaccaugggccagaucaucaccuucuuccaggaggugccccacgucaucgaggaggugaugaacaucgugcugaucgcccucagccugcuggccauccucaaggggaucuacaacgucgcgaccugcggccuguucgggcugguguccuuccuccugcugugcggccgcagcugcuccacgaccuacaaggggguguacgagcuccagacccuggagcuggacauggccagccucaacaugaccaugccgcuguccugcacgaagaacaacagccaccacuacaucauggucggcaacgagaccggccuggagcucacccugaccaacacguccaucaucaaccacaaguucugcaaccugagcgacgcccacaagaagaaccucuacgaccacgcccugauguccaucaucagcaccuuccaccuguccauccccaacuucaaccaguacgaggccaugagcugcgacuucaacgggggcaagaucuccgugcaguacaaccucagccacaccuacgcgaucgacgccgccaaccacugcgggaccaucgccaacggcgugcugcagacguucaugcggauggcguggggcggguccuacaucgcccuggacagcggcaagggguccugggacugcaucaugaccagcuaccaguaccucaucauccagaacaccaccugggaggaccacugccaguucucccgccccagccccaucggcuaccuggggcugcucagccagcggacgcgcgacaucuacaucucccggcgccugcugggcaccuucaccuggacccucagcgacuccgagggcaacgagacgcccgggggcuacugccugacccgguggaugcugaucgaggccgagcucaagugcuucgggaacaccgccgucgccaagugcaacgagaagcacgacgaggaguucugcgacaugcugcgccuguucgacuucaacaagcaggcgauccggcgccucaagaccgaggcccagaugagcauccagcugaucaacaaggccgugaacgcccugaucaacgaccagcucaucaugaagaaccaccuccgggacaucaugggcauccccuacugcaacuacuccaaguacugcuaccugaaccacacggugaccgggaagaccagccugccccgcugcugccuggucuccaacggcagcuaccugaacgagacccacuucuccgacgacaucgagcagcaggccgacaacaugaucacggagcuccugcagaaggaguacauggaccggcagggcaagaccccgcuggggcucguggaccuguucguguucagcaccuccuucuaccugaucagcaucuuccugcaccucguccgcaucccgacccaccggcacgugaucggcaagcccugccccaagccccaccgccugaaccacauggggaucugcuccugcggccuguacaagcacccgggggugcccgucaaguggaagcggugaggacuagucccuguucccagagcccacuuuuuuuucuuuuuuugaaauaaaauagccugucuuucagaucucaaaggcucuuuucagagccaccaaaaaaaaaaaaaaaaaaaaaaaaaaaaaaaaaaaaaaaaaaaaaaaaaaaaaaaaaaaaaaaaaaaaaaaaaaaaaaaaaaaaaaaaaaaaaaaaaaaaa

SEQ ID NO: 38898 - RNA, 1764 nt, Artificial Sequence
  mRNA product Design a-2 (hSL-A100) comprising derived and/or modified sequence from LASV(Lassa virus/H.sapiens-wt/NGA/2018/ISTH_0959;Clade II)__AVV65099__GPCmut11 (opt1)
aggagaguccgcucagccagguugcagaagcggcuuagcguguguccuaaucuucucucugcguguagguaggccugugccgcaaacaagcuuaccaugggccagaucaucaccuucuuccaggaggugccccacgucaucgaggaggugaugaacaucgugcugaucgcccucagccugcuggccauccucaaggggaucuacaacgucgugaccugcggccuguucgggcugguguccuuccuccugcugugcggccgcagcugcuccacgaccuacaagggggucuacgagcuccagacccuggagcuggacauggcgagccucaacaugaccaugccgcuguccugcacgaagaacaacagccaccacuacaucauggugggcaacgagaccggccuggagcucacccugaccaacacguccaucaucaaccacaaguucugcaaccugagcgacgcccacaagaagaaccucuacgaccacgcccugauguccaucaucagcaccuuccaccuguccauccccaacuucaaccaguacgaggccaugagcugcgacuucaacgggggcaagaucuccgugcaguacaaccucagccacgccuacgcgaucgacgccgccaaccacugcgggaccaucgccaacggcguccugcagaccuucaugcggauggcguggggcggguccuacaucgcccuggacagcggcaagggguccugggacugcaucaugacgagcuaccaguaccucaucauccagaacaccaccugggaggaccacugccaguucucccgccccagccccaucggcuaccuggggcugcucagccagcggacccgcgacaucuacaucucccggcgccugcugggcacguucaccuggacccucagcgacuccgagggcaacgagacccccgggggcuacugccugacgcgguggaugcugaucgaggccgagcucaagugcuucgggaacaccgccguggccaagugcaacgagaagcacgacgaggaguucugcgacaugcugcgccuguucgacuucaacaagcaggcgauccggcgccucaagaccgaggcccagaugagcauccagcugaucaacaaggccgugaacgcccugaucaacgaccagcucaucaugaagaaccaccuccgggacaucaugggcaucccguacugcaacuacuccaaguacugcuaccugaaccacaccgucacggggaagaccagccugccccgcugcugccugguguccaacggcagcuaccugaacgagacccacuucuccgacgacaucgagcagcaggccgacaacaugaucaccgagcuccugcagaaggaguacaucgaccggcagggcaagacgccccuggggcucguggaccuguucgucuucagcaccuccuucuaccugaucagcaucuuccugcaccucgugaagaucccgacccaccgccacgugaucggcaagcccugccccaagccccaccggcugaaccacauggggaucugcuccugcggccuguacaagcacccggggguccccgugaaguggaagcgcugaggacuagucccuguucccagagcccacuuuuuuuucuuuuuuugaaauaaaauagccugucuuucagaucucaaaggcucuuuucagagccaccaaaaaaaaaaaaaaaaaaaaaaaaaaaaaaaaaaaaaaaaaaaaaaaaaaaaaaaaaaaaaaaaaaaaaaaaaaaaaaaaaaaaaaaaaaaaaaaaaaaaa

SEQ ID NO: 38899 - RNA, 1764 nt, Artificial Sequence
  mRNA product Design a-2 (hSL-A100) comprising derived and/or modified sequence from LASV(LASV003-NIG-2008;Clade II)__AIT17580__GPCmut11 (opt1)
aggagaguccgcucagccagguugcagaagcggcuuagcguguguccuaaucuucucucugcguguagguaggccugugccgcaaacaagcuuaccaugggccagaucaucaccuucuuccaggaggugccccacgucaucgaggaggugaugaacaucgugcugaucgcccucagccugcuggccauccucaaggggaucuacaacgucgcgaccugcggccuguucgggcugguguccuuccuccugcugugcggccgcagcugcuccacgaccuacaaggggguguacgagcuccagacccuggagcuggacauggccagccucaacaugaccaugccgcuguccugcacgaagaacaacagccaccacuacaucauggucggcaacgagaccggccuggagcucacccugaccaacacguccaucaucaaccacaaguucugcaaccugagcgacgcccacaagaagaaccucuacgaccacgcccugauguccaucaucagcaccuuccaccuguccauccccaacuucaaccaguacgaggccaugagcugcgacuucaacgggggcaagaucuccgugcaguacaaccucagccacaccuacgcgguggacgccgccaaccacugcgggaccaucgccaacggcguccugcagacguucaugcggauggcguggggcggguccuacaucgcccuggacagcggcaagggguccugggacugcaucaugaccagcuaccaguaccucaucauccagaacaccaccugggaggaccacugccaguucucccgccccagccccaucggcuaccuggggcugcucagccagcggacgcgcgacaucuacaucucccggcgccugcugggcaccuucaccuggacccucagcgacuccgagagcaacgagacgccgggcggguacugccugacccgguggaugcugaucgaggccgagcucaagugcuucggcaacaccgccguggccaagugcaacgagaagcacgacgaggaguucugcgacaugcugcgccuguucgacuucaacaagcaggcgauccggcgccucaaggccgaggcccagauguccauccagcugaucaacaaggccgugaacgcccugaucaacgaccagcucaucaugaagaaccaccuccgggacaucauggggauccccuacugcaacuacagcaaguacugcuaccugaaccacaccgucacgggccgcaccucccugccccggugcugccuggugagcaacggguccuaccugaacgagacccacuucagcgacgacaucgagcagcaggcggacaacaugaucaccgagcuccugcagaaggaguacauggaccgccagggcaagacgccccugggccucguggaccuguucgucuucuccaccagcuucuaccugaucuccaucuuccugcaccucgugaagaucccgacccaccggcacgugaucgggaagcccugccccaagccccaccgccugaaccacaugggcaucugcagcugcgggcuguacaagcacccgggcguccccgugaaguggaagcggugaggacuagucccuguucccagagcccacuuuuuuuucuuuuuuugaaauaaaauagccugucuuucagaucucaaaggcucuuuucagagccaccaaaaaaaaaaaaaaaaaaaaaaaaaaaaaaaaaaaaaaaaaaaaaaaaaaaaaaaaaaaaaaaaaaaaaaaaaaaaaaaaaaaaaaaaaaaaaaaaaaaaa

SEQ ID NO: 38900 - RNA, 1764 nt, Artificial Sequence
  mRNA product Design a-2 (hSL-A100) comprising derived and/or modified sequence from LASV(LASV035-NIG-2009;Clade II)__AIT17588__GPCmut11 (opt1)
aggagaguccgcucagccagguugcagaagcggcuuagcguguguccuaaucuucucucugcguguagguaggccugugccgcaaacaagcuuaccaugggccagaucaucaccuucuuccaggaggugccccacgucaucgaggaggugaugaacaucgugcugaucgcccucagccugcuggccauccucaaggggaucuacaacgucgcgaccugcggccuguucgggcugguguccuuccuccugcugugcggccgcagcugcuccacgaccuacaaggggguguacgagcuccagacccuggagcuggacauggccagccucaacaugaccaugccgcuguccugcacgaagaacaacagccaccacuacaucauggucggcaacgagaccggccuggagcucacccugaccaacacguccaucaucaaccacaaguucugcaaccugagcgacgcccacaagaagaaccucuacgaccacgcccugauguccaucaucagcaccuuccaccuguccauccccaacuucaaccaguacgaggccaugagcugcgacuucaacgggggcaagaucuccgugcaguacaaccucagccacgcguacgccguggacgccgccaaccacugcgggaccaucgcgaacggcguccugcagaccuucaugcggauggccuggggcggguccuacaucgcccuggacagcggcaagggguccugggacugcaucaugacgagcuaccaguaccucaucauccagaacaccaccugggaggaccacugccaguucucccgccccagccccaucggcuaccuggggcugcucagccagcggacccgcgacaucuacaucucccggcgccugcugggcacguucaccuggacccucagcgacuccgagggcaacgagacccccgggggcuacugccugacgcgguggaugcugaucgaggccgagcucaagugcuucgggaacaccgccguggcgaagugcaacgagaagcacgacgaggaguucugcgacaugcugcgccuguucgacuucaacaagcaggccauccggcgccucaaggccgaggcccagaugagcauccagcugaucaacaaggccgugaacgcgcugaucaacgaccagcucaucaugaagaaccaccuccgggacaucaugggcauccccuacugcaacuacuccaaguacugcuaccugaaccacaccgucaccgggaagacgagccugccccgcugcugccugguguccaacggcagcuaccugaacgagacccacuucuccgacgacaucgagcagcaggccgacaacaugaucaccgagcuccugcagaaggaguacaucgaccggcagggcaagaccccgcuggggcucguggaccuguucgucuucagcacguccuucuaccugaucagcaucuuccugcaccucgugaagaucccgacccaccgccacgugaucggcaagcccugccccaagccccaccggcugaaccacauggggaucugcuccugcggccuguacaagcacccggggguccccgugaaguggaagcgcugaggacuagucccuguucccagagcccacuuuuuuuucuuuuuuugaaauaaaauagccugucuuucagaucucaaaggcucuuuucagagccaccaaaaaaaaaaaaaaaaaaaaaaaaaaaaaaaaaaaaaaaaaaaaaaaaaaaaaaaaaaaaaaaaaaaaaaaaaaaaaaaaaaaaaaaaaaaaaaaaaaaaa

SEQ ID NO: 38901 - RNA, 1764 nt, Artificial Sequence
  mRNA product Design a-2 (hSL-A100) comprising derived and/or modified sequence from LASV(LASV1000-NIG-2009;Clade II)__AIT17782__GPCmut11 (opt1)
aggagaguccgcucagccagguugcagaagcggcuuagcguguguccuaaucuucucucugcguguagguaggccugugccgcaaacaagcuuaccaugggccagaucaucaccuucuuccaggaggugccccacgucaucgaggaggugaugaacaucgugcugaucgcccucagccugcuggccauccucaaggggaucuacaacgucgcgaccugcggccuguucgggcugguguccuuccuccugcugugcggccgcagcugcuccacgaccuacaaggggguguacgagcuccagacccuggagcuggacauggccagccucaacaugaccaugccgcuguccugcacgaagaacaacagccaccacuacaucauggucggcaacgagaccggccuggagcucacccugaccaacacguccaucaucaaccacaaguucugcaaccugagcgacgcccacaagaagaaccucuacgaccacgcccugauguccaucaucagcaccuuccaccuguccauccccaacuucaaccaguacgaggccaugagcugcgacuucaacgggggcaagaucuccgugcaguacaaccucagccacaccuacgcgguggacgccgccaaccacugcgggaccaucgccaacggcguccugcagacguucaugcggauggcguggggcggguccuacaucgcccuggacagcggcaagggguccugggacugcaucaugaccagcuaccaguaccucaucauccagaacaccaccugggaggaccacugccaguucucccgccccagccccaucggcuaccuggggcugcucagccagcggacgcgcgacaucuacaucucccggcgccugcugggcaccuucaccuggacccucagcgacuccgagggcaacgagacgcccgggggcuacugccugacccgguggaugcugaucgaggccgagcucaagugcuucgggaacaccgccguggccaagugcaacgagaagcacgacgaggaguucugcgacaugcugcgccuguucgacuucaacaagcaggcgaucaagcggcucaagaccgaggcccagaugagcauccagcugaucaacaaggccgugaacgcccugaucaacgaccagcucaucaugaagaaccaccuccgcgacaucaugggcauccccuacugcaacuacuccaaguacugcuaccugaaccacacggucaccgggaagaccagccugccccggugcugccugguguccaacggcagcuaccugaacgagacccacuucuccgacgacaucgagcagcaggccgacaacaugaucacggagcuccugcagaaggaguacaucgaccgccagggcaagaccccgcuggggcucguggaccuguucgucuucagcaccuccuucuaccugaucagcaucuuccugcaccucgugaagaucccgacccaccggcacguggucggcaagcccugccccaagccccaccgccugaaccacauggggaucugcuccugcggccuguacaagcacccgggggugcccgugaaguggaagcggugaggacuagucccuguucccagagcccacuuuuuuuucuuuuuuugaaauaaaauagccugucuuucagaucucaaaggcucuuuucagagccaccaaaaaaaaaaaaaaaaaaaaaaaaaaaaaaaaaaaaaaaaaaaaaaaaaaaaaaaaaaaaaaaaaaaaaaaaaaaaaaaaaaaaaaaaaaaaaaaaaaaaa

SEQ ID NO: 38902 - RNA, 1764 nt, Artificial Sequence
  mRNA product Design a-2 (hSL-A100) comprising derived and/or modified sequence from LASV(LASV221-NIG-2010;Clade II)__AIT17624__GPCmut11 (opt1)
aggagaguccgcucagccagguugcagaagcggcuuagcguguguccuaaucuucucucugcguguagguaggccugugccgcaaacaagcuuaccaugggccagaucaucaccuucuuccaggaggugccccacgucaucgaggaggugaugaacaucgugcugaucgcccucagccugcuggccauccucaaggggaucuacaacgucgcgaccugcggccuguucgggcugguguccuuccuccugcugugcggccgcagcugcuccacgaccuacaaggggguguacgagcuccagacccuggagcuggacauggccagccucaacaugaccaugccgcuguccugcacgaagaacaacagccaccacuacaucauggucggcaacgagaccggccuggagcucacccugaccaacacguccaucaucaaccacaaguucugcaaccugagcgacgcccacaagaagaaccucuacgaccacgcccugauguccaucaucagcaccuuccaccuguccauccccaacuucaaccaguacgaggccaugagcugcgacuucaacgggggcaagaucuccgugcaguacaaccucagccacaccuacgcgaucgacgccgccaaccacugcgggaccaucgccaacggcgugcugcagacguucaugcggauggcguggggcggguccuacaucgcccuggacagcggcaagggguccugggacugcaucaugaccagcuaccaguaccucaucauccagaacaccaccugggaggaccacugccaguucucccgccccagccccaucggcuaccuggggcugcucagccagcggacgcgcgacaucuacaucucccggcgccugcugggcaccuucaccuggacccucagcgacuccgagggcaacgagacgcccgggggcuacugccugacccgguggaugcugaucgaggccgagcucaagugcuucgggaacaccgccgucgccaagugcaacgagaagcacgacgaggaguucugcgacaugcugcgccuguucgacuucaacaagcaggcgauccggcgccucaagaccgaggcccagaugagcauccagcugaucaacaaggccgugaacgcccugaucaacgaccagcucaucaugaagaaccaccuccgggacaucaugggcauccccuacugcaacuacuccaaguacugcuaccugaaccacacggugaccgggaagaccagccugccccgcugcugccuggucuccaacggcagcuaccugaacgagacccacuucuccgacgacaucgagcagcaggccgacaacaugaucacggagaugcuccagaaggaguacauggaccggcagggcaagaccccgcuggggcugguggaccucuucguguucagcaccuccuucuaccugaucagcaucuuccugcaccuggucaagaucccgacccaccgccacgugaucggcaagcccugccccaagccccaccggcucaaccacauggggaucugcuccugcggccuguacaagcacccgggggugcccgucaaguggaagcgcugaggacuagucccuguucccagagcccacuuuuuuuucuuuuuuugaaauaaaauagccugucuuucagaucucaaaggcucuuuucagagccaccaaaaaaaaaaaaaaaaaaaaaaaaaaaaaaaaaaaaaaaaaaaaaaaaaaaaaaaaaaaaaaaaaaaaaaaaaaaaaaaaaaaaaaaaaaaaaaaaaaaaa

SEQ ID NO: 38903 - RNA, 1764 nt, Artificial Sequence
  mRNA product Design a-2 (hSL-A100) comprising derived and/or modified sequence from LASV(LASV237-NIG-2010;Clade II)__AIT17638__GPCmut11 (opt1)
aggagaguccgcucagccagguugcagaagcggcuuagcguguguccuaaucuucucucugcguguagguaggccugugccgcaaacaagcuuaccaugggccagaucaucaccuucuuccaggaggugccccacgucaucgaggaggugaugaacaucgugcugaucgcccucagccugcuggccauccucaaggggaucuacaacgucgcgaccugcggccuguucgggcugguguccuuccuccugcugugcggccgcagcugcuccacgaccuacaaggggguguacgagcuccagacccuggagcuggacauggccagccucaacaugaccaugccgcuguccugcacgaagaacaacagccaccacuacaucauggucggcaacgagaccggccuggagcucacccugaccaacacguccaucaucaaccacaaguucugcaaccugagcgacgcccacaagaaggaccucuacgaccacgcccugauguccaucaucagcaccuuccaccuguccauccccaacuucaaccaguacgaggccaugagcugcgacuucaacgggggcaagaucuccgugcaguacaaccucagccacaccuacgcgguggacgccgccaaccacugcgggaccaucgccaacggcguccugcagacguucaugcggauggcguggggcggguccuacaucgcccuggacagcggcaagggguccugggacugcaucaugaccagcuaccaguaccucaucauccagaacaccaccugggaggaccacugccaguucucccgccccagccccaucggcuaccuggggcugcucagccagcggacgcgcgacaucuacaucucccggcgccugcugggcaccuucaccuggacccucagcgacuccgagggcaacgagacgcccgggggcuacugccugacccgguggaugcugaucgaggccgagcucaagugcuucgggaacaccgccguggccaagugcaacgagaagcacgacgaggaguucugcgacaugcugcgccuguucgacuucaacaagcaggcgauccggcgccucaagaccgaggcccagaugagcauccagcugaucaacaaggccgugaacgcccugaucaacgaccagcucaucaugaagaaccaccuccgggacaucaugggcauccccuacugcaacuacuccaaguacugcuaccugaaccacacggucaccgggaagaccagccugccccgcugcugccugguguccaacggcagcuaccugaacgagacccacuucuccgacgacaucgagcagcaggccgacaacaugaucacggagcuccugcagaaggaguacauggaccggcagggcaagaccccgcuggggcucguggaccuguucgucuucagcaccuccuucuaccugaucagcaucuuccugcaccucaucaagaucccgacccaccgccacaucacgggcaagcccugccccaagccccaccggcugaaccacauggggaucugcuccugcggccuguacaagcacccgggggugcccgugaaguggaagcgcugaggacuagucccuguucccagagcccacuuuuuuuucuuuuuuugaaauaaaauagccugucuuucagaucucaaaggcucuuuucagagccaccaaaaaaaaaaaaaaaaaaaaaaaaaaaaaaaaaaaaaaaaaaaaaaaaaaaaaaaaaaaaaaaaaaaaaaaaaaaaaaaaaaaaaaaaaaaaaaaaaaaaa

SEQ ID NO: 38904 - RNA, 1764 nt, Artificial Sequence
  mRNA product Design a-2 (hSL-A100) comprising derived and/or modified sequence from LASV(LASV253-NIG-2011;Clade II)__AIT17670__GPCmut11 (opt1)
aggagaguccgcucagccagguugcagaagcggcuuagcguguguccuaaucuucucucugcguguagguaggccugugccgcaaacaagcuuaccaugggccagaucaucaccuucuuccaggaggugccccacgucaucgaggaggugaugaacaucgugcugaucgcccucagccugcuggccauccucaaggggaucuacaacgucgcgaccugcggccuguucgggcugguguccuuccuccugcugugcggccgcagcugcuccacgaccuacaaggggguguacgagcuccagacccuggagcuggacauggccagccucaacaugaccaugccgcuguccugcacgaagaacaacagccaccacuacaucauggucggcaacgagaccggccuggagcucacccugaccaacacguccaucaucaaccacaaguucugcaaccugagcgacgcccacaagaagaaccucuacgaccacgcccugauguccaucaucagcaccuuccaccuguccauccccaacuucaaccaguacgaggccaugagcugcgacuucaacgggggcaagaucuccgugcaguacaaccucagccacaccuacgcgguggacgccgccaaccacugcgggaccaucgccaacggcguccugcagacguucaugcggauggcguggggcggguccuacaucgcccuggacagcggcaagggguccugggacugcaucaugaccagcuaccaguaccucaucauccagaacaccaccugggaggaccacugccaguucucccgccccagccccaucggcuaccuggggcugcucagccagcggacgcgcgacaucuacaucucccggcgccugcugggcaccuucaccuggacccucagcgacuccgagggcaacgagacgcccgggggcuacugccugacccgguggaugcugaucgaggccgagcucaagugcuucgggaacaccgccguggccaagugcaacgagaagcacgacgaggaguucugcgacaugcugcgccuguucgacuucaacaagcaggcgauccggcgccucaaggccgaggcccagaugagcauccagcugaucaacaaggccgugaacgcccugaucaacgaccagcucaucaugaagaaccaccuccgggacaucaugggcaucccguacugcaacuacuccaaguacugcuaccugaaccacaccgucacggggcgcaccagccugccccggugcugccugguguccaacggcagcuaccugaacgagacccacuucuccgacgacaucgagcagcaggcggacaacaugaucaccgagcuccugcagaaggaguacaucgaccgccagggcaagacgccccuggggcucguggaccuguucgucuucagcaccuccuucuaccugaucagcaucuuccugcaccucgugaagaucccgacccaccggcacaucaucggcaagcccugccccaagccccaccgccugaaccacauggggaucugcuccugcggccuguacaagcacccgggggugcccgucaaguggaagcggugaggacuagucccuguucccagagcccacuuuuuuuucuuuuuuugaaauaaaauagccugucuuucagaucucaaaggcucuuuucagagccaccaaaaaaaaaaaaaaaaaaaaaaaaaaaaaaaaaaaaaaaaaaaaaaaaaaaaaaaaaaaaaaaaaaaaaaaaaaaaaaaaaaaaaaaaaaaaaaaaaaaaa

SEQ ID NO: 38905 - RNA, 1764 nt, Artificial Sequence
  mRNA product Design a-2 (hSL-A100) comprising derived and/or modified sequence from LASV(LASV254-NIG-2011;Clade II)__AIT17674__GPCmut11 (opt1)
aggagaguccgcucagccagguugcagaagcggcuuagcguguguccuaaucuucucucugcguguagguaggccugugccgcaaacaagcuuaccaugggccagaucaucaccuucuuccaggaggugccccacgucaucgaggaggugaugaacaucgugcugaucgcccucagccugcuggccauccucaaggggaucuacaacgucgcgaccugcggccuguucgggcugguguccuuccuccugcugugcggccgcagcugcuccacgaccuacaaggggguguacgagcuccagacccuggagcuggacaugaccaaccucaacaugacgaugccgcugagcugcaccaagaacaacucccaccacuacaucauggucggcaacgagaccggccuggagcucacccugacgaacaccagcaucaucaaccacaaguucugcaaccuguccgacgcccacaagaagaaccucuacaaccacgcccugaugagcaucaucuccaccuuccaccugagcauccccaacuucaaccaguacgaggccauguccugcgacuucaacgggggcaagaucagcgugcaguacaaccucucccacagcuacgccguggacgcggccaaccacugcgggaccaucgccaacggcguccugcagacguucaugcggauggccuggggcggguccuacaucgcgcuggacagcggcaaggggaacugggacugcaucaugaccuccuaccaguaccucaucauccagaacaccaccugggaggaccacugccaguucagccgccccucccccaucggcuaccuggggcugcucagccagcggacgcgcgacaucuacaucagccggcgccugcugggcaccuucaccuggacccucuccgacagcgagggcaacgagacgcccgggggcuacugccugacccgguggaugcugaucgaggccgagcucaagugcuucgggaacaccgccguggccaagugcaacgagaagcacgacgaggaguucugcgacaugcugcgccuguucgacuucaacaagcaggccauccggcgccucaagaccgaggcgcaggccaacauccagcugaucaacaaggccgugaacgcccugaucaacgaccagcucaucaugaagaaccaccuccgggacaucaugggcauccccuacugcaacuacuccaaguacugcuaccugaaccacacggucaccgggaagaccagccugccccgcugcugccugguguccaacggcagcuaccugaacgagacccacuucuccgacgacaucgagcagcaggccgacaacaugaucacggagcuccugcagaaggaguacauggaccggcagggcaagaccccgcuggggcucguggaccuguucgucuucagcaccuccuucuaccugaucagcaucuuccugcaccucgugaagaucccgacccaccgccacgugaucggcaagcccugccccaagccccaccggcugaaccacauggggaucugcuccugcggccuguacaagcacccggggguccccgugaaguggaagcgcugaggacuagucccuguucccagagcccacuuuuuuuucuuuuuuugaaauaaaauagccugucuuucagaucucaaaggcucuuuucagagccaccaaaaaaaaaaaaaaaaaaaaaaaaaaaaaaaaaaaaaaaaaaaaaaaaaaaaaaaaaaaaaaaaaaaaaaaaaaaaaaaaaaaaaaaaaaaaaaaaaaaaa

SEQ ID NO: 38906 - RNA, 1764 nt, Artificial Sequence
  mRNA product Design a-2 (hSL-A100) comprising derived and/or modified sequence from LASV(Nig08-A19;Clade III)__ADU56618__GPCmut11 (opt1)
aggagaguccgcucagccagguugcagaagcggcuuagcguguguccuaaucuucucucugcguguagguaggccugugccgcaaacaagcuuaccaugggccagaucgugaccuucuuccaggaggucccccacgugaucgaggaggugaugaacaucguccugaucgcccucagcauccuggccauccugaaggggcucuacaacaucgcgaccugcggccugaucgggcuggugacguuccuccugcuguccggccgcagcugcuccaugaccuacaaggggguguacgagcuccagacccuggagcugaacaugaacacccucaacaugacgaugccgcugagcugcaccaagaacaacucccaccacuacaucauggucggcaacgagaccggccuggagcucacccugacgaacaccagccugcuccaccacaaguucugcaaccuguccgacgcccacaagaagaaccuguacgaccacacccucaugagcaucaucuccaccuuccaccugagcauccccaacuucaaccaguacgaggccauguccugcgacuucaacgggggcaagaucacggugcaguacaaccugagccacuccuacgccaucgacgccgcgaaccacugcgggaccguggccaacggcguccuccagaccuucaugcggauggccuggggcgggagcuacaucgcccuggacuccggccgcgggaagugggacugcaucaugaccagcuaccaguaccugaucauccagaacacgaccugggaggaccacugccaguucucccggcccagccccaucggcuaccucgggcugcugucccagcgcacccgggacaucuacaucagccgccggcuccugggcaccuucacguggacccugagcgacuccgagggcaacgagacccccgggggcuacugccucacccgcuggaugcugaucgaggcggagcugaagugcuucgggaacacggccguggccaagugcaacgagaagcacgacgaggaguucugcgacaugcuccggcuguucgacuucaacaagcaggccauccgccggcugaaggccgaggcgcagaugagcauccagcucaucaacaaggccgugaacgcccugaucaacgaccagcugaucaugaagaaccaccuccgcgacaucaugggcauccccuacugcaacuacuccaaguacugcuaccugaaccacaccagcaccgggcggaccucccugccccgcugcugccucgucagcaacggcuccuaccugaacgagacgcacuucagcgacgacaucgagcagcaggccgacaacaugaucaccgagaugcugcagaaggaguaccucgaccggcagggcaagaccccgcuggggcugguggaccuguucguguucuccaccagcuucuaccucaucuccaucuuccugcaccuggucaagaucccgacgcaccgccacaucgugggcaagcccugccccaagccccaccggcucaaccacauggggaucugcagcugcggccuguacaagcagccgggggugcccguccgcuggaagcggugaggacuagucccuguucccagagcccacuuuuuuuucuuuuuuugaaauaaaauagccugucuuucagaucucaaaggcucuuuucagagccaccaaaaaaaaaaaaaaaaaaaaaaaaaaaaaaaaaaaaaaaaaaaaaaaaaaaaaaaaaaaaaaaaaaaaaaaaaaaaaaaaaaaaaaaaaaaaaaaaaaaaa

SEQ ID NO: 38907 - RNA, 1767 nt, Artificial Sequence
  mRNA product Design a-2 (hSL-A100) comprising derived and/or modified sequence from LASV(G1180-SLE-2010;Clade IV)__AIT17168__GPCmut11 (opt1)
aggagaguccgcucagccagguugcagaagcggcuuagcguguguccuaaucuucucucugcguguagguaggccugugccgcaaacaagcuuaccaugggccagaucgugaccuucuuccaggaggucccccacgugaucgaggaggugaugaacaucguccugaucgcccucagcauccuggccgugcugaaggggcucuacaacuucgcgaccugcggccugguggggcugcucaccuuccugcugcucugcggccgcuccugcaccgccagccgguacaagggggucuacgagcugcagacccuggagcucaacauggagacccugaacaugacgaugccgcuguccugcaccaagaacaacagccaccacuacaucauggugggcaacgagaccggccucgagcugacccugacgaacaccuccaucaucaaccacaaguucugcaaccucagcgacgcccacaagaagaaccuguacgaccacgcccugauguccaucaucagcaccuuccaccucuccauccccaacuucaaccaguacgaggccaugagcugcgacuucaacgggggcaagaucuccgugcaguacaaccugagccacuccuacgcgggggacgccgccaaccacugcggcaccgucgccaacggggugcugcagacguucaugcgcauggcguggggcggcagcuacaucgcccucgacuccgggcacggcagcugggacugcaucaugaccuccuaccaguaccugaucauccagaacaccaccugggaggaccacugccaguucagccggcccucccccaucggguaccugggccuccugagccagcgcacgcgggacaucuacaucagccgccggcugcucggcaccuucaccuggacccuguccgacagcgaggggaaggacacgccgggcggguacugccugacccgcuggaugcucaucgaggccgagcugaagugcuucggcaacaccgccguggccaagugcaacgagaagcacgacgaggaguucugcgacaugcugcggcuguucgacuucaacaagcaggcgauccagcgccugaaggccgaggcccagauguccauccagcugaucaacaaggccgucaacgcccucaucaacgaccagcugaucaugaagaaccaccuccgggacaucauggggauccccuacugcaacuacagcaaguacugcuaccucaaccacaccacgaccggcaagaccucccugcccaagugcugccuggugagcaacggcuccuaccucaacgagacccacuucagcgacgacaucgagcagcaggcggacaacaugaucacggagaugcugcagaaggaguacauggagcgccaggggaagacgccccugggccucguggaccuguucgucuucuccaccagcuucuaccugaucuccaucuuccugcaccucgugaagaucccgacccaccggcacaucgugggcaagagcugccccaagccccaccgccugaaccacauggggaucugcuccugcgggcuguacaagcagcccggcgucccggugaaguggaagcggugaggacuagucccuguucccagagcccacuuuuuuuucuuuuuuugaaauaaaauagccugucuuucagaucucaaaggcucuuuucagagccaccaaaaaaaaaaaaaaaaaaaaaaaaaaaaaaaaaaaaaaaaaaaaaaaaaaaaaaaaaaaaaaaaaaaaaaaaaaaaaaaaaaaaaaaaaaaaaaaaaaaaa

SEQ ID NO: 38908 - RNA, 1767 nt, Artificial Sequence
  mRNA product Design a-2 (hSL-A100) comprising derived and/or modified sequence from LASV(G1442-SLE-2011;Clade IV)__AIT17180__GPCmut11 (opt1)
aggagaguccgcucagccagguugcagaagcggcuuagcguguguccuaaucuucucucugcguguagguaggccugugccgcaaacaagcuuaccaugggccagaucgugaccuucuuccaggaggucccccacgugaucgaggaggugaugaacaucguccugaucgcccucagcauccuggccgugcugaaggggcucuacaacguggcgaccugcggccugaucgggcuggucacguuccuccugcugugcggccgcuccugcaccaccacccucuacaaggggguguacgagcugcagacgcuggagcucaacauggagacccugaacaugaccaugccgcugagcugcaccaagaacaacucccaccacuacauccgggugggcaacgagacgggccucgagcugacccugaccaacaccagcaucaucaaccacaaguucugcaaccucuccgacgcccacaagaagaaccuguacgaccacgcccugaugagcaucaucuccacguuccaccucagcauccccaacuucaaccaguacgaggccauguccugcgacuucaacgggggcaagaucagcguccaguacaaccugucccacagcuacgccggggacgcggccaaccacugcggcaccguggccaacggggugcugcagaccuucaugcgcauggccuggggcggcuccuacaucgcgcucgacagcgggcggggcaacugggacugcaucaugaccuccuaccaguaccugaucauccagaacacgaccugggacgaccacugccaguucagccgccccucccccaucggguaccugggccuccugagccagcggacccgcgacgucuacaucucccggcgccugcucggcaccuucacguggacccugagcgacagcgaggggaaggacaccccgggcggguacugccugacccgguggaugcucaucgaggccgagcugaagugcuucggcaacacggccguggccaagugcaacgagaagcacgacgaggaguucugcgacaugcugcgccucuucgacuucaacaagcaggccauccagcggcugaaggcggaggcccagauguccauccagcugaucaacaaggccgugaacgcccucaucaacgaccagcugaucaugaagaaccaccuccgcgacaucauggggauccccuacugcaacuacagcaaguacugcuaccugaacaacaccgccaccggcaagaccucccugcccaagugcugccugaucagcaacggcuccuaccucaacgagacgcacuucagcgacgacaucgagcaggaggcggacaacaugaucaccgagaugcugcagaaggaguacauggagcggcaggggaagacgccccugggccucgucgaccuguucguguucuccaccagcuucuaccugaucuccaucuuccugcaccucgugaagaucccgacccaccgccacaucgucggcaagagcugccccaagccccaccggcugaaccacauggggaucugcuccugcgggcuguacaagcagcccggcgugccggugcgcuggaagcggugaggacuagucccuguucccagagcccacuuuuuuuucuuuuuuugaaauaaaauagccugucuuucagaucucaaaggcucuuuucagagccaccaaaaaaaaaaaaaaaaaaaaaaaaaaaaaaaaaaaaaaaaaaaaaaaaaaaaaaaaaaaaaaaaaaaaaaaaaaaaaaaaaaaaaaaaaaaaaaaaaaaaa

SEQ ID NO: 38909 - RNA, 1767 nt, Artificial Sequence
  mRNA product Design a-2 (hSL-A100) comprising derived and/or modified sequence from LASV(G3010-SLE-2013;Clade IV)__AIT17344__GPCmut11 (opt1)
aggagaguccgcucagccagguugcagaagcggcuuagcguguguccuaaucuucucucugcguguagguaggccugugccgcaaacaagcuuaccaugggccagaucgugaccuucuuccaggaggucccccacgugaucgaggaggugaugaacaucguccugaucgcccucagcauccuggccgugcugaaggggcucuacaacuucgcgaccugcggccugguggggcuggucacguuccuccugcugugcggccgcuccugcaccaccagccucuacaaggggguguacgagcugcagacccuggagcucaacauggagacgcugaacaugaccaugccgcuguccugcaccaagaacaacagccaccacuacaucauggugggcaacgagaccggccucgagcugacgcugaccaacaccuccaucaucaaccacaaguucugcaaccucagcgacgcccacaagaagaaccuguacaaccacgcccugauguccaucaucagcaccuuccaccucuccauccccaacuucaaccaguacgaggccaugagcugcgacuucaacgggggcaagaucuccguccaguacaaccugagccacuccuacgccggggacgcggccagccacugcggcacgguggccaacggggugcugcagaccuucaugcggauggccuggggcggcuccuacaucgcgcucgacagcggguacggcaagugggacugcaucaugaccuccuaccaguaccugaucauccagaacaccacgugggaggaccacugccaguucagccgccccucccccaucggguaccugggccuccugagccagcggacccgcgacaucuacaucagccggcgccugcucggcaccuucaccuggacgcuguccgacagcgaggggaaggacaccccgggcggguacugccugacccgguggaugcucaucgaggccgagcugaagugcuucggcaacaccgccgucgccaagugcaacgagaagcacgacgaggaguucugcgacaugcugcgccucuucgacuucaacaagcaggccauccagcggcugaagacggaggcgcagauguccauccagcugaucaacaaggccgugaacgcccucaucaacgaccagcugaucaugaagaaccaccuccgcgacaucauggggauccccuacugcaacuacagcaaguacugcuaccugaaccacaccaccaccggcaagacgucccugcccaagugcugccuggugagcaacggcuccuaccucaacgagacccacuucagcgacgacaucgagcagcaggccgacaacaugaucaccgagaugcugcagaaggaguacauggagcggcaggggaagacgccccugggccucgucgaccuguucguguucuccaccagcuucuaccugaucuccaucuuccugcaccucgugaagaucccgacccaccgccacaucgucggcaagagcugccccaagccccaccggcugaaccacauggggaucugcuccugcgggcuguacaagcagcccggcgugccggugcgcuggaagcggugaggacuagucccuguucccagagcccacuuuuuuuucuuuuuuugaaauaaaauagccugucuuucagaucucaaaggcucuuuucagagccaccaaaaaaaaaaaaaaaaaaaaaaaaaaaaaaaaaaaaaaaaaaaaaaaaaaaaaaaaaaaaaaaaaaaaaaaaaaaaaaaaaaaaaaaaaaaaaaaaaaaaa

SEQ ID NO: 38910 - RNA, 1767 nt, Artificial Sequence
  mRNA product Design a-2 (hSL-A100) comprising derived and/or modified sequence from LASV(G502-SLE-2009;Clade IV)__AIT17126__GPCmut11 (opt1)
aggagaguccgcucagccagguugcagaagcggcuuagcguguguccuaaucuucucucugcguguagguaggccugugccgcaaacaagcuuaccaugggccagaucgugaccuucuuccaggaggucccccacgugaucgaggaggugaugaacaucguccugaucgcccucagcauccuggccgugcugaaggggcucuacaacuucgcgaccugcggccugguggggcugcucacguuccugcugcucugcggccgcuccugcaccaccgggcuguacaagggcgucuacgagcugcagacccucgagcugaacauggagacgcugaacaugaccaugccgcucagcugcaccaagaacaacucccaccacuacaucauggugggcaacgagaccgggcuggagcugacgcucaccaacaccagcaucaucaaccacaaguucugcaaccuguccgacgcccacaagaagaaccuguacgaccacgcccucaugagcaucaucuccaccuuccaccugagcauccccaacuucaaccaguacgaggccauguccugcgacuucaacggcgggaagaucagcgugcaguacaaccugucccacagcuacgccggcgacgcggccgaccacugcgggacggucgccaacggcgugcuccagaccuucaugcggauggccuggggcggguccuacaucgcgcuggacagcggccgcgggcggugggacugcaucaugaccuccuaccaguaccugaucauccagaacaccacgugggaggaccacugccaguucagccgccccucccccaucggcuaccucggccugcugagccagcggacccgcgacaucuacaucucccggcgccuccuggggaccuucaccuggacgcugagcgacagcgagggcaaggacacccccgggggcuacugccucacccgguggaugcugaucgaggccgagcugaagugcuucgggaacaccgccguggccaagugcaacgagaagcacgacgaggaguucugcgacaugcuccgccuguucgacuucaacaagcaggccauccagcggcugaaggcggaggcccagauguccauccagcucaucaacaaggccgucaacgcccugaucaacgaccagcuggugaugaagaaccaccuccgcgacaucaugggcauccccuacugcaacuacagccgguacugcuaccugaaccacacgaccaccggccgcaccucccugcccaagugcugccucgugagcaacggguccuaccugaacgagacgcacuucagcgacgacaucgagcagcaggccgacaacaugaucaccgagaugcugcagaaggaguacauggagcggcagggcaagaccccgcucgggcuggucgaccuguucguguucuccaccagcuucuaccugaucuccaucuuccuccaccuggugaagaucccgacgcaccgccacaucgucggcaagagcugccccaagccccaccggcugaaccacauggggaucugcuccugcggccucuacaagcagcccggcgugccggugaaguggaagcgcugaggacuagucccuguucccagagcccacuuuuuuuucuuuuuuugaaauaaaauagccugucuuucagaucucaaaggcucuuuucagagccaccaaaaaaaaaaaaaaaaaaaaaaaaaaaaaaaaaaaaaaaaaaaaaaaaaaaaaaaaaaaaaaaaaaaaaaaaaaaaaaaaaaaaaaaaaaaaaaaaaaaaa

SEQ ID NO: 38911 - RNA, 1767 nt, Artificial Sequence
  mRNA product Design a-2 (hSL-A100) comprising derived and/or modified sequence from LASV(G733-SLE-2010;Clade IV)__AIT17154__GPCmut11 (opt1)
aggagaguccgcucagccagguugcagaagcggcuuagcguguguccuaaucuucucucugcguguagguaggccugugccgcaaacaagcuuaccaugggccagaucgugaccuucuuccaggaggucccccacgugaucgaggaggugaugaacaucguccugaucgcccucagcauccuggccgugcugaaggggcucuacaacuucgcgaccugcggcaucguggggcuggucuccuuccugcuccugugcggccgcagcugcacgaccucccuguacaaggggguguacgagcuccagacccuggagcugaacauggagacccucaacaugacgaugccgcugagcugcaccaagaacaacucccaccacuacaucauggugggcaacgagaccggccuggagcucacccugacgaacaccagcaucaucaaccacaaguucugcaaccuguccgacgcccacaagaagaaccucuacgaccacgcccugaugagcaucaucuccaccuuccaccugagcauccccaacuucaaccaguacgaggccauguccugcgacuucaacgggggcaagaucagcguccaguacaaccucucccacagcuacgccggggacgcggccaaccacugcggcaccaucgccaacggggugcugcagacguucaugcggauggccuggggcggcuccuacaucgcgcuggacagcgggcgcgaccggugggacugcaucaugaccuccuaccaguaccucaucauccagaacaccaccugggaggaccacugccaguucagccgccccucccccaucggcuaccuggggcugcucagccagcggacgcgcgacaucuacaucagccggcgccugcugggcaccuucaccuggacccucuccgacagcgagggcaaggacacgcccgggggcuacugccugacccgguggaugcugaucgaggccgagcucaagugcuucgggaacaccgccguggccaagugcaacgagaagcacgacgaggaguucugcgacaugcugcgccuguucgacuucaacaagcaggccauccagcggcucaaggcggaggcccagauguccauccagcugaucaacaaggccgucaacgcccugaucaacgaccagcucaucaugaagaaccaccuccgcgacaucaugggcauccccuacugcaacuacagcaaguacugcuaccugaaccacaccacgaccgggaagaccucccugcccaagugcugccuggugagcaacggcuccuaccugaacgagacccacuucagcgacgacaucgagcagcaggccgacaacaugaucacggagaugcuccagaaggaguacauggagcggcagggcaagaccccgcuggggcugguggaccucuucgucuucuccaccagcuucuaccugaucuccaucuuccugcaccuggugaagaucccgacccaccgccacguggucggcaagagcugccccaagccccaccggcucaaccacauggggaucugcuccugcggccuguacgggcagcccggcgugccggugaaguggaagcgcugaggacuagucccuguucccagagcccacuuuuuuuucuuuuuuugaaauaaaauagccugucuuucagaucucaaaggcucuuuucagagccaccaaaaaaaaaaaaaaaaaaaaaaaaaaaaaaaaaaaaaaaaaaaaaaaaaaaaaaaaaaaaaaaaaaaaaaaaaaaaaaaaaaaaaaaaaaaaaaaaaaaaa

SEQ ID NO: 38912 - RNA, 1767 nt, Artificial Sequence
  mRNA product Design a-2 (hSL-A100) comprising derived and/or modified sequence from MOPV/LASV reassortant(IGS-1;Clade IV)__AFY05576__GPCmut11 (opt1)
aggagaguccgcucagccagguugcagaagcggcuuagcguguguccuaaucuucucucugcguguagguaggccugugccgcaaacaagcuuaccaugggccagaucgugaccuucuuccaggaggucccccacgugaucgaggaggugaugaacaucguccugaucgcccucagcgugcuggccgugcugaaggggcucuacaacuucgcgaccugcggccuggucgggcuggugacguuccuccugcugugcggccgcuccugcaccaccagccucuacaaggggguguacgagcugcagacccuggagcucaacauggagacgcugaacaugaccaugccgcuguccugcaccaagaacaacagccaccacuacaucauggucggcaacgagaccggccucgagcugacgcugaccaacaccuccaucaucaaccacaaguucugcaaccucagcgacgcccacaagaagaaccuguacgaccacgcccugauguccaucaucagcaccuuccaccucuccauccccaacuucaaccaguacgaggccaugagcugcgacuucaacgggggcaagaucuccgugcaguacaaccugagccacuccuacgccggggacgcggccaaccacugcggcacgguggccaacgggguccugcagaccuucaugcggauggccuggggcggcagcuacaucgcgcucgacuccgggcgcggcaacugggacugcaucaugaccagcuaccaguaccugaucauccagaacaccacgugggaggaccacugccaguucucccggcccagccccaucggguaccugggccuccugucccagcgcacccgggacaucuacaucagccgccggcugcucggcaccuucaccuggacgcugagcgacuccgagggggaggacaccccgggcggguacugccugacccgcuggaugcucaucgaggccgagcugaagugcuucggcaacaccgccguggccaagugcaacgagaagcacgacgaggaguucugcgacaugcugcggcuguucgacuucaacaagcaggccauccagcgccugaaggcggaggcccagaugagcauccagcugaucaacaaggccgugaacgcccucaucaacgaccagcugaucaugaagaaccaccuccgggacaucauggggauccccuacugcaacuacuccaaguacugcuaccucaaccacacgaccaccggccgcaccagccugcccaagugcugccuggucuccaacggcagcuaccucaacgagacgcacuucuccgacgacaucgagcagcaggccgacaacaugaucaccgagaugcugcagaaggaguacauggagcggcaggggaagacgccccugggccucguggaccuguucguguucagcaccuccuucuaccugaucagcaucuuccugcaccucgucaagaucccgacccaccgccacaucguggggaaguccugccccaagccccaccggcugaaccacaugggcaucugcagcugcgggcuguacaagcagcccggcgugccggucaaguggaagcgcugaggacuagucccuguucccagagcccacuuuuuuuucuuuuuuugaaauaaaauagccugucuuucagaucucaaaggcucuuuucagagccaccaaaaaaaaaaaaaaaaaaaaaaaaaaaaaaaaaaaaaaaaaaaaaaaaaaaaaaaaaaaaaaaaaaaaaaaaaaaaaaaaaaaaaaaaaaaaaaaaaaaaa

SEQ ID NO: 38913 - RNA, 1767 nt, Artificial Sequence
  mRNA product Design a-2 (hSL-A100) comprising derived and/or modified sequence from LASV(LM765-SLE-2012;Clade IV)__AIT17814__GPCmut11 (opt1)
aggagaguccgcucagccagguugcagaagcggcuuagcguguguccuaaucuucucucugcguguagguaggccugugccgcaaacaagcuuaccaugggccagaucgugaccuucuuccaggaggucccccacgugaucgaggaggugaugaacaucguccugaucgcccucagcauccuggccgugcugaaggggcucuacaacuucgcgaccugcggccugguggggcuggucacguuccuccugcugugcggccgcuccugcaccaccagccucuacaaggggguguacgagcugcagacccuggagcucaacauggagacgcugaacaugaccaugccgcuguccugcaccaagaacaacagccaccacuacaucauggugggcaacgagaccggccucgagcugacgcugaccaacaccuccaucaucgaccacaaguucugcaaccucagcgacgcccaccggaagaaccuguacgaccacgcccugauguccaucaucagcaccuuccaccucuccauccccaacuucaaccaguacgaggccaugagcugcgacuucaacgggggcaagaucuccguccaguacaaccugagccacuccuacgccaaggacgcggccgaccacugcgggacgguggccaacggcgugcugcagaccuucaugcgcauggccuggggcgggagcuacaucgcgcucgacuccggccgggggcgcugggacugcaucaugaccagcuaccaguaccugaucauccagaacaccacgugggaggaccacugccaguucucccggcccagccccaucggcuaccuggggcuccugucccagcgcacccgggacaucuacaucagccgccggcugcucggcaccuucaccuggacgcugagcgacuccgagggcaaggacacccccgggggcuacugccugacccgcuggaugcucaucgaggccgagcugaagugcuucgggaacaccgccgucgccaagugcaacgagaagcacgacgaggaguucugcgacaugcugcggcuguucgacuucaacaagcaggccauccagcgccugaaggcggaggcccagaugagcauccagcugaucaacaaggccgugaacgcccucaucaacgaccagcugaucaugaagaaccaccuccgggacaucaugggcauccccuacugcaacuacuccaaguacugcuaccucaaccacacgaccaccgggaagaccagccugcccaagugcugccugguguccaacggcagcuaccucaacgagacgcacuucuccgacgacaucgagcagcaggccgacaacaugaucaccgagaugcugcagaaggaguacauggagcgccagggcaagaccccgcuggggcucgucgaccuguucguguucagcaccuccuucuaccugaucagcaucuuccugcaccucgugaagaucccgacgcaccggcacaucgucggcaagcccugccccaagccccaccgccugaaccacauggggaucugcuccugcggccuguacaagcagccgggggugcccgugaaguggaagcggugaggacuagucccuguucccagagcccacuuuuuuuucuuuuuuugaaauaaaauagccugucuuucagaucucaaaggcucuuuucagagccaccaaaaaaaaaaaaaaaaaaaaaaaaaaaaaaaaaaaaaaaaaaaaaaaaaaaaaaaaaaaaaaaaaaaaaaaaaaaaaaaaaaaaaaaaaaaaaaaaaaaaa

SEQ ID NO: 38914 - RNA, 1767 nt, Artificial Sequence
  mRNA product Design a-2 (hSL-A100) comprising derived and/or modified sequence from LASV(LM776-SLE-2012;Clade IV)__AIT17824__GPCmut11 (opt1)
aggagaguccgcucagccagguugcagaagcggcuuagcguguguccuaaucuucucucugcguguagguaggccugugccgcaaacaagcuuaccaugggccagaucgugaccuucuuccaggaggucccccacgugaucgaggaggugaugaacaucguccugaucgcccucagcauccuggccgugcugaaggggcucuacaacuucgcgaccugcggccugguggggcuggucacguuccuccugcugugcggccgcuccugcaccaccagcguguacaaggggguguacgagcuccagacccuggagcugaacauggagacgcucaacaugaccaugccgcuguccugcaccaagaacaacagccaccacuacaucauggucggcaacgagaccggccuggagcucacgcugaccaacaccuccaucaucaaccacaaguucugcaaccugagcgacgcccacaagaagaaccucuacgaccacgcccugauguccaucaucagcaccuuccaccuguccauccccaacuucaaccaguacgaggccaugagcugcgacuucaacgggggcaagaucuccgugcaguacaaccucagccacuccuacgccggggacgcggccaaccacugcggcacgguggccaacgggguccugcagaccuucaugcggauggccuggggcggcagcuacaucgcgcuggacuccgggcacggcaagugggacugcaucaugaccagcuaccaguaccucaucauccagaacaccacgugggaggaccacugccaguucucccgccccagccccaucggguaccugggccugcucucccagcggacccgcgacaucuacaucagccggcgccugcugggcaccuucaccuggacgcucagcgacuccgaggggaaggacaccccgggcggguacugccugacccgguggaugcugaucgaggccgagcucaagugcuucggcaacaccgccguggccaagugcaacgagaagcacgacgaggaguucugcgacaugcugcgccuguucgacuucaacaagcaggccauccagcggcucaaggcggaggcccagaugagcauccagcugaucaacaaggccgugaacgcccugaucaacgaccagcucaucaugaagaaccaccuccgcgacaucauggggauccccuacugcaacuacuccaaguacugcuaccugaaccacacgaccaccggcaagaccagccugcccaagugcugccuggucuccaacggcagcuaccugaacgagacgcacuucuccgacgacaucgagcagcaggccgacaacaugaucaccgagaugcuccagaaggaguacauggagcggcaggggaagacgccccugggccugguggaccucuucguguucagcaccuccuucuaccugaucagcaucuuccugcaccuggucaagaucccgacccaccgccacaucguggggaaguccugccccaagccccaccggcucaaccacaugggcaucugcagcugcgggcuguacaagcagcccggcgugccgguccgcuggaagcggugaggacuagucccuguucccagagcccacuuuuuuuucuuuuuuugaaauaaaauagccugucuuucagaucucaaaggcucuuuucagagccaccaaaaaaaaaaaaaaaaaaaaaaaaaaaaaaaaaaaaaaaaaaaaaaaaaaaaaaaaaaaaaaaaaaaaaaaaaaaaaaaaaaaaaaaaaaaaaaaaaaaaa

SEQ ID NO: 38915 - RNA, 1767 nt, Artificial Sequence
  mRNA product Design a-2 (hSL-A100) comprising derived and/or modified sequence from LASV(Mad39;Clade IV)__ANH09722__GPCmut11 (opt1)
aggagaguccgcucagccagguugcagaagcggcuuagcguguguccuaaucuucucucugcguguagguaggccugugccgcaaacaagcuuaccaugggccagaucgugaccuucuuccaggaggucccccacgugaucgaggaggugaugaacaucguccugaucgcccucagcauccuggccgugcugaaggggcucuacaacguggcgaccugcggccugaucgggcuggucacguuccuccugcugugcggccgcuccugcaccaccacccucuacaaggggguguacgagcugcaggcccuggagcucaacauggagacgcugaacaugaccaugccgcugagcugcaccaagaacaacucccaccacuacauccgggugggcaacgagaccggccucgagcugacgcugaccaacaccagccucaucaaccacaaguucugcaaccuguccgacgcccacaagaagaaccuguacgaccacgcccucaugagcaucaucuccaccuuccaccugagcauccccaacuucaaccaguacgaggccauguccugcgacuucaacgacgggaagaucagcguccaguacaaccugucccacacguacgcgggcgacaccgccaaccacugcgggaccguggccaacggcgugcuccagaccuucaugcgcauggccuggggcgggagcuacaucgcgcuggacuccggccgcgggggcugggacugcaucaugacgagcuaccaguaccugaucauccagaacaccaccugggaggaccacugccaguucucccggcccagccccaucggguaccucggccugcugucccagcggacccgcgacaucuacaucagccggcgccuccugggcacguucaccuggacccuguccgacagcgaggggaaggacaccccgggcggguacugccucacgcgguggaugcugaucgaggccgagcugaagugcuucggcaacaccgccgucgccaagugcaacgagaagcacgacgaggaguucugcgacaugcuccgccuguucgacuucaacaagcaggccauccagcggcugaaggcggaggcccagaugagcauccagcucaucaacaaggccgugaacgcccugaucaacgaccagcugaucaugaagaaccaccuccgcgacaucauggggauccccuacugcaacuacuccaaguacugcuaccugaaccacaccgugaccggcaagacgagccugcccaagugcugccucgucuccaacggcagcuaccugaacgagacccacuucuccgacgacaucgagcagcaggccgacaacaugaucaccgagaugcugcagaaggaguacauggagcggcaggggaagacgccccucggccugguggaccuguucguguucagcaccuccuucuaccugaucagcaucuuccuccaccuggucaagaucccgacccaccgccacgugguggggaagcccugccccaagccccaccggcugaaccacaugggcaucugcuccugcggguucuacaagcagccgggcguccccgugcgcuggaagcggugaggacuagucccuguucccagagcccacuuuuuuuucuuuuuuugaaauaaaauagccugucuuucagaucucaaaggcucuuuucagagccaccaaaaaaaaaaaaaaaaaaaaaaaaaaaaaaaaaaaaaaaaaaaaaaaaaaaaaaaaaaaaaaaaaaaaaaaaaaaaaaaaaaaaaaaaaaaaaaaaaaaaa

SEQ ID NO: 38916 - RNA, 1767 nt, Artificial Sequence
  mRNA product Design a-2 (hSL-A100) comprising derived and/or modified sequence from LASV(Z0947-SLE-2011;Clade IV)__AIT17840__GPCmut11 (opt1)
aggagaguccgcucagccagguugcagaagcggcuuagcguguguccuaaucuucucucugcguguagguaggccugugccgcaaacaagcuuaccaugggccagaucgugaccuucuuccaggaggucccccacgugaucgaggaggugaugaacaucguccugaucgcccucagcauccuggccgugcugaaggggcucuacaacuucgcgaccugcggccugguggggcuggucacguuccuccugcugugcggccgcuccugcaccaucagccucuacaaggggguguacgagcugcagacccuggagcucaacauggagacccugaacaugacgaugccgcuguccugcaccaagaacaacagccaccacuacaucauggugggcaacgagaccggccucgagcugacccugacgaacaccuccaucaucaaccacaaguucugcaaccucagcgacgcccacaagaagaaccuguacgaccacgcccugauguccaucaucagcaccuuccaccucuccauccccaacuucaaccaguacgaggccaugagcugcgacuucaacgggggcaagaucuccguccaguacaaccugagccacuccuacgccggggacgcggccaaccacugcggcaccguggccaacggggugcugcagacguucaugcggauggccuggggcggcagcuacaucgcgcucgacuccgggcgcgaccggugggacugcaucaugaccagcuaccaguaccugaucauccagaacaccaccugggaggaccacugccaguucucccgccccagccccaucggcuaccuggggcuccugucccagcggacgcgcgacaucuacaucagccggcgccugcucggcaccuucaccuggacccugagcgacuccgagggcaaggacacgcccgggggcuacugccugacccgguggaugcucaucgaggccgagcugaagugcuucgggaacaccgccgucgccaagugcaacgagaagcacgacgaggaguucugcgacaugcugcgccucuucgacuucaacaagcaggccauccagcggcugaaggcggaggcccagaugagcauccagcugaucaacaaggccgugaacgcccucaucaacgaccagcugaucaugaagaaccaccuccgcgacaucaugggcauccccuacugcaacuacuccaaguacugcuaccugaaccacaccacgaccgggaagaccagccugcccaagugcugccugguguccaacggcagcuaccucaacgagacccacuucuccgacgacaucgagcagcaggccgacaacaugaucacggagaugcugcagaaggaguacauggagcggcagggcaagaccccgcuggggcucgucgaccuguucguguucagcaccuccuucuaccugaucagcaucuuccugcaccucgugaagaucccgacccaccgccacaucgucggcaagcccugccccaagccccaccggcugaaccacauggggaucugcuccugcggccuguacaagcagccgggggugcccgugaaguggaagcgcugaggacuagucccuguucccagagcccacuuuuuuuucuuuuuuugaaauaaaauagccugucuuucagaucucaaaggcucuuuucagagccaccaaaaaaaaaaaaaaaaaaaaaaaaaaaaaaaaaaaaaaaaaaaaaaaaaaaaaaaaaaaaaaaaaaaaaaaaaaaaaaaaaaaaaaaaaaaaaaaaaaaaa

SEQ ID NO: 38917 - RNA, 1767 nt, Artificial Sequence
  mRNA product Design a-2 (hSL-A100) comprising derived and/or modified sequence from LASV(Josiah;Clade IV)__NP_694870__GPCmut11 (opt1)
aggagaguccgcucagccagguugcagaagcggcuuagcguguguccuaaucuucucucugcguguagguaggccugugccgcaaacaagcuuaccaugggccagaucgugaccuucuuccaggaggucccccacgugaucgaggaggugaugaacaucguccugaucgcccucagcgugcuggccgugcugaaggggcucuacaacuucgcgaccugcggccuggucgggcuggugacguuccuccugcugugcggccgcuccugcaccaccagccucuacaaggggguguacgagcugcagacccuggagcucaacauggagacgcugaacaugaccaugccgcuguccugcaccaagaacaacagccaccacuacaucauggucggcaacgagaccggccucgagcugacgcugaccaacaccuccaucaucaaccacaaguucugcaaccucagcgacgcccacaagaagaaccuguacgaccacgcccugauguccaucaucagcaccuuccaccucuccauccccaacuucaaccaguacgaggccaugagcugcgacuucaacgggggcaagaucuccgugcaguacaaccugagccacuccuacgccggggacgcggccaaccacugcggcacgguggccaacgggguccugcagaccuucaugcggauggccuggggcggcagcuacaucgcgcucgacuccgggcgcggcaacugggacugcaucaugaccagcuaccaguaccugaucauccagaacaccacgugggaggaccacugccaguucucccggcccagccccaucggguaccugggccuccugucccagcgcacccgggacaucuacaucagccgccggcugcucggcaccuucaccuggacgcugagcgacuccgaggggaaggacaccccgggcggguacugccugacccgcuggaugcucaucgaggccgagcugaagugcuucggcaacaccgccguggccaagugcaacgagaagcacgacgaggaguucugcgacaugcugcggcuguucgacuucaacaagcaggccauccagcgccugaaggcggaggcccagaugagcauccagcugaucaacaaggccgugaacgcccucaucaacgaccagcugaucaugaagaaccaccuccgggacaucauggggauccccuacugcaacuacuccaaguacugcuaccucaaccacacgaccaccggccgcaccagccugcccaagugcugccuggucuccaacggcagcuaccucaacgagacgcacuucuccgacgacaucgagcagcaggccgacaacaugaucaccgagaugcugcagaaggaguacauggagcggcaggggaagacgccccugggccugguggaccucuucguguucagcaccuccuucuaccugaucagcaucuuccugcaccucgucaagaucccgacccaccgccacaucguggggaaguccugccccaagccccaccggcugaaccacaugggcaucugcagcugcgggcuguacaagcagcccggcgugccggucaaguggaagcgcugaggacuagucccuguucccagagcccacuuuuuuuucuuuuuuugaaauaaaauagccugucuuucagaucucaaaggcucuuuucagagccaccaaaaaaaaaaaaaaaaaaaaaaaaaaaaaaaaaaaaaaaaaaaaaaaaaaaaaaaaaaaaaaaaaaaaaaaaaaaaaaaaaaaaaaaaaaaaaaaaaaaaa

SEQ ID NO: 38918 - RNA, 1764 nt, Artificial Sequence
  mRNA product Design a-2 (hSL-A100) comprising derived and/or modified sequence from LASV(LP;Clade I)__AAF86701__GPCmut11 (opt1)
aggagaguccgcucagccagguugcagaagcggcuuagcguguguccuaaucuucucucugcguguagguaggccugugccgcaaacaagcuuaccaugggccagaucaucaccuucuuccaggaggugccccacgucaucgaggaggugaugaacaucgugcugaucgcccucagccugcuggccauccucaaggggcuguacaacaucgcgaccugcggcaucaucgggcuggucgccuuccucuuccugugcggcaaguccugcagccugacgcucaagggcggguacgagcugcagacccuggagcucaacauggagacccugaacaugaccaugccgcuguccugcacgaagaacagcucccaccacuacauccgcgugggcaacgagaccgggcucgagcugacccugaccaacacgagcaucaucaaccacaaguucugcaaccucuccgacgcccacaagaagaaccuguacgaccacgcccugaugagcaucaucuccaccuuccaccucagcauccccaacuucaaccaguacgaggccauguccugcgacuucaacggcgggaagaucagcgugcaguacaaccugucccacagcuacgcgggcgacgccgccgagcacugcgggaccgucgccaacggcgugcugcagaccuucaugcggauggcguggggcgggcgcuacaucgcccucgacuccggcaaggggaacugggacugcaucaugacgagcuaccaguaccugaucauccagaacaccaccugggaggaccacugccaguucucccggcccagccccaucggcuaccugggccuccugucccagcgcacccgggacaucuacaucagccgccggcugcucgggacguucaccuggacccugagcgacuccgagggcaacgagacccccgggggcuacugccugacgcgcuggaugcucaucgaggccgagcugaagugcuucgggaacaccgccguggccaagugcaacgagaagcacgacgaggaguucugcgacaugcugcggcuguucgacuucaacaagcaggcgauccgccggcugaaggccgaggcccagaugagcauccagcugaucaacaaggccgucaacgcccucaucaacgaccagcugaucaugaagaaccaccuccgcgacaucaugggcauccccuacugcaacuacuccaaguacugcuaccucaaccacaccagcuccggccggaccagccugcccaagugcugccugaucuccaacgggagcuaccucaacgagacgcaguucuccgacgacaucgagcagcaggcggacaacaugaucaccgagaugcugcagaaggaguacaucgagcgccagggcaagaccccgcuggggcugguggacaucuucaucuucagcaccuccuucuaccucaucagcaucuuccugcaccugaucaagaucccgacgcaccggcacaucgugggcaagcccugccccaagccccaccgccucaaccacaugggggucugcuccugcggccuguacaagcacccgggcgugcccaccaaguggaagcggugaggacuagucccuguucccagagcccacuuuuuuuucuuuuuuugaaauaaaauagccugucuuucagaucucaaaggcucuuuucagagccaccaaaaaaaaaaaaaaaaaaaaaaaaaaaaaaaaaaaaaaaaaaaaaaaaaaaaaaaaaaaaaaaaaaaaaaaaaaaaaaaaaaaaaaaaaaaaaaaaaaaaa

SEQ ID NO: 38919 - RNA, 1764 nt, Artificial Sequence
  mRNA product Design a-2 (hSL-A100) comprising derived and/or modified sequence from LASV(803213;Clade II)__AAF86703__GPCmut11 (opt1)
aggagaguccgcucagccagguugcagaagcggcuuagcguguguccuaaucuucucucugcguguagguaggccugugccgcaaacaagcuuaccaugggccagaucaucaccuucuuccaggaggugccccacgucaucgaggaggugaugaacaucgugcugaucgcccucagccugcuggccauccucaaggggaucuacaacgucgcgaccugcggccuguucgggcugaucuccuuccuccugcugugcggccgcagcugcuccgugacguacaaggggguguacgagcuccagacccuggagcugaacauggccaaccucaacaugaccaugccgcugagcugcaccaagaacaacucccaccacuacaucauggucggcaacgagacgggccuggagcucacccugaccaacaccagcaucaucaaccacaaguucugcaaccuguccgacgcccacaagaagaaccucuacgaccacgcccugaugagcaucaucuccacguuccaccugagcauccccaacuucaaccaguacgaggccauguccugcgacuucaacgggggcaagaucagcgugcaguacaaccucucccacagcuucgcgguggacgccgccaaccacugcgggaccaucgccaacggcguccugcagaccuucaugcggauggcguggggcggguccuacaucgcccuggacagcggcaaggggaacugggacugcaucaugaccuccuaccaguaccucaucauccagaacacgaccugggaggaccacugccaguucagccgccccucccccaucggcuaccuggggcugcucagccagcggacccgcgacaucuacaucagccggcgccugcugggcaccuucacguggacccucuccgacagcgagggcaacgaggcccccgggggcuacugccugacccgguggaugcugaucgaggccgagcucaagugcuucgggaacaccgccguggcgaagugcaacgagaagcacgacgaggaguucugcgacaugcugcgccuguucgacuucaacaagcaggccaucaagcggcucaagacggaggcccagauguccauccagcugaucaacaaggccgugaacgcccugaucaacgaccagcucaucaugaagaaccaccuccgcgacaucaugggcauccccuacugcaacuacagccgguacugcuaccugaaccacaccgucaccgggaagaccucccugccccgcugcugccuggugagcaacggcuccuaccugaacgagacgcacuucagcgacgacaucgagcagcaggcggacaacaugaucaccgagaugcuccagaaggaguacauggaccggcagggcaagaccccgcuggggcugguggaccuguucgucuucuccaccagcuucuaccucaucuccaucuuccugcaccuggugaagaucccgacgcaccgccacaucgugggcaagcccugccccaagccccaccggcucaaccacauggggaucugcagcugcggccuguacaagcacccggggguccccgugaaguggaagcgcugaggacuagucccuguucccagagcccacuuuuuuuucuuuuuuugaaauaaaauagccugucuuucagaucucaaaggcucuuuucagagccaccaaaaaaaaaaaaaaaaaaaaaaaaaaaaaaaaaaaaaaaaaaaaaaaaaaaaaaaaaaaaaaaaaaaaaaaaaaaaaaaaaaaaaaaaaaaaaaaaaaaaa

SEQ ID NO: 38920 - RNA, 1764 nt, Artificial Sequence
  mRNA product Design a-2 (hSL-A100) comprising derived and/or modified sequence from LASV(GA391;Clade III)__CAA36645__GPCmut11 (opt1)
aggagaguccgcucagccagguugcagaagcggcuuagcguguguccuaaucuucucucugcguguagguaggccugugccgcaaacaagcuuaccaugggccagaucgugaccuucuuccaggaggucccccacgugaucgaggaggugaugaacaucguccugaucgcccucagcauccuggccauccugaaggggcucuacaacguggcgaccugcggccugaucgggcuggugacguuccuccugcuguccggccgcagcugcucccucaucuacaaggggaccuacgagcugcagacccuggagcucaacauggagacccugaacaugacgaugccgcugagcugcaccaagaacaacucccaccacuacauccgggucggcaacgagaccggccucgagcugacccugacgaacaccagcauccucaaccacaaguucugcaaccuguccgacgcccacaagcgcaaccuguacgaccacagccucauguccaucaucagcaccuuccaccuguccauccccaacuucaaccaguacgaggccaugagcugcgacuucaacgggggcaagaucaccgugcaguacaaccugucccacagcuucgccguggacgccgcggggcacugcggcacgcucgccaacgggguccugcagaccuucaugcggauggccuggggcggcuccuacaucgcccuggacagcgggcgcggcaacugggacugcaucaugaccuccuaccaguaccucaucauccagaacaccacgugggacgaccacugccaguucagccggcccucccccaucggguaccugggccugcucagccagcgcacccgggacaucuacaucagccgccggcugcugggcaccuucaccuggacgcucuccgacagcgaggggaacgagaccccgggcggguacugccugacccgcuggaugcugaucgaggcggagcucaagugcuucggcaacaccgccguggccaagugcaacgagaagcacgacgaggaguucugcgacaugcugcggcuguucgacuucaacaagcaggccauccgccggcucaagacggaggcccagauguccauccagcugaucaacaaggcggugaacgcccugaucaacgaccagcucaucaugaagaaccaccuccgcgacaucauggggauccccuacugcaacuacagccgguacugcuaccugaaccacaccuccaccggcaagaccagccugccccgcugcugccugaucuccaacggcagcuaccugaacgagacgaaguucuccgacgacaucgagcagcaggccgacaacaugaucaccgagaugcugcagaaggaguacaucgaccggcaggggaagacgccccucggccuggucgaccuguucguguucagcaccuccuucuaccucaucagcaucuuccugcaccuggugaagaucccgacccaccgccacaucgucgggaagcccugccccaagccccaccggcucaaccacaugggcaucugcuccugcgggcuguacaagcagccgggcgugcccgugcgcuggaagcggugaggacuagucccuguucccagagcccacuuuuuuuucuuuuuuugaaauaaaauagccugucuuucagaucucaaaggcucuuuucagagccaccaaaaaaaaaaaaaaaaaaaaaaaaaaaaaaaaaaaaaaaaaaaaaaaaaaaaaaaaaaaaaaaaaaaaaaaaaaaaaaaaaaaaaaaaaaaaaaaaaaaaa

SEQ ID NO: 38921 - RNA, 1767 nt, Artificial Sequence
  mRNA product Design a-2 (hSL-A100) comprising derived and/or modified sequence from LASV(AV;Clade V)__CCA30314__GPCmut11 (opt1)
aggagaguccgcucagccagguugcagaagcggcuuagcguguguccuaaucuucucucugcguguagguaggccugugccgcaaacaagcuuaccaugggccagaucgugaccuucuuccaggaggucccccacgugaucgaggaggugaugaacaucguccugaucgcccucagcauccuggccgugcugaaggggcucuacaacaucgcgaccugcggccugaucgggcugaucacguuccuccugcugugcggccgcuccugcagcuccaaccucuacaaggggguguacgagcugcagagccuggaccucaacauggagacccugaacaugaccaugccgcuguccugcaccaagaacaacagccaccacuacauccgggucggcaacgacacgggccucgagcugacccugaccaacaccuccauccucaaccacaaguucugcaaccugagcgacgcccacaagaaggaccuguacgaccacgcccucauguccaucaucagcacguuccaccuguccauccccaacuucaaccaguacgaggccaugagcugcgacuucaacgggggcaagaucuccgugcaguacaaccugagccacuccuacgccaucgacgcggccaaccacugcgggaccguggccaacggcauccuccagaccuucaugcgcauggccuggggcgggagcuacaucgcgcuggacuccggccgggggaacugggacugcaucaugaccagcuaccaguaccugaucauccagaacacgaccugggagaaccacugccaguucucccgccccagccccaucggcuaccucgggcugcugagccagcggacccgcgacaucuacaucucccggcgccuccugggcaccuucacguggacccugagcgacuccgagggcaacgccacccccgggggcuacugccucacccgguggaugcugaucgaggccgagcugaagugcuucgggaacacggccgucgccaagugcaacgagaagcacgacgaggaguucugcgacaugcuccgccuguucgacuucaacaagcaggcgaucagccggcugaaguccgaggcccagaugagcauccagcucaucaacaaggccgugaacgcccugaucaacgaccagcugaucaugaagaaccaccuccgcgacaucaugggcauccccuacugcaacuacuccaaguacugcuaccugaaccacaccaucaccgggaagaccagccugcccaagugcugccucguguccaacggcagcuaccugaacgagacgcacuucuccgacgacaucgagcagcaggccgacaacaugaucaccgagaugcugcagaaggaguacauggagcggcagggcaagaccccgcuggggcucgucgaccuguucguguucagcaccuccuucuaccugaucagcaucuuccuccgccuggugaagaucccgacgcaccggcacaucgucggcaagcccugccccaagccccaccgccugaaccacauggggaucugcuccugcggccucuacaagcagccgggggugcccgugcgguggaagcgcugaggacuagucccuguucccagagcccacuuuuuuuucuuuuuuugaaauaaaauagccugucuuucagaucucaaaggcucuuuucagagccaccaaaaaaaaaaaaaaaaaaaaaaaaaaaaaaaaaaaaaaaaaaaaaaaaaaaaaaaaaaaaaaaaaaaaaaaaaaaaaaaaaaaaaaaaaaaaaaaaaaaaa

SEQ ID NO: 38922 - RNA, 1764 nt, Artificial Sequence
  mRNA product Design a-2 (hSL-A100) comprising derived and/or modified sequence from LASV(Togo/2016/7082;Clade VI)__AMR44577__GPCmut11 (opt1)
aggagaguccgcucagccagguugcagaagcggcuuagcguguguccuaaucuucucucugcguguagguaggccugugccgcaaacaagcuuaccaugggccagaucaucaccuucuuccaggaggugccccacgucaucgaggaggugaugaacaucgugcugaucgcccucagccugcuggccauccucaagggggucuacaacguggcgaccugcggcaucaucgggcuggugacguuccuguuccucugcggccgcuccugcagccugaucuacaagggguccuacgagcugcagacccucgagcugaacauggagacccugaacaugaccaugccgcucagcugcacgaagaacuccagccaccacuacauccgggucggcaacgagaccggccuggagcugacccucaccaacacguccaucaucaaccacaaguucugcaaccugagcgacgcccacaagcgcaaccuguacgaccacgcccucauguccauccugagcaccuuccaccuguccauccccaacuucaaccaguacgaggccaugagcugcgacuucaacgggggcaagaucuccgugcaguacaaccucagccacgccuacgcgguggacgccgccgagcacugcgggaccgucgccaacggcgugcugcagaccuucaugcggauggcguggggcggguccuacaucgcccuggacagcggccgcgggaacugggacugcaucaugacguccuaccaguaccucaucauccagaacaccaccugggaggaccacugccaguucagccggcccucccccaucggcuaccuggggcugcucagccagcgcacccgggacaucuacaucagccgccggcugcugggcacguucaccuggacccucuccgacagcgagggcaacgagacccccgggggcuacugccugacgcgcuggaugcugaucgaggccgagcucaagugcuucgggaacaccgccguggccaagugcaacgagaagcacgacgaggaguucugcgacaugcugcggcuguucgacuucaacaagcaggcgauccagcgccucaaguccgaggcccagaugagcauccagcugaucaacaaggccgucaacgcccugaucaacgaccagcucaucaugaagaaccaccuccgggacaugaugggcauccccuacugcaacuacuccaaguacugcuaccugaaccacaccagcuccgggcgcaccagccugcccaagugcugccugguguccaacggcagcuaccugaacgagacgcacuucuccgacgacaucgagcagcaggccgacaacaugaucaccgagaugcuccagaaggaguacaucgaccggcagggcaagaccccgcuggggcugguggaccuguucgucuucagcaccuccuucuaccucaucagcaucuuccugcaccugaucaagaucccgacgcaccgccacaucgugggcaagcccugccccaagccccaccggcucaaccacauggggaucugcuccugcggccuguacaagcagccgggggugcccacccgcuggaagcggugaggacuagucccuguucccagagcccacuuuuuuuucuuuuuuugaaauaaaauagccugucuuucagaucucaaaggcucuuuucagagccaccaaaaaaaaaaaaaaaaaaaaaaaaaaaaaaaaaaaaaaaaaaaaaaaaaaaaaaaaaaaaaaaaaaaaaaaaaaaaaaaaaaaaaaaaaaaaaaaaaaaaa

SEQ ID NO: 38923 - RNA, 1764 nt, Artificial Sequence
  mRNA product Design a-2 (hSL-A100) comprising derived and/or modified sequence from LASV(KAK-428;Clade n.d. (VII))__ANH09740__GPCmut11 (opt1)
aggagaguccgcucagccagguugcagaagcggcuuagcguguguccuaaucuucucucugcguguagguaggccugugccgcaaacaagcuuaccaugggccagaucgugaccuucuuccaggaggucccccacgugaucgaggaggugaugaacaucguccugaucgcccucagccugcuggccauccucaaggggcuguacaacuucgcgaccugcggcgugaucgggcugaucacguuccuccugcugugcggccgcuccugcagcgccaccuacaaggggcaguacgagcuccagacccuggagcugaacauggagucccucaacaugaccaugccgcugagcugcacgaagaacaacucccaccacuacauccgggccggcaacaacaccggccuggagcucacccugaccaacacgagcaucaucucccacaaguucugcaaccugagcgacgcccacaagaagaaccucuacgaccacacccugauguccaucaucaccaccuuccaccugagcauccccaacuucaaccaguacgaggccauguccugcgacuucaacgggggcaagaucagcauccaguacaaccucucccacagcuacgcgggggacgccgcccagcacugcggcacgguggccaacgggguccugcagaccuucaugcgcauggcguggggcggcuccuaccuggcccucgacagcgggcggcgcggcugggacugcaucaucuccagcuaccaguaccugaucauccagaacaccaccugggacgaccacugccaguucucccggcccagccccaucggguaccugggcuucgugagccagaagacgcgcgacaucuacaucucccggcgccuccugggcaccuucaccuggacccugagcgacuccgaggggcacgacaugccgggcggguacugccucacgcgguggaugcugaucgaggccgaccugaagugcuucggcaacaccgccguggccaagugcaacgagaagcacgacgaggaguucugcgacauguggcgccucuucgacuucaacaagcaggcgauccagcggcugaaggccgaggcccagaugaacauccagcugaucaacaaggccgucaacgcccucaucaacgaccagcugaugaugaagaaccaccuccgcgacaucauggggauccccuacugcaacuacagcaaguucugcuaccugaacaacaccaccacgggccggaccucccugccccgcugcugccugaucagcaacggcuccuaccucaacgagacccacuucagcgacgacaucgagcagcaggcggacaacaugaucaccgagaugcugcagaaggaguacauggaccggcaggggaagacgccccugggccucguggaccuguucguguucuccaccagcuucuaccugaucaccaucuuccugcaccucgucaagaucccgacccaccgccacaucguggggaagcccugccccaagccccaccggcugaaccacaugggcaucugcuccugcgggcuguacaagcagccgggcgugcccguccgcuggaagcggugaggacuagucccuguucccagagcccacuuuuuuuucuuuuuuugaaauaaaauagccugucuuucagaucucaaaggcucuuuucagagccaccaaaaaaaaaaaaaaaaaaaaaaaaaaaaaaaaaaaaaaaaaaaaaaaaaaaaaaaaaaaaaaaaaaaaaaaaaaaaaaaaaaaaaaaaaaaaaaaaaaaaa

SEQ ID NO: 38924 - RNA, 1764 nt, Artificial Sequence; identical to SEQ ID NO: 38918
  mRNA product Design a-2 (hSL-A100) comprising derived and/or modified sequence from LASV(Pinneo-NIG-1969;Clade I)__AIT17836__GPCmut11 (opt1)

SEQ ID NO: 38925 - RNA, 1764 nt, Artificial Sequence
  mRNA product Design a-2 (hSL-A100) comprising derived and/or modified sequence from LASV(ISTH0009-NIG-2011;Clade II)__AIT17404__GPCmut11 (opt1)
aggagaguccgcucagccagguugcagaagcggcuuagcguguguccuaaucuucucucugcguguagguaggccugugccgcaaacaagcuuaccaugggccagaucaucaccuucuuccaggaggugccccacgucaucgaggaggugaugaacaucgugcugaucgcccucagccugcuggccauccucaaggggaucuacaacgucgcgaccugcggccuguucgggcugguguccuuccuccugcugugcggccgcagcugcuccacgaccuacaaggggguguacgagcuccagacccuggagcuggacauggccagccucaacaugaccaugccgcuguccugcacgaagaacaacagccaccacuacaucauggucggcaacgagaccggccuggagcucacccugaccaacacguccaucaucaaccacaaguucugcaaccugagcgacgcccacaagaagaaccucuacgaccacgcccugauguccaucaucagcaccuuccaccuguccauccccaacuucaaccaguacgaggccaugagcugcgacuucaacgggggcaagaucuccgugcaguacaaccucagccacgcguacgccguggacgccgccaaccacugcgggaccaucgcgaacggcguccugcagaccuucaugcggauggccuggggcggguccuacaucgcccuggacagcggcaagggguccugggacugcaucaugacgagcuaccaguaccucaucauccagaacaccaccugggaggaccacugccaguucucccgccccagccccaucggcuaccuggggcugcucagccagcggacccgcgacaucuacaucucccggcgccugcugggcacguucaccuggacccucagcgacuccgagggcaacgagacccccgggggcuacugccugacgcgguggaugcugaucgaggccgagcucaagugcuucgggaacaccgccguggcgaagugcaacgagaagcacgacgaggaguucugcgacaugcugcgccuguucgacuucaacaagcaggccauccggcgccucaagaccgaggcccagaugagcauccagcugaucaacaaggccgugaacgcccugaucaacgaccagcucaucaugaagaaccaccuccgggacaucaugggcaucccguacugcaacuacuccaaguacugcuaccugaaccacaccgucacggggaagaccagccugccccgcugcugccugguguccaacggcagcuaccugaacgagacccacuucuccgacgacaucgagcagcaggcggacaacaugaucaccgagcuccugcagaaggaguacauggaccggcagggcaagacgccccuggggcugguggaccucuucgucuucagcaccuccuucuaccugaucagcaucuuccugcaccucaucaagaucccgacccaccgccacaucaccggcaagcccugccccaagccccaccggcugaaccacauggggaucugcuccugcggccuguacaagcacccgggggugcccgugaaguggaagcgcugaggacuagucccuguucccagagcccacuuuuuuuucuuuuuuugaaauaaaauagccugucuuucagaucucaaaggcucuuuucagagccaccaaaaaaaaaaaaaaaaaaaaaaaaaaaaaaaaaaaaaaaaaaaaaaaaaaaaaaaaaaaaaaaaaaaaaaaaaaaaaaaaaaaaaaaaaaaaaaaaaaaaa

SEQ ID NO: 38926 - RNA, 1764 nt, Artificial Sequence
  mRNA product Design a-2 (hSL-A100) comprising derived and/or modified sequence from LASV(ISTH2010-NIG-2012;Clade II)__AIT17482__GPCmut11 (opt1)
aggagaguccgcucagccagguugcagaagcggcuuagcguguguccuaaucuucucucugcguguagguaggccugugccgcaaacaagcuuaccaugggccagaucaucaccuucuuccaggaggugccccacgucaucgaggaggugaugaacaucgugcugaucgcccucagccugcuggccauccucaaggggaucuacaacgucgcgaccugcggccuguucgggcugguguccuuccuccugcugugcggccgcagcugcuccacgaccuacaaggggguguacgagcuccagacccuggagcuggacauggccagccucaacaugaccaugccgcuguccugcacgaagaacaacagccaccacuacaucauggucggcaacgagaccggccuggagcucacccugaccaacacguccaucaucaaccacaaguucugcaaccugagcgacgcccacaagaagaaccucuacgaccacgcccugauguccaucaucagcaccuuccaccuguccauccccaacuucaaccaguacgaggccaugagcugcgacuucaacgggggcaagaucuccgugcaguacaaccucagccacgcguacgccguggacgccgccaaccacugcgggaccaucgcgaacggcguccugcagaccuucaugcggauggccuggggcggguccuacaucgcccuggacagcggcaagggguccugggacugcaucaugacgagcuaccaguaccucaucauccagaacaucaccugggaggaccacugccaguucucccgccccagccccaucggcuaccuggggcugcucagccagcggacccgcgacaucuacaucucccggcgccugcugggcaccuucacguggacccucagcgacuccgagggcaacgagacccccgggggcuacugccugacccgguggaugcugaucgaggccgagcucaagugcuucgggaacacggccguggcgaagugcaacgagaagcacgacgaggaguucugcgacaugcugcgccuguucgacuucaacaagcaggccauccggcgccucaagaccgaggcccagaugagcauccagcugaucaacaaggccgugaacgcccugaucaacgaccagcucaucaugaagaaccaccuccgggacaucaugggcauccccuacugcaacuacuccaaguacugcuaccugaaccacaccgucaccgggaagacgagccugccccgcugcugccugguguccaacggcagcuaccugaacgagacccacuucuccgacgacaucgagcagcaggcggacaacaugaucaccgagcuccugcagaaggaguacaucgaccggcagggcaagaccccgcuggggcugguggaccucuucgucuucagcacguccuucuaccugaucagcaucuuccugcaccucgugaagaucccgacccaccgccacguggucggcaagcccugccccaagccccaccggcugaaccacauggggaucugcuccugcggccuguacaagcacccgggggugcccgugaaguggaagcgcugaggacuagucccuguucccagagcccacuuuuuuuucuuuuuuugaaauaaaauagccugucuuucagaucucaaaggcucuuuucagagccaccaaaaaaaaaaaaaaaaaaaaaaaaaaaaaaaaaaaaaaaaaaaaaaaaaaaaaaaaaaaaaaaaaaaaaaaaaaaaaaaaaaaaaaaaaaaaaaaaaaaaa

SEQ ID NO: 38927 - RNA, 1764 nt, Artificial Sequence
  mRNA product Design a-2 (hSL-A100) comprising derived and/or modified sequence from LASV(Lassa virus/H.sapiens-wt/NGA/2015/ISTH_0543;Clade II)__AVO03639__GPCmut11 (opt1)
aggagaguccgcucagccagguugcagaagcggcuuagcguguguccuaaucuucucucugcguguagguaggccugugccgcaaacaagcuuaccaugggccagaucaucaccuucuuccaggaggugccccacgucaucgaggaggugaugaacaucgugcugaucgcccucagccugcuggccauccucaaggggaucuacaacgucgcgaccugcggccuguucgggcugguguccuuccuccugcugugcggccgcagcugcuccacgaccuacaaggggguguacgagcuccagacccuggagcuggacauggccaaccucaacaugaccaugccgcugagcugcacgaagaacaacucccaccacuacaucauggucggcaacgagaccggccuggagcucacccugaccaacacgagcaucaucaaccacaaguucugcaaccuguccgacgcccacaagaagaaccucuacgaccacgcccugaugagcaucaucuccaccuuccaccugagcauccccaacuucaaccaguacgaggccauguccugcgacuucaacgggggcaagaucagcgugcaguacaaccucucccacaccuacgcgguggacgccgccaaccacugcgggaccaucgccaacggcguccugcagacguucaugcggauggcguggggcgggagcuacaucgcccuggacuccggcaaggggagcugggacugcaucaugaccuccuaccaguaccucgugauccagaacaccaccugggaggaccacugccaguucagccgccccucccccaucggcuaccuggggcugcucagccagcggacgcgcgacaucuacaucagccggcgccugcugggcaccuucaccuggacccucuccgacagcgagggcaacgagacgcccgggggcuacugccugacccgguggaugcugaucgaggccgagcucaagugcuucgggaacaccgccguggccaagugcaacgagaagcacgacgaggaguucugcgacaugcugcgccuguucgacuucaacaagcaggcgauccggcgccucaagaccgaggcccagauguccauccagcugaucaacaaggccgucaacgcccugaucaacgaccagcucaucaugaagaaccaccuccgggacaucaugggcauccccuacugcaacuacagcaaguacugcuaccugaaccacacggugaccgggaagaccucccugccccgcugcugccuggugagcaacggcuccuaccugaacgagacccacuucagcgacgacaucgagcagcaggccgacaacaugaucacggagcuccugcagaaggaguacaucgaccggcagggcaagaccccgcuggggcuggucgaccucuucguguucuccaccagcuucuaccugaucuccaucuuccugcaccucgugaagaucccgacccaccgccacaucacgggcaagcccugccccaagccccaccggcugaaccacauggggaucugcagcugcggccuguacaagcacccggggguccccgugaaguggaagcgcugaggacuagucccuguucccagagcccacuuuuuuuucuuuuuuugaaauaaaauagccugucuuucagaucucaaaggcucuuuucagagccaccaaaaaaaaaaaaaaaaaaaaaaaaaaaaaaaaaaaaaaaaaaaaaaaaaaaaaaaaaaaaaaaaaaaaaaaaaaaaaaaaaaaaaaaaaaaaaaaaaaaaa

SEQ ID NO: 38928 - RNA, 1764 nt, Artificial Sequence
  mRNA product Design a-2 (hSL-A100) comprising derived and/or modified sequence from LASV(Lassa virus/H.sapiens-wt/NGA/2016/ISTH_0009;Clade II)__AVO03571__GPCmut11 (opt1)
aggagaguccgcucagccagguugcagaagcggcuuagcguguguccuaaucuucucucugcguguagguaggccugugccgcaaacaagcuuaccaugggccagaucaucaccuucuuccaggaggugccccacgucaucgaggaggugaugaacaucgugcugaucgcccucagccugcuggccauccucaaggggaucuacaacgucgcgaccugcggccugcuggggcucguguccuuccugcugcucugcggccgcagcugcuccacgaccuacaaggggguguacgagcugcagacccuggagcucgacauggccagccugaacaugaccaugccgcuguccugcacgaagaacaacagccaccacuacaucauggucggcaacgagaccggccucgagcugacccugaccaacacguccaucaucaaccacaaguucugcaaccucagcgacgcccacaagaagaaccuguacgaccacgcccugauguccaucaucagcaccuuccaccucuccauccccaacuucaaccaguacgaggccaugagcugcgacuucaacgggggccggaucuccgugcaguacaaccugagccacuccuacgcgguggacgccgccaaccacugcgggaccaucgccaacggcguccugcagaccuucaugcgcauggcguggggcgggagcuacaucgcccucgacuccggcaaggggagcugggacugcaucaugacguccuaccaguaccugaucauccagaacaccaccugggaggaccacugccaguucagccggcccagccccaucggcuaccuggggcuccugucccagcgcacccgggacaucuacaucagccgccggcugcucggcacguucaccuggacccuguccgacagcgagggcaacgagacccccgggggcuacugccugacgcgcuggaugcucaucgaggccgagcugaagugcuucgggaacaccgccguggccaagugcaacgagaagcacgacgaggaguucugcgacaugcugcggcuguucgacuucaacaagcaggcgauccgccggcugaagaccgaggcccagauguccauccagcugaucaacaaggccgugaacgcccucaucaacgaccagcugaucaugaagaaccaccuccgcgacaucaugggcaucccguacugcaacuacagcaaguacugcuaccucaaccacaccgucacggggaagaccucccugccccggugcugccuggugagcaacggcuccuaccucaacgagacccacuucagcgacgacaucgagcagcaggccgacaacaugaucaccgagcugcugcagaaggaguacaucgaccgccagggcaagacgccccuggggcucguggaccuguucgucuucuccaccagcuucuaccugaucuccaucuuccuccaccuggugaagaucccgacccaccggcacaucaccggcaagcccugccccaagccccaccgccugaaccacauggggaucugcagcugcggccucuacaaccacccgggggugcccgucaaguggaagcggugaggacuagucccuguucccagagcccacuuuuuuuucuuuuuuugaaauaaaauagccugucuuucagaucucaaaggcucuuuucagagccaccaaaaaaaaaaaaaaaaaaaaaaaaaaaaaaaaaaaaaaaaaaaaaaaaaaaaaaaaaaaaaaaaaaaaaaaaaaaaaaaaaaaaaaaaaaaaaaaaaaaaa

SEQ ID NO: 38929 - RNA, 1764 nt, Artificial Sequence
  mRNA product Design a-2 (hSL-A100) comprising derived and/or modified sequence from LASV(Lassa virus/H.sapiens-wt/NGA/2016/ISTH_0017;Clade II)__AVO03567__GPCmut11 (opt1)
aggagaguccgcucagccagguugcagaagcggcuuagcguguguccuaaucuucucucugcguguagguaggccugugccgcaaacaagcuuaccaugggccagaucaucaccuucuuccaggaggugccccacgucaucgaggaggugaugaacaucgugcugaucgcccucagccugcuggccauccucaaggggaucuacaacgucgcgaccugcggccuguucgggcugguguccuuccuccugcugugcggccgcagcugcuccacgaccuacaaggggguguacgagcuccagacccuggagcuggacauggccagccucaacaugaccaugccgcuguccugcacgaagaacaacagccaccacuacaucauggucggcaacgagaccggccuggagcucacccugaccaacacguccaucaucaaccacaaguucugcaaccugagcgacgcccacaagaagaaccucuacgaccacgcccugauguccaucaucagcaccuuccaccuguccauccccaacuucaaccaguacgaggccaugagcugcgacuucaacgggggcaagaucuccgugcaguacaaccucagccacaccuacgcgaucgacgccgccaaccacugcgggaccaucgccaacggcgugcugcagacguucaugcggauggcguggggcggguccuacaucgcccuggacagcggcaagggguccugggacugcaucaugaccagcuaccaguaccucaucauccagaacaccaccugggaggaccacugccaguucucccgccccagccccaucggcuaccuggggcugcucagccagcggacgcgcgacaucuacaucucccggcgccugcugggcaccuucaccuggacccucagcgacuccgagggcaacgagacgcccgggggcuacugccugacccgguggaugcugaucgaggccgagcucaagugcuucgggaacaccgccgucgccaagugcaacgagaagcacgacgaggaguucugcgacaugcugcgccuguucgacuucaacaagcaggcgauccggcgccucaagaccgaggcccagaugagcauccagcugaucaacaaggccgugaacgcccugaucaacgaccagcucaucaugaagaaccaccuccgggacaucaugggcauccccuacugcaacuacuccaaguacugcuaccugaaccacacggugaccgggaagaccagccugccccgcugcugccuggucuccaacggcagcuaccugaacgagacccacuucuccgacgacaucgagcagcaggccgacaacaugaucacggagcuccugcagaaggaguacauggaccggcagggcaagaccccgcuggggcugguggaccucuucguguucagcaccuccuucuaccugaucagcaucuuccugcaccucguccgcaucccgacccaccggcacgugaucggcaagcccugccccaagccccaccgccugaaccacauggggaucugcuccugcggccuguacaagcacccgggggugcccgucaaguggaagcggugaggacuagucccuguucccagagcccacuuuuuuuucuuuuuuugaaauaaaauagccugucuuucagaucucaaaggcucuuuucagagccaccaaaaaaaaaaaaaaaaaaaaaaaaaaaaaaaaaaaaaaaaaaaaaaaaaaaaaaaaaaaaaaaaaaaaaaaaaaaaaaaaaaaaaaaaaaaaaaaaaaaaa

SEQ ID NO: 38930 - RNA, 1764 nt, Artificial Sequence
  mRNA product Design a-2 (hSL-A100) comprising derived and/or modified sequence from LASV(Lassa virus/H.sapiens-wt/NGA/2018/ISTH_0959;Clade II)__AVV65099__GPCmut11 (opt1)
aggagaguccgcucagccagguugcagaagcggcuuagcguguguccuaaucuucucucugcguguagguaggccugugccgcaaacaagcuuaccaugggccagaucaucaccuucuuccaggaggugccccacgucaucgaggaggugaugaacaucgugcugaucgcccucagccugcuggccauccucaaggggaucuacaacgucgugaccugcggccuguucgggcugguguccuuccuccugcugugcggccgcagcugcuccacgaccuacaagggggucuacgagcuccagacccuggagcuggacauggcgagccucaacaugaccaugccgcuguccugcacgaagaacaacagccaccacuacaucauggugggcaacgagaccggccuggagcucacccugaccaacacguccaucaucaaccacaaguucugcaaccugagcgacgcccacaagaagaaccucuacgaccacgcccugauguccaucaucagcaccuuccaccuguccauccccaacuucaaccaguacgaggccaugagcugcgacuucaacgggggcaagaucuccgugcaguacaaccucagccacgccuacgcgaucgacgccgccaaccacugcgggaccaucgccaacggcguccugcagaccuucaugcggauggcguggggcggguccuacaucgcccuggacagcggcaagggguccugggacugcaucaugacgagcuaccaguaccucaucauccagaacaccaccugggaggaccacugccaguucucccgccccagccccaucggcuaccuggggcugcucagccagcggacccgcgacaucuacaucucccggcgccugcugggcacguucaccuggacccucagcgacuccgagggcaacgagacccccgggggcuacugccugacgcgguggaugcugaucgaggccgagcucaagugcuucgggaacaccgccguggccaagugcaacgagaagcacgacgaggaguucugcgacaugcugcgccuguucgacuucaacaagcaggcgauccggcgccucaagaccgaggcccagaugagcauccagcugaucaacaaggccgugaacgcccugaucaacgaccagcucaucaugaagaaccaccuccgggacaucaugggcaucccguacugcaacuacuccaaguacugcuaccugaaccacaccgucacggggaagaccagccugccccgcugcugccugguguccaacggcagcuaccugaacgagacccacuucuccgacgacaucgagcagcaggccgacaacaugaucaccgagcuccugcagaaggaguacaucgaccggcagggcaagacgccccuggggcugguggaccucuucgucuucagcaccuccuucuaccugaucagcaucuuccugcaccucgugaagaucccgacccaccgccacgugaucggcaagcccugccccaagccccaccggcugaaccacauggggaucugcuccugcggccuguacaagcacccggggguccccgugaaguggaagcgcugaggacuagucccuguucccagagcccacuuuuuuuucuuuuuuugaaauaaaauagccugucuuucagaucucaaaggcucuuuucagagccaccaaaaaaaaaaaaaaaaaaaaaaaaaaaaaaaaaaaaaaaaaaaaaaaaaaaaaaaaaaaaaaaaaaaaaaaaaaaaaaaaaaaaaaaaaaaaaaaaaaaaa

SEQ ID NO: 38931 - RNA, 1764 nt, Artificial Sequence
  mRNA product Design a-2 (hSL-A100) comprising derived and/or modified sequence from LASV(LASV003-NIG-2008;Clade II)__AIT17580__GPCmut11 (opt1)
aggagaguccgcucagccagguugcagaagcggcuuagcguguguccuaaucuucucucugcguguagguaggccugugccgcaaacaagcuuaccaugggccagaucaucaccuucuuccaggaggugccccacgucaucgaggaggugaugaacaucgugcugaucgcccucagccugcuggccauccucaaggggaucuacaacgucgcgaccugcggccuguucgggcugguguccuuccuccugcugugcggccgcagcugcuccacgaccuacaaggggguguacgagcuccagacccuggagcuggacauggccagccucaacaugaccaugccgcuguccugcacgaagaacaacagccaccacuacaucauggucggcaacgagaccggccuggagcucacccugaccaacacguccaucaucaaccacaaguucugcaaccugagcgacgcccacaagaagaaccucuacgaccacgcccugauguccaucaucagcaccuuccaccuguccauccccaacuucaaccaguacgaggccaugagcugcgacuucaacgggggcaagaucuccgugcaguacaaccucagccacaccuacgcgguggacgccgccaaccacugcgggaccaucgccaacggcguccugcagacguucaugcggauggcguggggcggguccuacaucgcccuggacagcggcaagggguccugggacugcaucaugaccagcuaccaguaccucaucauccagaacaccaccugggaggaccacugccaguucucccgccccagccccaucggcuaccuggggcugcucagccagcggacgcgcgacaucuacaucucccggcgccugcugggcaccuucaccuggacccucagcgacuccgagagcaacgagacgccgggcggguacugccugacccgguggaugcugaucgaggccgagcucaagugcuucggcaacaccgccguggccaagugcaacgagaagcacgacgaggaguucugcgacaugcugcgccuguucgacuucaacaagcaggcgauccggcgccucaaggccgaggcccagauguccauccagcugaucaacaaggccgugaacgcccugaucaacgaccagcucaucaugaagaaccaccuccgggacaucauggggauccccuacugcaacuacagcaaguacugcuaccugaaccacaccgucacgggccgcaccucccugccccggugcugccuggugagcaacggguccuaccugaacgagacccacuucagcgacgacaucgagcagcaggcggacaacaugaucaccgagcuccugcagaaggaguacauggaccgccagggcaagacgccccugggccugguggaccucuucgucuucuccaccagcuucuaccugaucuccaucuuccugcaccucgugaagaucccgacccaccggcacgugaucgggaagcccugccccaagccccaccgccugaaccacaugggcaucugcagcugcgggcuguacaagcacccgggcguccccgugaaguggaagcggugaggacuagucccuguucccagagcccacuuuuuuuucuuuuuuugaaauaaaauagccugucuuucagaucucaaaggcucuuuucagagccaccaaaaaaaaaaaaaaaaaaaaaaaaaaaaaaaaaaaaaaaaaaaaaaaaaaaaaaaaaaaaaaaaaaaaaaaaaaaaaaaaaaaaaaaaaaaaaaaaaaaaa

SEQ ID NO: 38932 - RNA, 1764 nt, Artificial Sequence
  mRNA product Design a-2 (hSL-A100) comprising derived and/or modified sequence from LASV(LASV035-NIG-2009;Clade II)__AIT17588__GPCmut11 (opt1)
aggagaguccgcucagccagguugcagaagcggcuuagcguguguccuaaucuucucucugcguguagguaggccugugccgcaaacaagcuuaccaugggccagaucaucaccuucuuccaggaggugccccacgucaucgaggaggugaugaacaucgugcugaucgcccucagccugcuggccauccucaaggggaucuacaacgucgcgaccugcggccuguucgggcugguguccuuccuccugcugugcggccgcagcugcuccacgaccuacaaggggguguacgagcuccagacccuggagcuggacauggccagccucaacaugaccaugccgcuguccugcacgaagaacaacagccaccacuacaucauggucggcaacgagaccggccuggagcucacccugaccaacacguccaucaucaaccacaaguucugcaaccugagcgacgcccacaagaagaaccucuacgaccacgcccugauguccaucaucagcaccuuccaccuguccauccccaacuucaaccaguacgaggccaugagcugcgacuucaacgggggcaagaucuccgugcaguacaaccucagccacgcguacgccguggacgccgccaaccacugcgggaccaucgcgaacggcguccugcagaccuucaugcggauggccuggggcggguccuacaucgcccuggacagcggcaagggguccugggacugcaucaugacgagcuaccaguaccucaucauccagaacaccaccugggaggaccacugccaguucucccgccccagccccaucggcuaccuggggcugcucagccagcggacccgcgacaucuacaucucccggcgccugcugggcacguucaccuggacccucagcgacuccgagggcaacgagacccccgggggcuacugccugacgcgguggaugcugaucgaggccgagcucaagugcuucgggaacaccgccguggcgaagugcaacgagaagcacgacgaggaguucugcgacaugcugcgccuguucgacuucaacaagcaggccauccggcgccucaaggccgaggcccagaugagcauccagcugaucaacaaggccgugaacgcgcugaucaacgaccagcucaucaugaagaaccaccuccgggacaucaugggcauccccuacugcaacuacuccaaguacugcuaccugaaccacaccgucaccgggaagacgagccugccccgcugcugccugguguccaacggcagcuaccugaacgagacccacuucuccgacgacaucgagcagcaggccgacaacaugaucaccgagcuccugcagaaggaguacaucgaccggcagggcaagaccccgcuggggcugguggaccucuucgucuucagcacguccuucuaccugaucagcaucuuccugcaccucgugaagaucccgacccaccgccacgugaucggcaagcccugccccaagccccaccggcugaaccacauggggaucugcuccugcggccuguacaagcacccggggguccccgugaaguggaagcgcugaggacuagucccuguucccagagcccacuuuuuuuucuuuuuuugaaauaaaauagccugucuuucagaucucaaaggcucuuuucagagccaccaaaaaaaaaaaaaaaaaaaaaaaaaaaaaaaaaaaaaaaaaaaaaaaaaaaaaaaaaaaaaaaaaaaaaaaaaaaaaaaaaaaaaaaaaaaaaaaaaaaaa

SEQ ID NO: 38933 - RNA, 1764 nt, Artificial Sequence
  mRNA product Design a-2 (hSL-A100) comprising derived and/or modified sequence from LASV(LASV1000-NIG-2009;Clade II)__AIT17782__GPCmut11 (opt1)
aggagaguccgcucagccagguugcagaagcggcuuagcguguguccuaaucuucucucugcguguagguaggccugugccgcaaacaagcuuaccaugggccagaucaucaccuucuuccaggaggugccccacgucaucgaggaggugaugaacaucgugcugaucgcccucagccugcuggccauccucaaggggaucuacaacgucgcgaccugcggccuguucgggcugguguccuuccuccugcugugcggccgcagcugcuccacgaccuacaaggggguguacgagcuccagacccuggagcuggacauggccagccucaacaugaccaugccgcuguccugcacgaagaacaacagccaccacuacaucauggucggcaacgagaccggccuggagcucacccugaccaacacguccaucaucaaccacaaguucugcaaccugagcgacgcccacaagaagaaccucuacgaccacgcccugauguccaucaucagcaccuuccaccuguccauccccaacuucaaccaguacgaggccaugagcugcgacuucaacgggggcaagaucuccgugcaguacaaccucagccacaccuacgcgguggacgccgccaaccacugcgggaccaucgccaacggcguccugcagacguucaugcggauggcguggggcggguccuacaucgcccuggacagcggcaagggguccugggacugcaucaugaccagcuaccaguaccucaucauccagaacaccaccugggaggaccacugccaguucucccgccccagccccaucggcuaccuggggcugcucagccagcggacgcgcgacaucuacaucucccggcgccugcugggcaccuucaccuggacccucagcgacuccgagggcaacgagacgcccgggggcuacugccugacccgguggaugcugaucgaggccgagcucaagugcuucgggaacaccgccguggccaagugcaacgagaagcacgacgaggaguucugcgacaugcugcgccuguucgacuucaacaagcaggcgaucaagcggcucaagaccgaggcccagaugagcauccagcugaucaacaaggccgugaacgcccugaucaacgaccagcucaucaugaagaaccaccuccgcgacaucaugggcauccccuacugcaacuacuccaaguacugcuaccugaaccacacggucaccgggaagaccagccugccccggugcugccugguguccaacggcagcuaccugaacgagacccacuucuccgacgacaucgagcagcaggccgacaacaugaucacggagcuccugcagaaggaguacaucgaccgccagggcaagaccccgcuggggcugguggaccucuucgucuucagcaccuccuucuaccugaucagcaucuuccugcaccucgugaagaucccgacccaccggcacguggucggcaagcccugccccaagccccaccgccugaaccacauggggaucugcuccugcggccuguacaagcacccgggggugcccgugaaguggaagcggugaggacuagucccuguucccagagcccacuuuuuuuucuuuuuuugaaauaaaauagccugucuuucagaucucaaaggcucuuuucagagccaccaaaaaaaaaaaaaaaaaaaaaaaaaaaaaaaaaaaaaaaaaaaaaaaaaaaaaaaaaaaaaaaaaaaaaaaaaaaaaaaaaaaaaaaaaaaaaaaaaaaaa

SEQ ID NO: 38934 - RNA, 1764 nt, Artificial Sequence
  mRNA product Design a-2 (hSL-A100) comprising derived and/or modified sequence from LASV(LASV221-NIG-2010;Clade II)__AIT17624__GPCmut11 (opt1)
aggagaguccgcucagccagguugcagaagcggcuuagcguguguccuaaucuucucucugcguguagguaggccugugccgcaaacaagcuuaccaugggccagaucaucaccuucuuccaggaggugccccacgucaucgaggaggugaugaacaucgugcugaucgcccucagccugcuggccauccucaaggggaucuacaacgucgcgaccugcggccuguucgggcugguguccuuccuccugcugugcggccgcagcugcuccacgaccuacaaggggguguacgagcuccagacccuggagcuggacauggccagccucaacaugaccaugccgcuguccugcacgaagaacaacagccaccacuacaucauggucggcaacgagaccggccuggagcucacccugaccaacacguccaucaucaaccacaaguucugcaaccugagcgacgcccacaagaagaaccucuacgaccacgcccugauguccaucaucagcaccuuccaccuguccauccccaacuucaaccaguacgaggccaugagcugcgacuucaacgggggcaagaucuccgugcaguacaaccucagccacaccuacgcgaucgacgccgccaaccacugcgggaccaucgccaacggcgugcugcagacguucaugcggauggcguggggcggguccuacaucgcccuggacagcggcaagggguccugggacugcaucaugaccagcuaccaguaccucaucauccagaacaccaccugggaggaccacugccaguucucccgccccagccccaucggcuaccuggggcugcucagccagcggacgcgcgacaucuacaucucccggcgccugcugggcaccuucaccuggacccucagcgacuccgagggcaacgagacgcccgggggcuacugccugacccgguggaugcugaucgaggccgagcucaagugcuucgggaacaccgccgucgccaagugcaacgagaagcacgacgaggaguucugcgacaugcugcgccuguucgacuucaacaagcaggcgauccggcgccucaagaccgaggcccagaugagcauccagcugaucaacaaggccgugaacgcccugaucaacgaccagcucaucaugaagaaccaccuccgggacaucaugggcauccccuacugcaacuacuccaaguacugcuaccugaaccacacggugaccgggaagaccagccugccccgcugcugccuggucuccaacggcagcuaccugaacgagacccacuucuccgacgacaucgagcagcaggccgacaacaugaucacggagaugcuccagaaggaguacauggaccggcagggcaagaccccgcuggggcugguggaccuguucguguucagcaccuccuucuaccucaucagcaucuuccugcaccuggucaagaucccgacccaccgccacgugaucggcaagcccugccccaagccccaccggcucaaccacauggggaucugcuccugcggccuguacaagcacccgggggugcccgucaaguggaagcgcugaggacuagucccuguucccagagcccacuuuuuuuucuuuuuuugaaauaaaauagccugucuuucagaucucaaaggcucuuuucagagccaccaaaaaaaaaaaaaaaaaaaaaaaaaaaaaaaaaaaaaaaaaaaaaaaaaaaaaaaaaaaaaaaaaaaaaaaaaaaaaaaaaaaaaaaaaaaaaaaaaaaaa

SEQ ID NO: 38935 - RNA, 1764 nt, Artificial Sequence
  mRNA product Design a-2 (hSL-A100) comprising derived and/or modified sequence from LASV(LASV237-NIG-2010;Clade II)__AIT17638__GPCmut11 (opt1)
aggagaguccgcucagccagguugcagaagcggcuuagcguguguccuaaucuucucucugcguguagguaggccugugccgcaaacaagcuuaccaugggccagaucaucaccuucuuccaggaggugccccacgucaucgaggaggugaugaacaucgugcugaucgcccucagccugcuggccauccucaaggggaucuacaacgucgcgaccugcggccuguucgggcugguguccuuccuccugcugugcggccgcagcugcuccacgaccuacaaggggguguacgagcuccagacccuggagcuggacauggccagccucaacaugaccaugccgcuguccugcacgaagaacaacagccaccacuacaucauggucggcaacgagaccggccuggagcucacccugaccaacacguccaucaucaaccacaaguucugcaaccugagcgacgcccacaagaaggaccucuacgaccacgcccugauguccaucaucagcaccuuccaccuguccauccccaacuucaaccaguacgaggccaugagcugcgacuucaacgggggcaagaucuccgugcaguacaaccucagccacaccuacgcgguggacgccgccaaccacugcgggaccaucgccaacggcguccugcagacguucaugcggauggcguggggcggguccuacaucgcccuggacagcggcaagggguccugggacugcaucaugaccagcuaccaguaccucaucauccagaacaccaccugggaggaccacugccaguucucccgccccagccccaucggcuaccuggggcugcucagccagcggacgcgcgacaucuacaucucccggcgccugcugggcaccuucaccuggacccucagcgacuccgagggcaacgagacgcccgggggcuacugccugacccgguggaugcugaucgaggccgagcucaagugcuucgggaacaccgccguggccaagugcaacgagaagcacgacgaggaguucugcgacaugcugcgccuguucgacuucaacaagcaggcgauccggcgccucaagaccgaggcccagaugagcauccagcugaucaacaaggccgugaacgcccugaucaacgaccagcucaucaugaagaaccaccuccgggacaucaugggcauccccuacugcaacuacuccaaguacugcuaccugaaccacacggucaccgggaagaccagccugccccgcugcugccugguguccaacggcagcuaccugaacgagacccacuucuccgacgacaucgagcagcaggccgacaacaugaucacggagcuccugcagaaggaguacauggaccggcagggcaagaccccgcuggggcugguggaccucuucgucuucagcaccuccuucuaccugaucagcaucuuccugcaccucaucaagaucccgacccaccgccacaucacgggcaagcccugccccaagccccaccggcugaaccacauggggaucugcuccugcggccuguacaagcacccgggggugcccgugaaguggaagcgcugaggacuagucccuguucccagagcccacuuuuuuuucuuuuuuugaaauaaaauagccugucuuucagaucucaaaggcucuuuucagagccaccaaaaaaaaaaaaaaaaaaaaaaaaaaaaaaaaaaaaaaaaaaaaaaaaaaaaaaaaaaaaaaaaaaaaaaaaaaaaaaaaaaaaaaaaaaaaaaaaaaaaa

SEQ ID NO: 38936 - RNA, 1764 nt, Artificial Sequence
  mRNA product Design a-2 (hSL-A100) comprising derived and/or modified sequence from LASV(LASV253-NIG-2011;Clade II)__AIT17670__GPCmut11 (opt1)
aggagaguccgcucagccagguugcagaagcggcuuagcguguguccuaaucuucucucugcguguagguaggccugugccgcaaacaagcuuaccaugggccagaucaucaccuucuuccaggaggugccccacgucaucgaggaggugaugaacaucgugcugaucgcccucagccugcuggccauccucaaggggaucuacaacgucgcgaccugcggccuguucgggcugguguccuuccuccugcugugcggccgcagcugcuccacgaccuacaaggggguguacgagcuccagacccuggagcuggacauggccagccucaacaugaccaugccgcuguccugcacgaagaacaacagccaccacuacaucauggucggcaacgagaccggccuggagcucacccugaccaacacguccaucaucaaccacaaguucugcaaccugagcgacgcccacaagaagaaccucuacgaccacgcccugauguccaucaucagcaccuuccaccuguccauccccaacuucaaccaguacgaggccaugagcugcgacuucaacgggggcaagaucuccgugcaguacaaccucagccacaccuacgcgguggacgccgccaaccacugcgggaccaucgccaacggcguccugcagacguucaugcggauggcguggggcggguccuacaucgcccuggacagcggcaagggguccugggacugcaucaugaccagcuaccaguaccucaucauccagaacaccaccugggaggaccacugccaguucucccgccccagccccaucggcuaccuggggcugcucagccagcggacgcgcgacaucuacaucucccggcgccugcugggcaccuucaccuggacccucagcgacuccgagggcaacgagacgcccgggggcuacugccugacccgguggaugcugaucgaggccgagcucaagugcuucgggaacaccgccguggccaagugcaacgagaagcacgacgaggaguucugcgacaugcugcgccuguucgacuucaacaagcaggcgauccggcgccucaaggccgaggcccagaugagcauccagcugaucaacaaggccgugaacgcccugaucaacgaccagcucaucaugaagaaccaccuccgggacaucaugggcaucccguacugcaacuacuccaaguacugcuaccugaaccacaccgucacggggcgcaccagccugccccggugcugccugguguccaacggcagcuaccugaacgagacccacuucuccgacgacaucgagcagcaggcggacaacaugaucaccgagcuccugcagaaggaguacaucgaccgccagggcaagacgccccuggggcugguggaccucuucgucuucagcaccuccuucuaccugaucagcaucuuccugcaccucgugaagaucccgacccaccggcacaucaucggcaagcccugccccaagccccaccgccugaaccacauggggaucugcuccugcggccuguacaagcacccgggggugcccgucaaguggaagcggugaggacuagucccuguucccagagcccacuuuuuuuucuuuuuuugaaauaaaauagccugucuuucagaucucaaaggcucuuuucagagccaccaaaaaaaaaaaaaaaaaaaaaaaaaaaaaaaaaaaaaaaaaaaaaaaaaaaaaaaaaaaaaaaaaaaaaaaaaaaaaaaaaaaaaaaaaaaaaaaaaaaaa

SEQ ID NO: 38937 - RNA, 1764 nt, Artificial Sequence
  mRNA product Design a-2 (hSL-A100) comprising derived and/or modified sequence from LASV(LASV254-NIG-2011;Clade II)__AIT17674__GPCmut11 (opt1)
aggagaguccgcucagccagguugcagaagcggcuuagcguguguccuaaucuucucucugcguguagguaggccugugccgcaaacaagcuuaccaugggccagaucaucaccuucuuccaggaggugccccacgucaucgaggaggugaugaacaucgugcugaucgcccucagccugcuggccauccucaaggggaucuacaacgucgcgaccugcggccuguucgggcugguguccuuccuccugcugugcggccgcagcugcuccacgaccuacaaggggguguacgagcuccagacccuggagcuggacaugaccaaccucaacaugacgaugccgcugagcugcaccaagaacaacucccaccacuacaucauggucggcaacgagaccggccuggagcucacccugacgaacaccagcaucaucaaccacaaguucugcaaccuguccgacgcccacaagaagaaccucuacaaccacgcccugaugagcaucaucuccaccuuccaccugagcauccccaacuucaaccaguacgaggccauguccugcgacuucaacgggggcaagaucagcgugcaguacaaccucucccacagcuacgccguggacgcggccaaccacugcgggaccaucgccaacggcguccugcagacguucaugcggauggccuggggcggguccuacaucgcgcuggacagcggcaaggggaacugggacugcaucaugaccuccuaccaguaccucaucauccagaacaccaccugggaggaccacugccaguucagccgccccucccccaucggcuaccuggggcugcucagccagcggacgcgcgacaucuacaucagccggcgccugcugggcaccuucaccuggacccucuccgacagcgagggcaacgagacgcccgggggcuacugccugacccgguggaugcugaucgaggccgagcucaagugcuucgggaacaccgccguggccaagugcaacgagaagcacgacgaggaguucugcgacaugcugcgccuguucgacuucaacaagcaggccauccggcgccucaagaccgaggcgcaggccaacauccagcugaucaacaaggccgugaacgcccugaucaacgaccagcucaucaugaagaaccaccuccgggacaucaugggcauccccuacugcaacuacuccaaguacugcuaccugaaccacacggucaccgggaagaccagccugccccgcugcugccugguguccaacggcagcuaccugaacgagacccacuucuccgacgacaucgagcagcaggccgacaacaugaucacggagcuccugcagaaggaguacauggaccggcagggcaagaccccgcuggggcugguggaccucuucgucuucagcaccuccuucuaccugaucagcaucuuccugcaccucgugaagaucccgacccaccgccacgugaucggcaagcccugccccaagccccaccggcugaaccacauggggaucugcuccugcggccuguacaagcacccggggguccccgugaaguggaagcgcugaggacuagucccuguucccagagcccacuuuuuuuucuuuuuuugaaauaaaauagccugucuuucagaucucaaaggcucuuuucagagccaccaaaaaaaaaaaaaaaaaaaaaaaaaaaaaaaaaaaaaaaaaaaaaaaaaaaaaaaaaaaaaaaaaaaaaaaaaaaaaaaaaaaaaaaaaaaaaaaaaaaaa

SEQ ID NO: 38938 - RNA, 1764 nt, Artificial Sequence
  mRNA product Design a-2 (hSL-A100) comprising derived and/or modified sequence from LASV(Nig08-A19;Clade III)__ADU56618__GPCmut11 (opt1)
aggagaguccgcucagccagguugcagaagcggcuuagcguguguccuaaucuucucucugcguguagguaggccugugccgcaaacaagcuuaccaugggccagaucgugaccuucuuccaggaggucccccacgugaucgaggaggugaugaacaucguccugaucgcccucagcauccuggccauccugaaggggcucuacaacaucgcgaccugcggccugaucgggcuggugacguuccuccugcuguccggccgcagcugcuccaugaccuacaaggggguguacgagcuccagacccuggagcugaacaugaacacccucaacaugacgaugccgcugagcugcaccaagaacaacucccaccacuacaucauggucggcaacgagaccggccuggagcucacccugacgaacaccagccugcuccaccacaaguucugcaaccuguccgacgcccacaagaagaaccuguacgaccacacccucaugagcaucaucuccaccuuccaccugagcauccccaacuucaaccaguacgaggccauguccugcgacuucaacgggggcaagaucacggugcaguacaaccugagccacuccuacgccaucgacgccgcgaaccacugcgggaccguggccaacggcguccuccagaccuucaugcggauggccuggggcgggagcuacaucgcccuggacuccggccgcgggaagugggacugcaucaugaccagcuaccaguaccugaucauccagaacacgaccugggaggaccacugccaguucucccggcccagccccaucggcuaccucgggcugcugucccagcgcacccgggacaucuacaucagccgccggcuccugggcaccuucacguggacccugagcgacuccgagggcaacgagacccccgggggcuacugccucacccgcuggaugcugaucgaggcggagcugaagugcuucgggaacacggccguggccaagugcaacgagaagcacgacgaggaguucugcgacaugcuccggcuguucgacuucaacaagcaggccauccgccggcugaaggccgaggcgcagaugagcauccagcucaucaacaaggccgugaacgcccugaucaacgaccagcugaucaugaagaaccaccuccgcgacaucaugggcauccccuacugcaacuacuccaaguacugcuaccugaaccacaccagcaccgggcggaccucccugccccgcugcugccucgucagcaacggcuccuaccugaacgagacgcacuucagcgacgacaucgagcagcaggccgacaacaugaucaccgagaugcugcagaaggaguaccuggaccggcagggcaagaccccgcucgggcugguggaccuguucguguucuccaccagcuucuaccucaucuccaucuuccugcaccuggucaagaucccgacgcaccgccacaucgugggcaagcccugccccaagccccaccggcucaaccacauggggaucugcagcugcggccuguacaagcagccgggggugcccguccgcuggaagcggugaggacuagucccuguucccagagcccacuuuuuuuucuuuuuuugaaauaaaauagccugucuuucagaucucaaaggcucuuuucagagccaccaaaaaaaaaaaaaaaaaaaaaaaaaaaaaaaaaaaaaaaaaaaaaaaaaaaaaaaaaaaaaaaaaaaaaaaaaaaaaaaaaaaaaaaaaaaaaaaaaaaaa

SEQ ID NO: 38939 - RNA, 1767 nt, Artificial Sequence
  mRNA product Design a-2 (hSL-A100) comprising derived and/or modified sequence from LASV(G1180-SLE-2010;Clade IV)__AIT17168__GPCmut11 (opt1)
aggagaguccgcucagccagguugcagaagcggcuuagcguguguccuaaucuucucucugcguguagguaggccugugccgcaaacaagcuuaccaugggccagaucgugaccuucuuccaggaggucccccacgugaucgaggaggugaugaacaucguccugaucgcccucagcauccuggccgugcugaaggggcucuacaacuucgcgaccugcggccugguggggcugcucaccuuccugcugcucugcggccgcuccugcaccgccagccgguacaagggggucuacgagcugcagacccuggagcucaacauggagacccugaacaugacgaugccgcuguccugcaccaagaacaacagccaccacuacaucauggugggcaacgagaccggccucgagcugacccugacgaacaccuccaucaucaaccacaaguucugcaaccucagcgacgcccacaagaagaaccuguacgaccacgcccugauguccaucaucagcaccuuccaccucuccauccccaacuucaaccaguacgaggccaugagcugcgacuucaacgggggcaagaucuccgugcaguacaaccugagccacuccuacgcgggggacgccgccaaccacugcggcaccgucgccaacggggugcugcagacguucaugcgcauggcguggggcggcagcuacaucgcccucgacuccgggcacggcagcugggacugcaucaugaccuccuaccaguaccugaucauccagaacaccaccugggaggaccacugccaguucagccggcccucccccaucggguaccugggccuccugagccagcgcacgcgggacaucuacaucagccgccggcugcucggcaccuucaccuggacccuguccgacagcgaggggaaggacacgccgggcggguacugccugacccgcuggaugcucaucgaggccgagcugaagugcuucggcaacaccgccguggccaagugcaacgagaagcacgacgaggaguucugcgacaugcugcggcuguucgacuucaacaagcaggcgauccagcgccugaaggccgaggcccagauguccauccagcugaucaacaaggccgucaacgcccucaucaacgaccagcugaucaugaagaaccaccuccgggacaucauggggauccccuacugcaacuacagcaaguacugcuaccucaaccacaccacgaccggcaagaccucccugcccaagugcugccuggugagcaacggcuccuaccucaacgagacccacuucagcgacgacaucgagcagcaggcggacaacaugaucacggagaugcugcagaaggaguacauggagcgccaggggaagacgccccugggccugguggaccucuucgucuucuccaccagcuucuaccugaucuccaucuuccugcaccucgugaagaucccgacccaccggcacaucgugggcaagagcugccccaagccccaccgccugaaccacauggggaucugcuccugcgggcuguacaagcagcccggcgucccggugaaguggaagcggugaggacuagucccuguucccagagcccacuuuuuuuucuuuuuuugaaauaaaauagccugucuuucagaucucaaaggcucuuuucagagccaccaaaaaaaaaaaaaaaaaaaaaaaaaaaaaaaaaaaaaaaaaaaaaaaaaaaaaaaaaaaaaaaaaaaaaaaaaaaaaaaaaaaaaaaaaaaaaaaaaaaaa

SEQ ID NO: 38940 - RNA, 1767 nt, Artificial Sequence
  mRNA product Design a-2 (hSL-A100) comprising derived and/or modified sequence from LASV(G1442-SLE-2011;Clade IV)__AIT17180__GPCmut11 (opt1)
aggagaguccgcucagccagguugcagaagcggcuuagcguguguccuaaucuucucucugcguguagguaggccugugccgcaaacaagcuuaccaugggccagaucgugaccuucuuccaggaggucccccacgugaucgaggaggugaugaacaucguccugaucgcccucagcauccuggccgugcugaaggggcucuacaacguggcgaccugcggccugaucgggcuggucacguuccuccugcugugcggccgcuccugcaccaccacccucuacaaggggguguacgagcugcagacgcuggagcucaacauggagacccugaacaugaccaugccgcugagcugcaccaagaacaacucccaccacuacauccgggugggcaacgagacgggccucgagcugacccugaccaacaccagcaucaucaaccacaaguucugcaaccucuccgacgcccacaagaagaaccuguacgaccacgcccugaugagcaucaucuccacguuccaccucagcauccccaacuucaaccaguacgaggccauguccugcgacuucaacgggggcaagaucagcguccaguacaaccugucccacagcuacgccggggacgcggccaaccacugcggcaccguggccaacggggugcugcagaccuucaugcgcauggccuggggcggcuccuacaucgcgcucgacagcgggcggggcaacugggacugcaucaugaccuccuaccaguaccugaucauccagaacacgaccugggacgaccacugccaguucagccgccccucccccaucggguaccugggccuccugagccagcggacccgcgacgucuacaucucccggcgccugcucggcaccuucacguggacccugagcgacagcgaggggaaggacaccccgggcggguacugccugacccgguggaugcucaucgaggccgagcugaagugcuucggcaacacggccguggccaagugcaacgagaagcacgacgaggaguucugcgacaugcugcgccucuucgacuucaacaagcaggccauccagcggcugaaggcggaggcccagauguccauccagcugaucaacaaggccgugaacgcccucaucaacgaccagcugaucaugaagaaccaccuccgcgacaucauggggauccccuacugcaacuacagcaaguacugcuaccugaacaacaccgccaccggcaagaccucccugcccaagugcugccugaucagcaacggcuccuaccucaacgagacgcacuucagcgacgacaucgagcaggaggcggacaacaugaucaccgagaugcugcagaaggaguacauggagcggcaggggaagacgccccugggccuggucgaccucuucguguucuccaccagcuucuaccugaucuccaucuuccugcaccucgugaagaucccgacccaccgccacaucgucggcaagagcugccccaagccccaccggcugaaccacauggggaucugcuccugcgggcuguacaagcagcccggcgugccggugcgcuggaagcggugaggacuagucccuguucccagagcccacuuuuuuuucuuuuuuugaaauaaaauagccugucuuucagaucucaaaggcucuuuucagagccaccaaaaaaaaaaaaaaaaaaaaaaaaaaaaaaaaaaaaaaaaaaaaaaaaaaaaaaaaaaaaaaaaaaaaaaaaaaaaaaaaaaaaaaaaaaaaaaaaaaaaa

SEQ ID NO: 38941 - RNA, 1767 nt, Artificial Sequence
  mRNA product Design a-2 (hSL-A100) comprising derived and/or modified sequence from LASV(G3010-SLE-2013;Clade IV)__AIT17344__GPCmut11 (opt1)
aggagaguccgcucagccagguugcagaagcggcuuagcguguguccuaaucuucucucugcguguagguaggccugugccgcaaacaagcuuaccaugggccagaucgugaccuucuuccaggaggucccccacgugaucgaggaggugaugaacaucguccugaucgcccucagcauccuggccgugcugaaggggcucuacaacuucgcgaccugcggccugguggggcuggucacguuccuccugcugugcggccgcuccugcaccaccagccucuacaaggggguguacgagcugcagacccuggagcucaacauggagacgcugaacaugaccaugccgcuguccugcaccaagaacaacagccaccacuacaucauggugggcaacgagaccggccucgagcugacgcugaccaacaccuccaucaucaaccacaaguucugcaaccucagcgacgcccacaagaagaaccuguacaaccacgcccugauguccaucaucagcaccuuccaccucuccauccccaacuucaaccaguacgaggccaugagcugcgacuucaacgggggcaagaucuccguccaguacaaccugagccacuccuacgccggggacgcggccagccacugcggcacgguggccaacggggugcugcagaccuucaugcggauggccuggggcggcuccuacaucgcgcucgacagcggguacggcaagugggacugcaucaugaccuccuaccaguaccugaucauccagaacaccacgugggaggaccacugccaguucagccgccccucccccaucggguaccugggccuccugagccagcggacccgcgacaucuacaucagccggcgccugcucggcaccuucaccuggacgcuguccgacagcgaggggaaggacaccccgggcggguacugccugacccgguggaugcucaucgaggccgagcugaagugcuucggcaacaccgccgucgccaagugcaacgagaagcacgacgaggaguucugcgacaugcugcgccucuucgacuucaacaagcaggccauccagcggcugaagacggaggcgcagauguccauccagcugaucaacaaggccgugaacgcccucaucaacgaccagcugaucaugaagaaccaccuccgcgacaucauggggauccccuacugcaacuacagcaaguacugcuaccugaaccacaccaccaccggcaagacgucccugcccaagugcugccuggugagcaacggcuccuaccucaacgagacccacuucagcgacgacaucgagcagcaggccgacaacaugaucaccgagaugcugcagaaggaguacauggagcggcaggggaagacgccccugggccuggucgaccucuucguguucuccaccagcuucuaccugaucuccaucuuccugcaccucgugaagaucccgacccaccgccacaucgucggcaagagcugccccaagccccaccggcugaaccacauggggaucugcuccugcgggcuguacaagcagcccggcgugccggugcgcuggaagcggugaggacuagucccuguucccagagcccacuuuuuuuucuuuuuuugaaauaaaauagccugucuuucagaucucaaaggcucuuuucagagccaccaaaaaaaaaaaaaaaaaaaaaaaaaaaaaaaaaaaaaaaaaaaaaaaaaaaaaaaaaaaaaaaaaaaaaaaaaaaaaaaaaaaaaaaaaaaaaaaaaaaaa

SEQ ID NO: 38942 - RNA, 1767 nt, Artificial Sequence
  mRNA product Design a-2 (hSL-A100) comprising derived and/or modified sequence from LASV(G502-SLE-2009;Clade IV)__AIT17126__GPCmut11 (opt1)
aggagaguccgcucagccagguugcagaagcggcuuagcguguguccuaaucuucucucugcguguagguaggccugugccgcaaacaagcuuaccaugggccagaucgugaccuucuuccaggaggucccccacgugaucgaggaggugaugaacaucguccugaucgcccucagcauccuggccgugcugaaggggcucuacaacuucgcgaccugcggccugguggggcugcucacguuccugcugcucugcggccgcuccugcaccaccgggcuguacaagggcgucuacgagcugcagacccucgagcugaacauggagacgcugaacaugaccaugccgcucagcugcaccaagaacaacucccaccacuacaucauggugggcaacgagaccgggcuggagcugacgcucaccaacaccagcaucaucaaccacaaguucugcaaccuguccgacgcccacaagaagaaccuguacgaccacgcccucaugagcaucaucuccaccuuccaccugagcauccccaacuucaaccaguacgaggccauguccugcgacuucaacggcgggaagaucagcgugcaguacaaccugucccacagcuacgccggcgacgcggccgaccacugcgggacggucgccaacggcgugcuccagaccuucaugcggauggccuggggcggguccuacaucgcgcuggacagcggccgcgggcggugggacugcaucaugaccuccuaccaguaccugaucauccagaacaccacgugggaggaccacugccaguucagccgccccucccccaucggcuaccucggccugcugagccagcggacccgcgacaucuacaucucccggcgccuccuggggaccuucaccuggacgcugagcgacagcgagggcaaggacacccccgggggcuacugccucacccgguggaugcugaucgaggccgagcugaagugcuucgggaacaccgccguggccaagugcaacgagaagcacgacgaggaguucugcgacaugcuccgccuguucgacuucaacaagcaggccauccagcggcugaaggcggaggcccagauguccauccagcucaucaacaaggccgucaacgcccugaucaacgaccagcuggugaugaagaaccaccuccgcgacaucaugggcauccccuacugcaacuacagccgguacugcuaccugaaccacacgaccaccggccgcaccucccugcccaagugcugccucgugagcaacggguccuaccugaacgagacgcacuucagcgacgacaucgagcagcaggccgacaacaugaucaccgagaugcugcagaaggaguacauggagcggcagggcaagaccccgcuggggcucgucgaccuguucguguucuccaccagcuucuaccugaucuccaucuuccuccaccuggugaagaucccgacgcaccgccacaucgucggcaagagcugccccaagccccaccggcugaaccacauggggaucugcuccugcggccucuacaagcagcccggcgugccggugaaguggaagcgcugaggacuagucccuguucccagagcccacuuuuuuuucuuuuuuugaaauaaaauagccugucuuucagaucucaaaggcucuuuucagagccaccaaaaaaaaaaaaaaaaaaaaaaaaaaaaaaaaaaaaaaaaaaaaaaaaaaaaaaaaaaaaaaaaaaaaaaaaaaaaaaaaaaaaaaaaaaaaaaaaaaaaa

SEQ ID NO: 38943 - RNA, 1767 nt, Artificial Sequence
  mRNA product Design a-2 (hSL-A100) comprising derived and/or modified sequence from LASV(G733-SLE-2010;Clade IV)__AIT17154__GPCmut11 (opt1)
aggagaguccgcucagccagguugcagaagcggcuuagcguguguccuaaucuucucucugcguguagguaggccugugccgcaaacaagcuuaccaugggccagaucgugaccuucuuccaggaggucccccacgugaucgaggaggugaugaacaucguccugaucgcccucagcauccuggccgugcugaaggggcucuacaacuucgcgaccugcggcaucguggggcuggucuccuuccugcuccugugcggccgcagcugcacgaccucccuguacaaggggguguacgagcuccagacccuggagcugaacauggagacccucaacaugacgaugccgcugagcugcaccaagaacaacucccaccacuacaucauggugggcaacgagaccggccuggagcucacccugacgaacaccagcaucaucaaccacaaguucugcaaccuguccgacgcccacaagaagaaccucuacgaccacgcccugaugagcaucaucuccaccuuccaccugagcauccccaacuucaaccaguacgaggccauguccugcgacuucaacgggggcaagaucagcguccaguacaaccucucccacagcuacgccggggacgcggccaaccacugcggcaccaucgccaacggggugcugcagacguucaugcggauggccuggggcggcuccuacaucgcgcuggacagcgggcgcgaccggugggacugcaucaugaccuccuaccaguaccucaucauccagaacaccaccugggaggaccacugccaguucagccgccccucccccaucggcuaccuggggcugcucagccagcggacgcgcgacaucuacaucagccggcgccugcugggcaccuucaccuggacccucuccgacagcgagggcaaggacacgcccgggggcuacugccugacccgguggaugcugaucgaggccgagcucaagugcuucgggaacaccgccguggccaagugcaacgagaagcacgacgaggaguucugcgacaugcugcgccuguucgacuucaacaagcaggccauccagcggcucaaggcggaggcccagauguccauccagcugaucaacaaggccgucaacgcccugaucaacgaccagcucaucaugaagaaccaccuccgcgacaucaugggcauccccuacugcaacuacagcaaguacugcuaccugaaccacaccacgaccgggaagaccucccugcccaagugcugccuggugagcaacggcuccuaccugaacgagacccacuucagcgacgacaucgagcagcaggccgacaacaugaucacggagaugcuccagaaggaguacauggagcggcagggcaagaccccgcuggggcugguggaccuguucgucuucuccaccagcuucuaccucaucuccaucuuccugcaccuggugaagaucccgacccaccgccacguggucggcaagagcugccccaagccccaccggcucaaccacauggggaucugcuccugcggccuguacgggcagcccggcgugccggugaaguggaagcgcugaggacuagucccuguucccagagcccacuuuuuuuucuuuuuuugaaauaaaauagccugucuuucagaucucaaaggcucuuuucagagccaccaaaaaaaaaaaaaaaaaaaaaaaaaaaaaaaaaaaaaaaaaaaaaaaaaaaaaaaaaaaaaaaaaaaaaaaaaaaaaaaaaaaaaaaaaaaaaaaaaaaaa

SEQ ID NO: 38944 - RNA, 1767 nt, Artificial Sequence
  mRNA product Design a-2 (hSL-A100) comprising derived and/or modified sequence from MOPV/LASV reassortant(IGS-1;Clade IV)__AFY05576__GPCmut11 (opt1)
aggagaguccgcucagccagguugcagaagcggcuuagcguguguccuaaucuucucucugcguguagguaggccugugccgcaaacaagcuuaccaugggccagaucgugaccuucuuccaggaggucccccacgugaucgaggaggugaugaacaucguccugaucgcccucagcgugcuggccgugcugaaggggcucuacaacuucgcgaccugcggccuggucgggcuggugacguuccuccugcugugcggccgcuccugcaccaccagccucuacaaggggguguacgagcugcagacccuggagcucaacauggagacgcugaacaugaccaugccgcuguccugcaccaagaacaacagccaccacuacaucauggucggcaacgagaccggccucgagcugacgcugaccaacaccuccaucaucaaccacaaguucugcaaccucagcgacgcccacaagaagaaccuguacgaccacgcccugauguccaucaucagcaccuuccaccucuccauccccaacuucaaccaguacgaggccaugagcugcgacuucaacgggggcaagaucuccgugcaguacaaccugagccacuccuacgccggggacgcggccaaccacugcggcacgguggccaacgggguccugcagaccuucaugcggauggccuggggcggcagcuacaucgcgcucgacuccgggcgcggcaacugggacugcaucaugaccagcuaccaguaccugaucauccagaacaccacgugggaggaccacugccaguucucccggcccagccccaucggguaccugggccuccugucccagcgcacccgggacaucuacaucagccgccggcugcucggcaccuucaccuggacgcugagcgacuccgagggggaggacaccccgggcggguacugccugacccgcuggaugcucaucgaggccgagcugaagugcuucggcaacaccgccguggccaagugcaacgagaagcacgacgaggaguucugcgacaugcugcggcuguucgacuucaacaagcaggccauccagcgccugaaggcggaggcccagaugagcauccagcugaucaacaaggccgugaacgcccucaucaacgaccagcugaucaugaagaaccaccuccgggacaucauggggauccccuacugcaacuacuccaaguacugcuaccucaaccacacgaccaccggccgcaccagccugcccaagugcugccuggucuccaacggcagcuaccucaacgagacgcacuucuccgacgacaucgagcagcaggccgacaacaugaucaccgagaugcugcagaaggaguacauggagcggcaggggaagacgccccugggccugguggaccucuucguguucagcaccuccuucuaccugaucagcaucuuccugcaccucgucaagaucccgacccaccgccacaucguggggaaguccugccccaagccccaccggcugaaccacaugggcaucugcagcugcgggcuguacaagcagcccggcgugccggucaaguggaagcgcugaggacuagucccuguucccagagcccacuuuuuuuucuuuuuuugaaauaaaauagccugucuuucagaucucaaaggcucuuuucagagccaccaaaaaaaaaaaaaaaaaaaaaaaaaaaaaaaaaaaaaaaaaaaaaaaaaaaaaaaaaaaaaaaaaaaaaaaaaaaaaaaaaaaaaaaaaaaaaaaaaaaaa

SEQ ID NO: 38945 - RNA, 1767 nt, Artificial Sequence
  mRNA product Design a-2 (hSL-A100) comprising derived and/or modified sequence from LASV(LM765-SLE-2012;Clade IV)__AIT17814__GPCmut11 (opt1)
aggagaguccgcucagccagguugcagaagcggcuuagcguguguccuaaucuucucucugcguguagguaggccugugccgcaaacaagcuuaccaugggccagaucgugaccuucuuccaggaggucccccacgugaucgaggaggugaugaacaucguccugaucgcccucagcauccuggccgugcugaaggggcucuacaacuucgcgaccugcggccugguggggcuggucacguuccuccugcugugcggccgcuccugcaccaccagccucuacaaggggguguacgagcugcagacccuggagcucaacauggagacgcugaacaugaccaugccgcuguccugcaccaagaacaacagccaccacuacaucauggugggcaacgagaccggccucgagcugacgcugaccaacaccuccaucaucgaccacaaguucugcaaccucagcgacgcccaccggaagaaccuguacgaccacgcccugauguccaucaucagcaccuuccaccucuccauccccaacuucaaccaguacgaggccaugagcugcgacuucaacgggggcaagaucuccguccaguacaaccugagccacuccuacgccaaggacgcggccgaccacugcgggacgguggccaacggcgugcugcagaccuucaugcgcauggccuggggcgggagcuacaucgcgcucgacuccggccgggggcgcugggacugcaucaugaccagcuaccaguaccugaucauccagaacaccacgugggaggaccacugccaguucucccggcccagccccaucggcuaccuggggcuccugucccagcgcacccgggacaucuacaucagccgccggcugcucggcaccuucaccuggacgcugagcgacuccgagggcaaggacacccccgggggcuacugccugacccgcuggaugcucaucgaggccgagcugaagugcuucgggaacaccgccgucgccaagugcaacgagaagcacgacgaggaguucugcgacaugcugcggcuguucgacuucaacaagcaggccauccagcgccugaaggcggaggcccagaugagcauccagcugaucaacaaggccgugaacgcccucaucaacgaccagcugaucaugaagaaccaccuccgggacaucaugggcauccccuacugcaacuacuccaaguacugcuaccucaaccacacgaccaccgggaagaccagccugcccaagugcugccugguguccaacggcagcuaccucaacgagacgcacuucuccgacgacaucgagcagcaggccgacaacaugaucaccgagaugcugcagaaggaguacauggagcgccagggcaagaccccgcuggggcuggucgaccucuucguguucagcaccuccuucuaccugaucagcaucuuccugcaccucgugaagaucccgacgcaccggcacaucgucggcaagcccugccccaagccccaccgccugaaccacauggggaucugcuccugcggccuguacaagcagccgggggugcccgugaaguggaagcggugaggacuagucccuguucccagagcccacuuuuuuuucuuuuuuugaaauaaaauagccugucuuucagaucucaaaggcucuuuucagagccaccaaaaaaaaaaaaaaaaaaaaaaaaaaaaaaaaaaaaaaaaaaaaaaaaaaaaaaaaaaaaaaaaaaaaaaaaaaaaaaaaaaaaaaaaaaaaaaaaaaaaa

SEQ ID NO: 38946 - RNA, 1767 nt, Artificial Sequence
  mRNA product Design a-2 (hSL-A100) comprising derived and/or modified sequence from LASV(LM776-SLE-2012;Clade IV)__AIT17824__GPCmut11 (opt1)
aggagaguccgcucagccagguugcagaagcggcuuagcguguguccuaaucuucucucugcguguagguaggccugugccgcaaacaagcuuaccaugggccagaucgugaccuucuuccaggaggucccccacgugaucgaggaggugaugaacaucguccugaucgcccucagcauccuggccgugcugaaggggcucuacaacuucgcgaccugcggccugguggggcuggucacguuccuccugcugugcggccgcuccugcaccaccagcguguacaaggggguguacgagcuccagacccuggagcugaacauggagacgcucaacaugaccaugccgcuguccugcaccaagaacaacagccaccacuacaucauggucggcaacgagaccggccuggagcucacgcugaccaacaccuccaucaucaaccacaaguucugcaaccugagcgacgcccacaagaagaaccucuacgaccacgcccugauguccaucaucagcaccuuccaccuguccauccccaacuucaaccaguacgaggccaugagcugcgacuucaacgggggcaagaucuccgugcaguacaaccucagccacuccuacgccggggacgcggccaaccacugcggcacgguggccaacgggguccugcagaccuucaugcggauggccuggggcggcagcuacaucgcgcuggacuccgggcacggcaagugggacugcaucaugaccagcuaccaguaccucaucauccagaacaccacgugggaggaccacugccaguucucccgccccagccccaucggguaccugggccugcucucccagcggacccgcgacaucuacaucagccggcgccugcugggcaccuucaccuggacgcucagcgacuccgaggggaaggacaccccgggcggguacugccugacccgguggaugcugaucgaggccgagcucaagugcuucggcaacaccgccguggccaagugcaacgagaagcacgacgaggaguucugcgacaugcugcgccuguucgacuucaacaagcaggccauccagcggcucaaggcggaggcccagaugagcauccagcugaucaacaaggccgugaacgcccugaucaacgaccagcucaucaugaagaaccaccuccgcgacaucauggggauccccuacugcaacuacuccaaguacugcuaccugaaccacacgaccaccggcaagaccagccugcccaagugcugccuggucuccaacggcagcuaccugaacgagacgcacuucuccgacgacaucgagcagcaggccgacaacaugaucaccgagaugcuccagaaggaguacauggagcggcaggggaagacgccccugggccugguggaccuguucguguucagcaccuccuucuaccucaucagcaucuuccugcaccuggucaagaucccgacccaccgccacaucguggggaaguccugccccaagccccaccggcucaaccacaugggcaucugcagcugcgggcuguacaagcagcccggcgugccgguccgcuggaagcggugaggacuagucccuguucccagagcccacuuuuuuuucuuuuuuugaaauaaaauagccugucuuucagaucucaaaggcucuuuucagagccaccaaaaaaaaaaaaaaaaaaaaaaaaaaaaaaaaaaaaaaaaaaaaaaaaaaaaaaaaaaaaaaaaaaaaaaaaaaaaaaaaaaaaaaaaaaaaaaaaaaaaa

SEQ ID NO: 38947 - RNA, 1767 nt, Artificial Sequence
  mRNA product Design a-2 (hSL-A100) comprising derived and/or modified sequence from LASV(Mad39;Clade IV)__ANH09722__GPCmut11 (opt1)
aggagaguccgcucagccagguugcagaagcggcuuagcguguguccuaaucuucucucugcguguagguaggccugugccgcaaacaagcuuaccaugggccagaucgugaccuucuuccaggaggucccccacgugaucgaggaggugaugaacaucguccugaucgcccucagcauccuggccgugcugaaggggcucuacaacguggcgaccugcggccugaucgggcuggucacguuccuccugcugugcggccgcuccugcaccaccacccucuacaaggggguguacgagcugcaggcccuggagcucaacauggagacgcugaacaugaccaugccgcugagcugcaccaagaacaacucccaccacuacauccgggugggcaacgagaccggccucgagcugacgcugaccaacaccagccucaucaaccacaaguucugcaaccuguccgacgcccacaagaagaaccuguacgaccacgcccucaugagcaucaucuccaccuuccaccugagcauccccaacuucaaccaguacgaggccauguccugcgacuucaacgacgggaagaucagcguccaguacaaccugucccacacguacgcgggcgacaccgccaaccacugcgggaccguggccaacggcgugcuccagaccuucaugcgcauggccuggggcgggagcuacaucgcgcuggacuccggccgcgggggcugggacugcaucaugacgagcuaccaguaccugaucauccagaacaccaccugggaggaccacugccaguucucccggcccagccccaucggguaccucggccugcugucccagcggacccgcgacaucuacaucagccggcgccuccugggcacguucaccuggacccuguccgacagcgaggggaaggacaccccgggcggguacugccucacgcgguggaugcugaucgaggccgagcugaagugcuucggcaacaccgccgucgccaagugcaacgagaagcacgacgaggaguucugcgacaugcuccgccuguucgacuucaacaagcaggccauccagcggcugaaggcggaggcccagaugagcauccagcucaucaacaaggccgugaacgcccugaucaacgaccagcugaucaugaagaaccaccuccgcgacaucauggggauccccuacugcaacuacuccaaguacugcuaccugaaccacaccgugaccggcaagacgagccugcccaagugcugccucgucuccaacggcagcuaccugaacgagacccacuucuccgacgacaucgagcagcaggccgacaacaugaucaccgagaugcugcagaaggaguacauggagcggcaggggaagacgccccugggccucguggaccuguucguguucagcaccuccuucuaccugaucagcaucuuccuccaccuggucaagaucccgacccaccgccacgugguggggaagcccugccccaagccccaccggcugaaccacaugggcaucugcuccugcggguucuacaagcagccgggcguccccgugcgcuggaagcggugaggacuagucccuguucccagagcccacuuuuuuuucuuuuuuugaaauaaaauagccugucuuucagaucucaaaggcucuuuucagagccaccaaaaaaaaaaaaaaaaaaaaaaaaaaaaaaaaaaaaaaaaaaaaaaaaaaaaaaaaaaaaaaaaaaaaaaaaaaaaaaaaaaaaaaaaaaaaaaaaaaaaa

SEQ ID NO: 38948 - RNA, 1767 nt, Artificial Sequence
  mRNA product Design a-2 (hSL-A100) comprising derived and/or modified sequence from LASV(Z0947-SLE-2011;Clade IV)__AIT17840__GPCmut11 (opt1)
aggagaguccgcucagccagguugcagaagcggcuuagcguguguccuaaucuucucucugcguguagguaggccugugccgcaaacaagcuuaccaugggccagaucgugaccuucuuccaggaggucccccacgugaucgaggaggugaugaacaucguccugaucgcccucagcauccuggccgugcugaaggggcucuacaacuucgcgaccugcggccugguggggcuggucacguuccuccugcugugcggccgcuccugcaccaucagccucuacaaggggguguacgagcugcagacccuggagcucaacauggagacccugaacaugacgaugccgcuguccugcaccaagaacaacagccaccacuacaucauggugggcaacgagaccggccucgagcugacccugacgaacaccuccaucaucaaccacaaguucugcaaccucagcgacgcccacaagaagaaccuguacgaccacgcccugauguccaucaucagcaccuuccaccucuccauccccaacuucaaccaguacgaggccaugagcugcgacuucaacgggggcaagaucuccguccaguacaaccugagccacuccuacgccggggacgcggccaaccacugcggcaccguggccaacggggugcugcagacguucaugcggauggccuggggcggcagcuacaucgcgcucgacuccgggcgcgaccggugggacugcaucaugaccagcuaccaguaccugaucauccagaacaccaccugggaggaccacugccaguucucccgccccagccccaucggcuaccuggggcuccugucccagcggacgcgcgacaucuacaucagccggcgccugcucggcaccuucaccuggacccugagcgacuccgagggcaaggacacgcccgggggcuacugccugacccgguggaugcucaucgaggccgagcugaagugcuucgggaacaccgccgucgccaagugcaacgagaagcacgacgaggaguucugcgacaugcugcgccucuucgacuucaacaagcaggccauccagcggcugaaggcggaggcccagaugagcauccagcugaucaacaaggccgugaacgcccucaucaacgaccagcugaucaugaagaaccaccuccgcgacaucaugggcauccccuacugcaacuacuccaaguacugcuaccugaaccacaccacgaccgggaagaccagccugcccaagugcugccugguguccaacggcagcuaccucaacgagacccacuucuccgacgacaucgagcagcaggccgacaacaugaucacggagaugcugcagaaggaguacauggagcggcagggcaagaccccgcuggggcuggucgaccucuucguguucagcaccuccuucuaccugaucagcaucuuccugcaccucgugaagaucccgacccaccgccacaucgucggcaagcccugccccaagccccaccggcugaaccacauggggaucugcuccugcggccuguacaagcagccgggggugcccgugaaguggaagcgcugaggacuagucccuguucccagagcccacuuuuuuuucuuuuuuugaaauaaaauagccugucuuucagaucucaaaggcucuuuucagagccaccaaaaaaaaaaaaaaaaaaaaaaaaaaaaaaaaaaaaaaaaaaaaaaaaaaaaaaaaaaaaaaaaaaaaaaaaaaaaaaaaaaaaaaaaaaaaaaaaaaaaa

SEQ ID NO: 38949 - RNA, 1767 nt, Artificial Sequence
  mRNA product Design a-2 (hSL-A100) comprising derived and/or modified sequence from LASV(Josiah;Clade IV)__NP_694870__GPCmut11 (opt4)
aggagaguccgcucagccagguugcagaagcggcuuagcguguguccuaaucuucucucugcguguagguaggccugugccgcaaacaagcuuaccaugggccagaucgugaccuucuuccaggaggugccccacgugaucgaggaggugaugaacaucgugcugaucgcccugagcgugcuggccgugcugaagggccuguacaacuucgccaccugcggccuggugggccuggugaccuuccugcugcugugcggcagaagcugcaccaccagccuguacaagggcguguacgagcugcagacccuggagcugaacauggagacccugaacaugaccaugccccugagcugcaccaagaacaacagccaccacuacaucauggugggcaacgagaccggccuggagcugacccugaccaacaccagcaucaucaaccacaaguucugcaaccugagcgacgcccacaagaagaaccuguacgaccacgcccugaugagcaucaucagcaccuuccaccugagcauccccaacuucaaccaguacgaggccaugagcugcgacuucaacggcggcaagaucagcgugcaguacaaccugagccacagcuacgccggcgacgccgccaaccacugcggcaccguggccaacggcgugcugcagaccuucaugagaauggccuggggcggcagcuacaucgcccuggacagcggcagaggcaacugggacugcaucaugaccagcuaccaguaccugaucauccagaacaccaccugggaggaccacugccaguucagcagacccagccccaucggcuaccugggccugcugagccagagaaccagagacaucuacaucagcagaagacugcugggcaccuucaccuggacccugagcgacagcgagggcaaggacacccccggcggcuacugccugaccagauggaugcugaucgaggccgagcugaagugcuucggcaacaccgccguggccaagugcaacgagaagcacgacgaggaguucugcgacaugcugagacuguucgacuucaacaagcaggccauccagagacugaaggccgaggcccagaugagcauccagcugaucaacaaggccgugaacgcccugaucaacgaccagcugaucaugaagaaccaccugagagacaucaugggcauccccuacugcaacuacagcaaguacugcuaccugaaccacaccaccaccggcagaaccagccugcccaagugcugccuggugagcaacggcagcuaccugaacgagacccacuucagcgacgacaucgagcagcaggccgacaacaugaucaccgagaugcugcagaaggaguacauggagagacagggcaagaccccccugggccugguggaccuguucguguucagcaccagcuucuaccugaucagcaucuuccugcaccuggugaagauccccacccacagacacaucgugggcaagagcugccccaagccccacagacugaaccacaugggcaucugcagcugcggccuguacaagcagcccggcgugcccgugaaguggaagagaugaggacuagucccuguucccagagcccacuuuuuuuucuuuuuuugaaauaaaauagccugucuuucagaucucaaaggcucuuuucagagccaccaaaaaaaaaaaaaaaaaaaaaaaaaaaaaaaaaaaaaaaaaaaaaaaaaaaaaaaaaaaaaaaaaaaaaaaaaaaaaaaaaaaaaaaaaaaaaaaaaaaaa

SEQ ID NO: 38950 - RNA, 1764 nt, Artificial Sequence
  mRNA product Design a-2 (hSL-A100) comprising derived and/or modified sequence from LASV(LP;Clade I)__AAF86701__GPCmut11 (opt4)
aggagaguccgcucagccagguugcagaagcggcuuagcguguguccuaaucuucucucugcguguagguaggccugugccgcaaacaagcuuaccaugggccagaucaucaccuucuuccaggaggugccccacgugaucgaggaggugaugaacaucgugcugaucgcccugagccugcuggccauccugaagggccuguacaacaucgccaccugcggcaucaucggccugguggccuuccuguuccugugcggcaagagcugcagccugacccugaagggcggcuacgagcugcagacccuggagcugaacauggagacccugaacaugaccaugccccugagcugcaccaagaacagcagccaccacuacaucagagugggcaacgagaccggccuggagcugacccugaccaacaccagcaucaucaaccacaaguucugcaaccugagcgacgcccacaagaagaaccuguacgaccacgcccugaugagcaucaucagcaccuuccaccugagcauccccaacuucaaccaguacgaggccaugagcugcgacuucaacggcggcaagaucagcgugcaguacaaccugagccacagcuacgccggcgacgccgccgagcacugcggcaccguggccaacggcgugcugcagaccuucaugagaauggccuggggcggcagauacaucgcccuggacagcggcaagggcaacugggacugcaucaugaccagcuaccaguaccugaucauccagaacaccaccugggaggaccacugccaguucagcagacccagccccaucggcuaccugggccugcugagccagagaaccagagacaucuacaucagcagaagacugcugggcaccuucaccuggacccugagcgacagcgagggcaacgagacccccggcggcuacugccugaccagauggaugcugaucgaggccgagcugaagugcuucggcaacaccgccguggccaagugcaacgagaagcacgacgaggaguucugcgacaugcugagacuguucgacuucaacaagcaggccaucagaagacugaaggccgaggcccagaugagcauccagcugaucaacaaggccgugaacgcccugaucaacgaccagcugaucaugaagaaccaccugagagacaucaugggcauccccuacugcaacuacagcaaguacugcuaccugaaccacaccagcagcggcagaaccagccugcccaagugcugccugaucagcaacggcagcuaccugaacgagacccaguucagcgacgacaucgagcagcaggccgacaacaugaucaccgagaugcugcagaaggaguacaucgagagacagggcaagaccccccugggccugguggacaucuucaucuucagcaccagcuucuaccugaucagcaucuuccugcaccugaucaagauccccacccacagacacaucgugggcaagcccugccccaagccccacagacugaaccacaugggcgugugcagcugcggccuguacaagcaccccggcgugcccaccaaguggaagagaugaggacuagucccuguucccagagcccacuuuuuuuucuuuuuuugaaauaaaauagccugucuuucagaucucaaaggcucuuuucagagccaccaaaaaaaaaaaaaaaaaaaaaaaaaaaaaaaaaaaaaaaaaaaaaaaaaaaaaaaaaaaaaaaaaaaaaaaaaaaaaaaaaaaaaaaaaaaaaaaaaaaaa

SEQ ID NO: 38951 - RNA, 1764 nt, Artificial Sequence
  mRNA product Design a-2 (hSL-A100) comprising derived and/or modified sequence from LASV(803213;Clade II)__AAF86703__GPCmut11 (opt4)
aggagaguccgcucagccagguugcagaagcggcuuagcguguguccuaaucuucucucugcguguagguaggccugugccgcaaacaagcuuaccaugggccagaucaucaccuucuuccaggaggugccccacgugaucgaggaggugaugaacaucgugcugaucgcccugagccugcuggccauccugaagggcaucuacaacguggccaccugcggccuguucggccugaucagcuuccugcugcugugcggcagaagcugcagcgugaccuacaagggcguguacgagcugcagacccuggagcugaacauggccaaccugaacaugaccaugccccugagcugcaccaagaacaacagccaccacuacaucauggugggcaacgagaccggccuggagcugacccugaccaacaccagcaucaucaaccacaaguucugcaaccugagcgacgcccacaagaagaaccuguacgaccacgcccugaugagcaucaucagcaccuuccaccugagcauccccaacuucaaccaguacgaggccaugagcugcgacuucaacggcggcaagaucagcgugcaguacaaccugagccacagcuucgccguggacgccgccaaccacugcggcaccaucgccaacggcgugcugcagaccuucaugagaauggccuggggcggcagcuacaucgcccuggacagcggcaagggcaacugggacugcaucaugaccagcuaccaguaccugaucauccagaacaccaccugggaggaccacugccaguucagcagacccagccccaucggcuaccugggccugcugagccagagaaccagagacaucuacaucagcagaagacugcugggcaccuucaccuggacccugagcgacagcgagggcaacgaggcccccggcggcuacugccugaccagauggaugcugaucgaggccgagcugaagugcuucggcaacaccgccguggccaagugcaacgagaagcacgacgaggaguucugcgacaugcugagacuguucgacuucaacaagcaggccaucaagagacugaagaccgaggcccagaugagcauccagcugaucaacaaggccgugaacgcccugaucaacgaccagcugaucaugaagaaccaccugagagacaucaugggcauccccuacugcaacuacagcagauacugcuaccugaaccacaccgugaccggcaagaccagccugcccagaugcugccuggugagcaacggcagcuaccugaacgagacccacuucagcgacgacaucgagcagcaggccgacaacaugaucaccgagaugcugcagaaggaguacauggacagacagggcaagaccccccugggccugguggaccuguucguguucagcaccagcuucuaccugaucagcaucuuccugcaccuggugaagauccccacccacagacacaucgugggcaagcccugccccaagccccacagacugaaccacaugggcaucugcagcugcggccuguacaagcaccccggcgugcccgugaaguggaagagaugaggacuagucccuguucccagagcccacuuuuuuuucuuuuuuugaaauaaaauagccugucuuucagaucucaaaggcucuuuucagagccaccaaaaaaaaaaaaaaaaaaaaaaaaaaaaaaaaaaaaaaaaaaaaaaaaaaaaaaaaaaaaaaaaaaaaaaaaaaaaaaaaaaaaaaaaaaaaaaaaaaaaa

SEQ ID NO: 38952 - RNA, 1764 nt, Artificial Sequence
  mRNA product Design a-2 (hSL-A100) comprising derived and/or modified sequence from LASV(GA391;Clade III)__CAA36645__GPCmut11 (opt4)
aggagaguccgcucagccagguugcagaagcggcuuagcguguguccuaaucuucucucugcguguagguaggccugugccgcaaacaagcuuaccaugggccagaucgugaccuucuuccaggaggugccccacgugaucgaggaggugaugaacaucgugcugaucgcccugagcauccuggccauccugaagggccuguacaacguggccaccugcggccugaucggccuggugaccuuccugcugcugagcggcagaagcugcagccugaucuacaagggcaccuacgagcugcagacccuggagcugaacauggagacccugaacaugaccaugccccugagcugcaccaagaacaacagccaccacuacaucagagugggcaacgagaccggccuggagcugacccugaccaacaccagcauccugaaccacaaguucugcaaccugagcgacgcccacaagagaaaccuguacgaccacagccugaugagcaucaucagcaccuuccaccugagcauccccaacuucaaccaguacgaggccaugagcugcgacuucaacggcggcaagaucaccgugcaguacaaccugagccacagcuucgccguggacgccgccggccacugcggcacccuggccaacggcgugcugcagaccuucaugagaauggccuggggcggcagcuacaucgcccuggacagcggcagaggcaacugggacugcaucaugaccagcuaccaguaccugaucauccagaacaccaccugggacgaccacugccaguucagcagacccagccccaucggcuaccugggccugcugagccagagaaccagagacaucuacaucagcagaagacugcugggcaccuucaccuggacccugagcgacagcgagggcaacgagacccccggcggcuacugccugaccagauggaugcugaucgaggccgagcugaagugcuucggcaacaccgccguggccaagugcaacgagaagcacgacgaggaguucugcgacaugcugagacuguucgacuucaacaagcaggccaucagaagacugaagaccgaggcccagaugagcauccagcugaucaacaaggccgugaacgcccugaucaacgaccagcugaucaugaagaaccaccugagagacaucaugggcauccccuacugcaacuacagcagauacugcuaccugaaccacaccagcaccggcaagaccagccugcccagaugcugccugaucagcaacggcagcuaccugaacgagaccaaguucagcgacgacaucgagcagcaggccgacaacaugaucaccgagaugcugcagaaggaguacaucgacagacagggcaagaccccccugggccugguggaccuguucguguucagcaccagcuucuaccugaucagcaucuuccugcaccuggugaagauccccacccacagacacaucgugggcaagcccugccccaagccccacagacugaaccacaugggcaucugcagcugcggccuguacaagcagcccggcgugcccgugagauggaagagaugaggacuagucccuguucccagagcccacuuuuuuuucuuuuuuugaaauaaaauagccugucuuucagaucucaaaggcucuuuucagagccaccaaaaaaaaaaaaaaaaaaaaaaaaaaaaaaaaaaaaaaaaaaaaaaaaaaaaaaaaaaaaaaaaaaaaaaaaaaaaaaaaaaaaaaaaaaaaaaaaaaaaa

SEQ ID NO: 38953 - RNA, 1767 nt, Artificial Sequence
  mRNA product Design a-2 (hSL-A100) comprising derived and/or modified sequence from LASV(AV;Clade V)__CCA30314__GPCmut11 (opt4)
aggagaguccgcucagccagguugcagaagcggcuuagcguguguccuaaucuucucucugcguguagguaggccugugccgcaaacaagcuuaccaugggccagaucgugaccuucuuccaggaggugccccacgugaucgaggaggugaugaacaucgugcugaucgcccugagcauccuggccgugcugaagggccuguacaacaucgccaccugcggccugaucggccugaucaccuuccugcugcugugcggcagaagcugcagcagcaaccuguacaagggcguguacgagcugcagagccuggaccugaacauggagacccugaacaugaccaugccccugagcugcaccaagaacaacagccaccacuacaucagagugggcaacgacaccggccuggagcugacccugaccaacaccagcauccugaaccacaaguucugcaaccugagcgacgcccacaagaaggaccuguacgaccacgcccugaugagcaucaucagcaccuuccaccugagcauccccaacuucaaccaguacgaggccaugagcugcgacuucaacggcggcaagaucagcgugcaguacaaccugagccacagcuacgccaucgacgccgccaaccacugcggcaccguggccaacggcauccugcagaccuucaugagaauggccuggggcggcagcuacaucgcccuggacagcggcagaggcaacugggacugcaucaugaccagcuaccaguaccugaucauccagaacaccaccugggagaaccacugccaguucagcagacccagccccaucggcuaccugggccugcugagccagagaaccagagacaucuacaucagcagaagacugcugggcaccuucaccuggacccugagcgacagcgagggcaacgccacccccggcggcuacugccugaccagauggaugcugaucgaggccgagcugaagugcuucggcaacaccgccguggccaagugcaacgagaagcacgacgaggaguucugcgacaugcugagacuguucgacuucaacaagcaggccaucagcagacugaagagcgaggcccagaugagcauccagcugaucaacaaggccgugaacgcccugaucaacgaccagcugaucaugaagaaccaccugagagacaucaugggcauccccuacugcaacuacagcaaguacugcuaccugaaccacaccaucaccggcaagaccagccugcccaagugcugccuggugagcaacggcagcuaccugaacgagacccacuucagcgacgacaucgagcagcaggccgacaacaugaucaccgagaugcugcagaaggaguacauggagagacagggcaagaccccccugggccugguggaccuguucguguucagcaccagcuucuaccugaucagcaucuuccugagacuggugaagauccccacccacagacacaucgugggcaagcccugccccaagccccacagacugaaccacaugggcaucugcagcugcggccuguacaagcagcccggcgugcccgugagauggaagagaugaggacuagucccuguucccagagcccacuuuuuuuucuuuuuuugaaauaaaauagccugucuuucagaucucaaaggcucuuuucagagccaccaaaaaaaaaaaaaaaaaaaaaaaaaaaaaaaaaaaaaaaaaaaaaaaaaaaaaaaaaaaaaaaaaaaaaaaaaaaaaaaaaaaaaaaaaaaaaaaaaaaaa

SEQ ID NO: 38954 - RNA, 1764 nt, Artificial Sequence
  mRNA product Design a-2 (hSL-A100) comprising derived and/or modified sequence from LASV(Togo/2016/7082;Clade VI)__AMR44577__GPCmut11 (opt4)
aggagaguccgcucagccagguugcagaagcggcuuagcguguguccuaaucuucucucugcguguagguaggccugugccgcaaacaagcuuaccaugggccagaucaucaccuucuuccaggaggugccccacgugaucgaggaggugaugaacaucgugcugaucgcccugagccugcuggccauccugaagggcguguacaacguggccaccugcggcaucaucggccuggugaccuuccuguuccugugcggcagaagcugcagccugaucuacaagggcagcuacgagcugcagacccuggagcugaacauggagacccugaacaugaccaugccccugagcugcaccaagaacagcagccaccacuacaucagagugggcaacgagaccggccuggagcugacccugaccaacaccagcaucaucaaccacaaguucugcaaccugagcgacgcccacaagagaaaccuguacgaccacgcccugaugagcauccugagcaccuuccaccugagcauccccaacuucaaccaguacgaggccaugagcugcgacuucaacggcggcaagaucagcgugcaguacaaccugagccacgccuacgccguggacgccgccgagcacugcggcaccguggccaacggcgugcugcagaccuucaugagaauggccuggggcggcagcuacaucgcccuggacagcggcagaggcaacugggacugcaucaugaccagcuaccaguaccugaucauccagaacaccaccugggaggaccacugccaguucagcagacccagccccaucggcuaccugggccugcugagccagagaaccagagacaucuacaucagcagaagacugcugggcaccuucaccuggacccugagcgacagcgagggcaacgagacccccggcggcuacugccugaccagauggaugcugaucgaggccgagcugaagugcuucggcaacaccgccguggccaagugcaacgagaagcacgacgaggaguucugcgacaugcugagacuguucgacuucaacaagcaggccauccagagacugaagagcgaggcccagaugagcauccagcugaucaacaaggccgugaacgcccugaucaacgaccagcugaucaugaagaaccaccugagagacaugaugggcauccccuacugcaacuacagcaaguacugcuaccugaaccacaccagcagcggcagaaccagccugcccaagugcugccuggugagcaacggcagcuaccugaacgagacccacuucagcgacgacaucgagcagcaggccgacaacaugaucaccgagaugcugcagaaggaguacaucgacagacagggcaagaccccccugggccugguggaccuguucguguucagcaccagcuucuaccugaucagcaucuuccugcaccugaucaagauccccacccacagacacaucgugggcaagcccugccccaagccccacagacugaaccacaugggcaucugcagcugcggccuguacaagcagcccggcgugcccaccagauggaagagaugaggacuagucccuguucccagagcccacuuuuuuuucuuuuuuugaaauaaaauagccugucuuucagaucucaaaggcucuuuucagagccaccaaaaaaaaaaaaaaaaaaaaaaaaaaaaaaaaaaaaaaaaaaaaaaaaaaaaaaaaaaaaaaaaaaaaaaaaaaaaaaaaaaaaaaaaaaaaaaaaaaaaa

SEQ ID NO: 38955 - RNA, 1764 nt, Artificial Sequence
  mRNA product Design a-2 (hSL-A100) comprising derived and/or modified sequence from LASV(KAK-428;Clade n.d. (VII))__ANH09740__GPCmut11 (opt4)
aggagaguccgcucagccagguugcagaagcggcuuagcguguguccuaaucuucucucugcguguagguaggccugugccgcaaacaagcuuaccaugggccagaucgugaccuucuuccaggaggugccccacgugaucgaggaggugaugaacaucgugcugaucgcccugagccugcuggccauccugaagggccuguacaacuucgccaccugcggcgugaucggccugaucaccuuccugcugcugugcggcagaagcugcagcgccaccuacaagggccaguacgagcugcagacccuggagcugaacauggagagccugaacaugaccaugccccugagcugcaccaagaacaacagccaccacuacaucagagccggcaacaacaccggccuggagcugacccugaccaacaccagcaucaucagccacaaguucugcaaccugagcgacgcccacaagaagaaccuguacgaccacacccugaugagcaucaucaccaccuuccaccugagcauccccaacuucaaccaguacgaggccaugagcugcgacuucaacggcggcaagaucagcauccaguacaaccugagccacagcuacgccggcgacgccgcccagcacugcggcaccguggccaacggcgugcugcagaccuucaugagaauggccuggggcggcagcuaccuggcccuggacagcggcagaagaggcugggacugcaucaucagcagcuaccaguaccugaucauccagaacaccaccugggacgaccacugccaguucagcagacccagccccaucggcuaccugggcuucgugagccagaagaccagagacaucuacaucagcagaagacugcugggcaccuucaccuggacccugagcgacagcgagggccacgacaugcccggcggcuacugccugaccagauggaugcugaucgaggccgaccugaagugcuucggcaacaccgccguggccaagugcaacgagaagcacgacgaggaguucugcgacauguggagacuguucgacuucaacaagcaggccauccagagacugaaggccgaggcccagaugaacauccagcugaucaacaaggccgugaacgcccugaucaacgaccagcugaugaugaagaaccaccugagagacaucaugggcauccccuacugcaacuacagcaaguucugcuaccugaacaacaccaccaccggcagaaccagccugcccagaugcugccugaucagcaacggcagcuaccugaacgagacccacuucagcgacgacaucgagcagcaggccgacaacaugaucaccgagaugcugcagaaggaguacauggacagacagggcaagaccccccugggccugguggaccuguucguguucagcaccagcuucuaccugaucaccaucuuccugcaccuggugaagauccccacccacagacacaucgugggcaagcccugccccaagccccacagacugaaccacaugggcaucugcagcugcggccuguacaagcagcccggcgugcccgugagauggaagagaugaggacuagucccuguucccagagcccacuuuuuuuucuuuuuuugaaauaaaauagccugucuuucagaucucaaaggcucuuuucagagccaccaaaaaaaaaaaaaaaaaaaaaaaaaaaaaaaaaaaaaaaaaaaaaaaaaaaaaaaaaaaaaaaaaaaaaaaaaaaaaaaaaaaaaaaaaaaaaaaaaaaaa

SEQ ID NO: 38956 - RNA, 1764 nt, Artificial Sequence; identical to SEQ ID NO: 38950
  mRNA product Design a-2 (hSL-A100) comprising derived and/or modified sequence from LASV(Pinneo-NIG-1969;Clade I)__AIT17836__GPCmut11 (opt4)

SEQ ID NO: 38957 - RNA, 1764 nt, Artificial Sequence
  mRNA product Design a-2 (hSL-A100) comprising derived and/or modified sequence from LASV(ISTH0009-NIG-2011;Clade II)__AIT17404__GPCmut11 (opt4)
aggagaguccgcucagccagguugcagaagcggcuuagcguguguccuaaucuucucucugcguguagguaggccugugccgcaaacaagcuuaccaugggccagaucaucaccuucuuccaggaggugccccacgugaucgaggaggugaugaacaucgugcugaucgcccugagccugcuggccauccugaagggcaucuacaacguggccaccugcggccuguucggccuggugagcuuccugcugcugugcggcagaagcugcagcaccaccuacaagggcguguacgagcugcagacccuggagcuggacauggccagccugaacaugaccaugccccugagcugcaccaagaacaacagccaccacuacaucauggugggcaacgagaccggccuggagcugacccugaccaacaccagcaucaucaaccacaaguucugcaaccugagcgacgcccacaagaagaaccuguacgaccacgcccugaugagcaucaucagcaccuuccaccugagcauccccaacuucaaccaguacgaggccaugagcugcgacuucaacggcggcaagaucagcgugcaguacaaccugagccacgccuacgccguggacgccgccaaccacugcggcaccaucgccaacggcgugcugcagaccuucaugagaauggccuggggcggcagcuacaucgcccuggacagcggcaagggcagcugggacugcaucaugaccagcuaccaguaccugaucauccagaacaccaccugggaggaccacugccaguucagcagacccagccccaucggcuaccugggccugcugagccagagaaccagagacaucuacaucagcagaagacugcugggcaccuucaccuggacccugagcgacagcgagggcaacgagacccccggcggcuacugccugaccagauggaugcugaucgaggccgagcugaagugcuucggcaacaccgccguggccaagugcaacgagaagcacgacgaggaguucugcgacaugcugagacuguucgacuucaacaagcaggccaucagaagacugaagaccgaggcccagaugagcauccagcugaucaacaaggccgugaacgcccugaucaacgaccagcugaucaugaagaaccaccugagagacaucaugggcauccccuacugcaacuacagcaaguacugcuaccugaaccacaccgugaccggcaagaccagccugcccagaugcugccuggugagcaacggcagcuaccugaacgagacccacuucagcgacgacaucgagcagcaggccgacaacaugaucaccgagcugcugcagaaggaguacauggacagacagggcaagaccccccugggccugguggaccuguucguguucagcaccagcuucuaccugaucagcaucuuccugcaccugaucaagauccccacccacagacacaucaccggcaagcccugccccaagccccacagacugaaccacaugggcaucugcagcugcggccuguacaagcaccccggcgugcccgugaaguggaagagaugaggacuagucccuguucccagagcccacuuuuuuuucuuuuuuugaaauaaaauagccugucuuucagaucucaaaggcucuuuucagagccaccaaaaaaaaaaaaaaaaaaaaaaaaaaaaaaaaaaaaaaaaaaaaaaaaaaaaaaaaaaaaaaaaaaaaaaaaaaaaaaaaaaaaaaaaaaaaaaaaaaaaa

SEQ ID NO: 38958 - RNA, 1764 nt, Artificial Sequence
  mRNA product Design a-2 (hSL-A100) comprising derived and/or modified sequence from LASV(ISTH2010-NIG-2012;Clade II)__AIT17482__GPCmut11 (opt4)
aggagaguccgcucagccagguugcagaagcggcuuagcguguguccuaaucuucucucugcguguagguaggccugugccgcaaacaagcuuaccaugggccagaucaucaccuucuuccaggaggugccccacgugaucgaggaggugaugaacaucgugcugaucgcccugagccugcuggccauccugaagggcaucuacaacguggccaccugcggccuguucggccuggugagcuuccugcugcugugcggcagaagcugcagcaccaccuacaagggcguguacgagcugcagacccuggagcuggacauggccagccugaacaugaccaugccccugagcugcaccaagaacaacagccaccacuacaucauggugggcaacgagaccggccuggagcugacccugaccaacaccagcaucaucaaccacaaguucugcaaccugagcgacgcccacaagaagaaccuguacgaccacgcccugaugagcaucaucagcaccuuccaccugagcauccccaacuucaaccaguacgaggccaugagcugcgacuucaacggcggcaagaucagcgugcaguacaaccugagccacgccuacgccguggacgccgccaaccacugcggcaccaucgccaacggcgugcugcagaccuucaugagaauggccuggggcggcagcuacaucgcccuggacagcggcaagggcagcugggacugcaucaugaccagcuaccaguaccugaucauccagaacaucaccugggaggaccacugccaguucagcagacccagccccaucggcuaccugggccugcugagccagagaaccagagacaucuacaucagcagaagacugcugggcaccuucaccuggacccugagcgacagcgagggcaacgagacccccggcggcuacugccugaccagauggaugcugaucgaggccgagcugaagugcuucggcaacaccgccguggccaagugcaacgagaagcacgacgaggaguucugcgacaugcugagacuguucgacuucaacaagcaggccaucagaagacugaagaccgaggcccagaugagcauccagcugaucaacaaggccgugaacgcccugaucaacgaccagcugaucaugaagaaccaccugagagacaucaugggcauccccuacugcaacuacagcaaguacugcuaccugaaccacaccgugaccggcaagaccagccugcccagaugcugccuggugagcaacggcagcuaccugaacgagacccacuucagcgacgacaucgagcagcaggccgacaacaugaucaccgagcugcugcagaaggaguacaucgacagacagggcaagaccccccugggccugguggaccuguucguguucagcaccagcuucuaccugaucagcaucuuccugcaccuggugaagauccccacccacagacacguggugggcaagcccugccccaagccccacagacugaaccacaugggcaucugcagcugcggccuguacaagcaccccggcgugcccgugaaguggaagagaugaggacuagucccuguucccagagcccacuuuuuuuucuuuuuuugaaauaaaauagccugucuuucagaucucaaaggcucuuuucagagccaccaaaaaaaaaaaaaaaaaaaaaaaaaaaaaaaaaaaaaaaaaaaaaaaaaaaaaaaaaaaaaaaaaaaaaaaaaaaaaaaaaaaaaaaaaaaaaaaaaaaaa

SEQ ID NO: 38959 - RNA, 1764 nt, Artificial Sequence
  mRNA product Design a-2 (hSL-A100) comprising derived and/or modified sequence from LASV(Lassa virus/H.sapiens-wt/NGA/2015/ISTH_0543;Clade II)__AVO03639__GPCmut11 (opt4)
aggagaguccgcucagccagguugcagaagcggcuuagcguguguccuaaucuucucucugcguguagguaggccugugccgcaaacaagcuuaccaugggccagaucaucaccuucuuccaggaggugccccacgugaucgaggaggugaugaacaucgugcugaucgcccugagccugcuggccauccugaagggcaucuacaacguggccaccugcggccuguucggccuggugagcuuccugcugcugugcggcagaagcugcagcaccaccuacaagggcguguacgagcugcagacccuggagcuggacauggccaaccugaacaugaccaugccccugagcugcaccaagaacaacagccaccacuacaucauggugggcaacgagaccggccuggagcugacccugaccaacaccagcaucaucaaccacaaguucugcaaccugagcgacgcccacaagaagaaccuguacgaccacgcccugaugagcaucaucagcaccuuccaccugagcauccccaacuucaaccaguacgaggccaugagcugcgacuucaacggcggcaagaucagcgugcaguacaaccugagccacaccuacgccguggacgccgccaaccacugcggcaccaucgccaacggcgugcugcagaccuucaugagaauggccuggggcggcagcuacaucgcccuggacagcggcaagggcagcugggacugcaucaugaccagcuaccaguaccuggugauccagaacaccaccugggaggaccacugccaguucagcagacccagccccaucggcuaccugggccugcugagccagagaaccagagacaucuacaucagcagaagacugcugggcaccuucaccuggacccugagcgacagcgagggcaacgagacccccggcggcuacugccugaccagauggaugcugaucgaggccgagcugaagugcuucggcaacaccgccguggccaagugcaacgagaagcacgacgaggaguucugcgacaugcugagacuguucgacuucaacaagcaggccaucagaagacugaagaccgaggcccagaugagcauccagcugaucaacaaggccgugaacgcccugaucaacgaccagcugaucaugaagaaccaccugagagacaucaugggcauccccuacugcaacuacagcaaguacugcuaccugaaccacaccgugaccggcaagaccagccugcccagaugcugccuggugagcaacggcagcuaccugaacgagacccacuucagcgacgacaucgagcagcaggccgacaacaugaucaccgagcugcugcagaaggaguacaucgacagacagggcaagaccccccugggccugguggaccuguucguguucagcaccagcuucuaccugaucagcaucuuccugcaccuggugaagauccccacccacagacacaucaccggcaagcccugccccaagccccacagacugaaccacaugggcaucugcagcugcggccuguacaagcaccccggcgugcccgugaaguggaagagaugaggacuagucccuguucccagagcccacuuuuuuuucuuuuuuugaaauaaaauagccugucuuucagaucucaaaggcucuuuucagagccaccaaaaaaaaaaaaaaaaaaaaaaaaaaaaaaaaaaaaaaaaaaaaaaaaaaaaaaaaaaaaaaaaaaaaaaaaaaaaaaaaaaaaaaaaaaaaaaaaaaaaa

SEQ ID NO: 38960 - RNA, 1764 nt, Artificial Sequence
  mRNA product Design a-2 (hSL-A100) comprising derived and/or modified sequence from LASV(Lassa virus/H.sapiens-wt/NGA/2016/ISTH_0009;Clade II)__AVO03571__GPCmut11 (opt4)
aggagaguccgcucagccagguugcagaagcggcuuagcguguguccuaaucuucucucugcguguagguaggccugugccgcaaacaagcuuaccaugggccagaucaucaccuucuuccaggaggugccccacgugaucgaggaggugaugaacaucgugcugaucgcccugagccugcuggccauccugaagggcaucuacaacguggccaccugcggccugcugggccuggugagcuuccugcugcugugcggcagaagcugcagcaccaccuacaagggcguguacgagcugcagacccuggagcuggacauggccagccugaacaugaccaugccccugagcugcaccaagaacaacagccaccacuacaucauggugggcaacgagaccggccuggagcugacccugaccaacaccagcaucaucaaccacaaguucugcaaccugagcgacgcccacaagaagaaccuguacgaccacgcccugaugagcaucaucagcaccuuccaccugagcauccccaacuucaaccaguacgaggccaugagcugcgacuucaacggcggcagaaucagcgugcaguacaaccugagccacagcuacgccguggacgccgccaaccacugcggcaccaucgccaacggcgugcugcagaccuucaugagaauggccuggggcggcagcuacaucgcccuggacagcggcaagggcagcugggacugcaucaugaccagcuaccaguaccugaucauccagaacaccaccugggaggaccacugccaguucagcagacccagccccaucggcuaccugggccugcugagccagagaaccagagacaucuacaucagcagaagacugcugggcaccuucaccuggacccugagcgacagcgagggcaacgagacccccggcggcuacugccugaccagauggaugcugaucgaggccgagcugaagugcuucggcaacaccgccguggccaagugcaacgagaagcacgacgaggaguucugcgacaugcugagacuguucgacuucaacaagcaggccaucagaagacugaagaccgaggcccagaugagcauccagcugaucaacaaggccgugaacgcccugaucaacgaccagcugaucaugaagaaccaccugagagacaucaugggcauccccuacugcaacuacagcaaguacugcuaccugaaccacaccgugaccggcaagaccagccugcccagaugcugccuggugagcaacggcagcuaccugaacgagacccacuucagcgacgacaucgagcagcaggccgacaacaugaucaccgagcugcugcagaaggaguacaucgacagacagggcaagaccccccugggccugguggaccuguucguguucagcaccagcuucuaccugaucagcaucuuccugcaccuggugaagauccccacccacagacacaucaccggcaagcccugccccaagccccacagacugaaccacaugggcaucugcagcugcggccuguacaaccaccccggcgugcccgugaaguggaagagaugaggacuagucccuguucccagagcccacuuuuuuuucuuuuuuugaaauaaaauagccugucuuucagaucucaaaggcucuuuucagagccaccaaaaaaaaaaaaaaaaaaaaaaaaaaaaaaaaaaaaaaaaaaaaaaaaaaaaaaaaaaaaaaaaaaaaaaaaaaaaaaaaaaaaaaaaaaaaaaaaaaaaa

SEQ ID NO: 38961 - RNA, 1764 nt, Artificial Sequence
  mRNA product Design a-2 (hSL-A100) comprising derived and/or modified sequence from LASV(Lassa virus/H.sapiens-wt/NGA/2016/ISTH_0017;Clade II)__AVO03567__GPCmut11 (opt4)
aggagaguccgcucagccagguugcagaagcggcuuagcguguguccuaaucuucucucugcguguagguaggccugugccgcaaacaagcuuaccaugggccagaucaucaccuucuuccaggaggugccccacgugaucgaggaggugaugaacaucgugcugaucgcccugagccugcuggccauccugaagggcaucuacaacguggccaccugcggccuguucggccuggugagcuuccugcugcugugcggcagaagcugcagcaccaccuacaagggcguguacgagcugcagacccuggagcuggacauggccagccugaacaugaccaugccccugagcugcaccaagaacaacagccaccacuacaucauggugggcaacgagaccggccuggagcugacccugaccaacaccagcaucaucaaccacaaguucugcaaccugagcgacgcccacaagaagaaccuguacgaccacgcccugaugagcaucaucagcaccuuccaccugagcauccccaacuucaaccaguacgaggccaugagcugcgacuucaacggcggcaagaucagcgugcaguacaaccugagccacaccuacgccaucgacgccgccaaccacugcggcaccaucgccaacggcgugcugcagaccuucaugagaauggccuggggcggcagcuacaucgcccuggacagcggcaagggcagcugggacugcaucaugaccagcuaccaguaccugaucauccagaacaccaccugggaggaccacugccaguucagcagacccagccccaucggcuaccugggccugcugagccagagaaccagagacaucuacaucagcagaagacugcugggcaccuucaccuggacccugagcgacagcgagggcaacgagacccccggcggcuacugccugaccagauggaugcugaucgaggccgagcugaagugcuucggcaacaccgccguggccaagugcaacgagaagcacgacgaggaguucugcgacaugcugagacuguucgacuucaacaagcaggccaucagaagacugaagaccgaggcccagaugagcauccagcugaucaacaaggccgugaacgcccugaucaacgaccagcugaucaugaagaaccaccugagagacaucaugggcauccccuacugcaacuacagcaaguacugcuaccugaaccacaccgugaccggcaagaccagccugcccagaugcugccuggugagcaacggcagcuaccugaacgagacccacuucagcgacgacaucgagcagcaggccgacaacaugaucaccgagcugcugcagaaggaguacauggacagacagggcaagaccccccugggccugguggaccuguucguguucagcaccagcuucuaccugaucagcaucuuccugcaccuggugagaauccccacccacagacacgugaucggcaagcccugccccaagccccacagacugaaccacaugggcaucugcagcugcggccuguacaagcaccccggcgugcccgugaaguggaagagaugaggacuagucccuguucccagagcccacuuuuuuuucuuuuuuugaaauaaaauagccugucuuucagaucucaaaggcucuuuucagagccaccaaaaaaaaaaaaaaaaaaaaaaaaaaaaaaaaaaaaaaaaaaaaaaaaaaaaaaaaaaaaaaaaaaaaaaaaaaaaaaaaaaaaaaaaaaaaaaaaaaaaa

SEQ ID NO: 38962 - RNA, 1764 nt, Artificial Sequence
  mRNA product Design a-2 (hSL-A100) comprising derived and/or modified sequence from LASV(Lassa virus/H.sapiens-wt/NGA/2018/ISTH_0959;Clade II)__AVV65099__GPCmut11 (opt4)
aggagaguccgcucagccagguugcagaagcggcuuagcguguguccuaaucuucucucugcguguagguaggccugugccgcaaacaagcuuaccaugggccagaucaucaccuucuuccaggaggugccccacgugaucgaggaggugaugaacaucgugcugaucgcccugagccugcuggccauccugaagggcaucuacaacguggugaccugcggccuguucggccuggugagcuuccugcugcugugcggcagaagcugcagcaccaccuacaagggcguguacgagcugcagacccuggagcuggacauggccagccugaacaugaccaugccccugagcugcaccaagaacaacagccaccacuacaucauggugggcaacgagaccggccuggagcugacccugaccaacaccagcaucaucaaccacaaguucugcaaccugagcgacgcccacaagaagaaccuguacgaccacgcccugaugagcaucaucagcaccuuccaccugagcauccccaacuucaaccaguacgaggccaugagcugcgacuucaacggcggcaagaucagcgugcaguacaaccugagccacgccuacgccaucgacgccgccaaccacugcggcaccaucgccaacggcgugcugcagaccuucaugagaauggccuggggcggcagcuacaucgcccuggacagcggcaagggcagcugggacugcaucaugaccagcuaccaguaccugaucauccagaacaccaccugggaggaccacugccaguucagcagacccagccccaucggcuaccugggccugcugagccagagaaccagagacaucuacaucagcagaagacugcugggcaccuucaccuggacccugagcgacagcgagggcaacgagacccccggcggcuacugccugaccagauggaugcugaucgaggccgagcugaagugcuucggcaacaccgccguggccaagugcaacgagaagcacgacgaggaguucugcgacaugcugagacuguucgacuucaacaagcaggccaucagaagacugaagaccgaggcccagaugagcauccagcugaucaacaaggccgugaacgcccugaucaacgaccagcugaucaugaagaaccaccugagagacaucaugggcauccccuacugcaacuacagcaaguacugcuaccugaaccacaccgugaccggcaagaccagccugcccagaugcugccuggugagcaacggcagcuaccugaacgagacccacuucagcgacgacaucgagcagcaggccgacaacaugaucaccgagcugcugcagaaggaguacaucgacagacagggcaagaccccccugggccugguggaccuguucguguucagcaccagcuucuaccugaucagcaucuuccugcaccuggugaagauccccacccacagacacgugaucggcaagcccugccccaagccccacagacugaaccacaugggcaucugcagcugcggccuguacaagcaccccggcgugcccgugaaguggaagagaugaggacuagucccuguucccagagcccacuuuuuuuucuuuuuuugaaauaaaauagccugucuuucagaucucaaaggcucuuuucagagccaccaaaaaaaaaaaaaaaaaaaaaaaaaaaaaaaaaaaaaaaaaaaaaaaaaaaaaaaaaaaaaaaaaaaaaaaaaaaaaaaaaaaaaaaaaaaaaaaaaaaaa

SEQ ID NO: 38963 - RNA, 1764 nt, Artificial Sequence
  mRNA product Design a-2 (hSL-A100) comprising derived and/or modified sequence from LASV(LASV003-NIG-2008;Clade II)__AIT17580__GPCmut11 (opt4)
aggagaguccgcucagccagguugcagaagcggcuuagcguguguccuaaucuucucucugcguguagguaggccugugccgcaaacaagcuuaccaugggccagaucaucaccuucuuccaggaggugccccacgugaucgaggaggugaugaacaucgugcugaucgcccugagccugcuggccauccugaagggcaucuacaacguggccaccugcggccuguucggccuggugagcuuccugcugcugugcggcagaagcugcagcaccaccuacaagggcguguacgagcugcagacccuggagcuggacauggccagccugaacaugaccaugccccugagcugcaccaagaacaacagccaccacuacaucauggugggcaacgagaccggccuggagcugacccugaccaacaccagcaucaucaaccacaaguucugcaaccugagcgacgcccacaagaagaaccuguacgaccacgcccugaugagcaucaucagcaccuuccaccugagcauccccaacuucaaccaguacgaggccaugagcugcgacuucaacggcggcaagaucagcgugcaguacaaccugagccacaccuacgccguggacgccgccaaccacugcggcaccaucgccaacggcgugcugcagaccuucaugagaauggccuggggcggcagcuacaucgcccuggacagcggcaagggcagcugggacugcaucaugaccagcuaccaguaccugaucauccagaacaccaccugggaggaccacugccaguucagcagacccagccccaucggcuaccugggccugcugagccagagaaccagagacaucuacaucagcagaagacugcugggcaccuucaccuggacccugagcgacagcgagagcaacgagacccccggcggcuacugccugaccagauggaugcugaucgaggccgagcugaagugcuucggcaacaccgccguggccaagugcaacgagaagcacgacgaggaguucugcgacaugcugagacuguucgacuucaacaagcaggccaucagaagacugaaggccgaggcccagaugagcauccagcugaucaacaaggccgugaacgcccugaucaacgaccagcugaucaugaagaaccaccugagagacaucaugggcauccccuacugcaacuacagcaaguacugcuaccugaaccacaccgugaccggcagaaccagccugcccagaugcugccuggugagcaacggcagcuaccugaacgagacccacuucagcgacgacaucgagcagcaggccgacaacaugaucaccgagcugcugcagaaggaguacauggacagacagggcaagaccccccugggccugguggaccuguucguguucagcaccagcuucuaccugaucagcaucuuccugcaccuggugaagauccccacccacagacacgugaucggcaagcccugccccaagccccacagacugaaccacaugggcaucugcagcugcggccuguacaagcaccccggcgugcccgugaaguggaagagaugaggacuagucccuguucccagagcccacuuuuuuuucuuuuuuugaaauaaaauagccugucuuucagaucucaaaggcucuuuucagagccaccaaaaaaaaaaaaaaaaaaaaaaaaaaaaaaaaaaaaaaaaaaaaaaaaaaaaaaaaaaaaaaaaaaaaaaaaaaaaaaaaaaaaaaaaaaaaaaaaaaaaa

SEQ ID NO: 38964 - RNA, 1764 nt, Artificial Sequence
  mRNA product Design a-2 (hSL-A100) comprising derived and/or modified sequence from LASV(LASV035-NIG-2009;Clade II)__AIT17588__GPCmut11 (opt4)
aggagaguccgcucagccagguugcagaagcggcuuagcguguguccuaaucuucucucugcguguagguaggccugugccgcaaacaagcuuaccaugggccagaucaucaccuucuuccaggaggugccccacgugaucgaggaggugaugaacaucgugcugaucgcccugagccugcuggccauccugaagggcaucuacaacguggccaccugcggccuguucggccuggugagcuuccugcugcugugcggcagaagcugcagcaccaccuacaagggcguguacgagcugcagacccuggagcuggacauggccagccugaacaugaccaugccccugagcugcaccaagaacaacagccaccacuacaucauggugggcaacgagaccggccuggagcugacccugaccaacaccagcaucaucaaccacaaguucugcaaccugagcgacgcccacaagaagaaccuguacgaccacgcccugaugagcaucaucagcaccuuccaccugagcauccccaacuucaaccaguacgaggccaugagcugcgacuucaacggcggcaagaucagcgugcaguacaaccugagccacgccuacgccguggacgccgccaaccacugcggcaccaucgccaacggcgugcugcagaccuucaugagaauggccuggggcggcagcuacaucgcccuggacagcggcaagggcagcugggacugcaucaugaccagcuaccaguaccugaucauccagaacaccaccugggaggaccacugccaguucagcagacccagccccaucggcuaccugggccugcugagccagagaaccagagacaucuacaucagcagaagacugcugggcaccuucaccuggacccugagcgacagcgagggcaacgagacccccggcggcuacugccugaccagauggaugcugaucgaggccgagcugaagugcuucggcaacaccgccguggccaagugcaacgagaagcacgacgaggaguucugcgacaugcugagacuguucgacuucaacaagcaggccaucagaagacugaaggccgaggcccagaugagcauccagcugaucaacaaggccgugaacgcccugaucaacgaccagcugaucaugaagaaccaccugagagacaucaugggcauccccuacugcaacuacagcaaguacugcuaccugaaccacaccgugaccggcaagaccagccugcccagaugcugccuggugagcaacggcagcuaccugaacgagacccacuucagcgacgacaucgagcagcaggccgacaacaugaucaccgagcugcugcagaaggaguacaucgacagacagggcaagaccccccugggccugguggaccuguucguguucagcaccagcuucuaccugaucagcaucuuccugcaccuggugaagauccccacccacagacacgugaucggcaagcccugccccaagccccacagacugaaccacaugggcaucugcagcugcggccuguacaagcaccccggcgugcccgugaaguggaagagaugaggacuagucccuguucccagagcccacuuuuuuuucuuuuuuugaaauaaaauagccugucuuucagaucucaaaggcucuuuucagagccaccaaaaaaaaaaaaaaaaaaaaaaaaaaaaaaaaaaaaaaaaaaaaaaaaaaaaaaaaaaaaaaaaaaaaaaaaaaaaaaaaaaaaaaaaaaaaaaaaaaaaa

SEQ ID NO: 38965 - RNA, 1764 nt, Artificial Sequence
  mRNA product Design a-2 (hSL-A100) comprising derived and/or modified sequence from LASV(LASV1000-NIG-2009;Clade II)__AIT17782__GPCmut11 (opt4)
aggagaguccgcucagccagguugcagaagcggcuuagcguguguccuaaucuucucucugcguguagguaggccugugccgcaaacaagcuuaccaugggccagaucaucaccuucuuccaggaggugccccacgugaucgaggaggugaugaacaucgugcugaucgcccugagccugcuggccauccugaagggcaucuacaacguggccaccugcggccuguucggccuggugagcuuccugcugcugugcggcagaagcugcagcaccaccuacaagggcguguacgagcugcagacccuggagcuggacauggccagccugaacaugaccaugccccugagcugcaccaagaacaacagccaccacuacaucauggugggcaacgagaccggccuggagcugacccugaccaacaccagcaucaucaaccacaaguucugcaaccugagcgacgcccacaagaagaaccuguacgaccacgcccugaugagcaucaucagcaccuuccaccugagcauccccaacuucaaccaguacgaggccaugagcugcgacuucaacggcggcaagaucagcgugcaguacaaccugagccacaccuacgccguggacgccgccaaccacugcggcaccaucgccaacggcgugcugcagaccuucaugagaauggccuggggcggcagcuacaucgcccuggacagcggcaagggcagcugggacugcaucaugaccagcuaccaguaccugaucauccagaacaccaccugggaggaccacugccaguucagcagacccagccccaucggcuaccugggccugcugagccagagaaccagagacaucuacaucagcagaagacugcugggcaccuucaccuggacccugagcgacagcgagggcaacgagacccccggcggcuacugccugaccagauggaugcugaucgaggccgagcugaagugcuucggcaacaccgccguggccaagugcaacgagaagcacgacgaggaguucugcgacaugcugagacuguucgacuucaacaagcaggccaucaagagacugaagaccgaggcccagaugagcauccagcugaucaacaaggccgugaacgcccugaucaacgaccagcugaucaugaagaaccaccugagagacaucaugggcauccccuacugcaacuacagcaaguacugcuaccugaaccacaccgugaccggcaagaccagccugcccagaugcugccuggugagcaacggcagcuaccugaacgagacccacuucagcgacgacaucgagcagcaggccgacaacaugaucaccgagcugcugcagaaggaguacaucgacagacagggcaagaccccccugggccugguggaccuguucguguucagcaccagcuucuaccugaucagcaucuuccugcaccuggugaagauccccacccacagacacguggugggcaagcccugccccaagccccacagacugaaccacaugggcaucugcagcugcggccuguacaagcaccccggcgugcccgugaaguggaagagaugaggacuagucccuguucccagagcccacuuuuuuuucuuuuuuugaaauaaaauagccugucuuucagaucucaaaggcucuuuucagagccaccaaaaaaaaaaaaaaaaaaaaaaaaaaaaaaaaaaaaaaaaaaaaaaaaaaaaaaaaaaaaaaaaaaaaaaaaaaaaaaaaaaaaaaaaaaaaaaaaaaaaa

SEQ ID NO: 38966 - RNA, 1764 nt, Artificial Sequence
  mRNA product Design a-2 (hSL-A100) comprising derived and/or modified sequence from LASV(LASV221-NIG-2010;Clade II)__AIT17624__GPCmut11 (opt4)
aggagaguccgcucagccagguugcagaagcggcuuagcguguguccuaaucuucucucugcguguagguaggccugugccgcaaacaagcuuaccaugggccagaucaucaccuucuuccaggaggugccccacgugaucgaggaggugaugaacaucgugcugaucgcccugagccugcuggccauccugaagggcaucuacaacguggccaccugcggccuguucggccuggugagcuuccugcugcugugcggcagaagcugcagcaccaccuacaagggcguguacgagcugcagacccuggagcuggacauggccagccugaacaugaccaugccccugagcugcaccaagaacaacagccaccacuacaucauggugggcaacgagaccggccuggagcugacccugaccaacaccagcaucaucaaccacaaguucugcaaccugagcgacgcccacaagaagaaccuguacgaccacgcccugaugagcaucaucagcaccuuccaccugagcauccccaacuucaaccaguacgaggccaugagcugcgacuucaacggcggcaagaucagcgugcaguacaaccugagccacaccuacgccaucgacgccgccaaccacugcggcaccaucgccaacggcgugcugcagaccuucaugagaauggccuggggcggcagcuacaucgcccuggacagcggcaagggcagcugggacugcaucaugaccagcuaccaguaccugaucauccagaacaccaccugggaggaccacugccaguucagcagacccagccccaucggcuaccugggccugcugagccagagaaccagagacaucuacaucagcagaagacugcugggcaccuucaccuggacccugagcgacagcgagggcaacgagacccccggcggcuacugccugaccagauggaugcugaucgaggccgagcugaagugcuucggcaacaccgccguggccaagugcaacgagaagcacgacgaggaguucugcgacaugcugagacuguucgacuucaacaagcaggccaucagaagacugaagaccgaggcccagaugagcauccagcugaucaacaaggccgugaacgcccugaucaacgaccagcugaucaugaagaaccaccugagagacaucaugggcauccccuacugcaacuacagcaaguacugcuaccugaaccacaccgugaccggcaagaccagccugcccagaugcugccuggugagcaacggcagcuaccugaacgagacccacuucagcgacgacaucgagcagcaggccgacaacaugaucaccgagaugcugcagaaggaguacauggacagacagggcaagaccccccugggccugguggaccuguucguguucagcaccagcuucuaccugaucagcaucuuccugcaccuggugaagauccccacccacagacacgugaucggcaagcccugccccaagccccacagacugaaccacaugggcaucugcagcugcggccuguacaagcaccccggcgugcccgugaaguggaagagaugaggacuagucccuguucccagagcccacuuuuuuuucuuuuuuugaaauaaaauagccugucuuucagaucucaaaggcucuuuucagagccaccaaaaaaaaaaaaaaaaaaaaaaaaaaaaaaaaaaaaaaaaaaaaaaaaaaaaaaaaaaaaaaaaaaaaaaaaaaaaaaaaaaaaaaaaaaaaaaaaaaaaa

SEQ ID NO: 38967 - RNA, 1764 nt, Artificial Sequence
  mRNA product Design a-2 (hSL-A100) comprising derived and/or modified sequence from LASV(LASV237-NIG-2010;Clade II)__AIT17638__GPCmut11 (opt4)
aggagaguccgcucagccagguugcagaagcggcuuagcguguguccuaaucuucucucugcguguagguaggccugugccgcaaacaagcuuaccaugggccagaucaucaccuucuuccaggaggugccccacgugaucgaggaggugaugaacaucgugcugaucgcccugagccugcuggccauccugaagggcaucuacaacguggccaccugcggccuguucggccuggugagcuuccugcugcugugcggcagaagcugcagcaccaccuacaagggcguguacgagcugcagacccuggagcuggacauggccagccugaacaugaccaugccccugagcugcaccaagaacaacagccaccacuacaucauggugggcaacgagaccggccuggagcugacccugaccaacaccagcaucaucaaccacaaguucugcaaccugagcgacgcccacaagaaggaccuguacgaccacgcccugaugagcaucaucagcaccuuccaccugagcauccccaacuucaaccaguacgaggccaugagcugcgacuucaacggcggcaagaucagcgugcaguacaaccugagccacaccuacgccguggacgccgccaaccacugcggcaccaucgccaacggcgugcugcagaccuucaugagaauggccuggggcggcagcuacaucgcccuggacagcggcaagggcagcugggacugcaucaugaccagcuaccaguaccugaucauccagaacaccaccugggaggaccacugccaguucagcagacccagccccaucggcuaccugggccugcugagccagagaaccagagacaucuacaucagcagaagacugcugggcaccuucaccuggacccugagcgacagcgagggcaacgagacccccggcggcuacugccugaccagauggaugcugaucgaggccgagcugaagugcuucggcaacaccgccguggccaagugcaacgagaagcacgacgaggaguucugcgacaugcugagacuguucgacuucaacaagcaggccaucagaagacugaagaccgaggcccagaugagcauccagcugaucaacaaggccgugaacgcccugaucaacgaccagcugaucaugaagaaccaccugagagacaucaugggcauccccuacugcaacuacagcaaguacugcuaccugaaccacaccgugaccggcaagaccagccugcccagaugcugccuggugagcaacggcagcuaccugaacgagacccacuucagcgacgacaucgagcagcaggccgacaacaugaucaccgagcugcugcagaaggaguacauggacagacagggcaagaccccccugggccugguggaccuguucguguucagcaccagcuucuaccugaucagcaucuuccugcaccugaucaagauccccacccacagacacaucaccggcaagcccugccccaagccccacagacugaaccacaugggcaucugcagcugcggccuguacaagcaccccggcgugcccgugaaguggaagagaugaggacuagucccuguucccagagcccacuuuuuuuucuuuuuuugaaauaaaauagccugucuuucagaucucaaaggcucuuuucagagccaccaaaaaaaaaaaaaaaaaaaaaaaaaaaaaaaaaaaaaaaaaaaaaaaaaaaaaaaaaaaaaaaaaaaaaaaaaaaaaaaaaaaaaaaaaaaaaaaaaaaaa

SEQ ID NO: 38968 - RNA, 1764 nt, Artificial Sequence
  mRNA product Design a-2 (hSL-A100) comprising derived and/or modified sequence from LASV(LASV253-NIG-2011;Clade II)__AIT17670__GPCmut11 (opt4)
aggagaguccgcucagccagguugcagaagcggcuuagcguguguccuaaucuucucucugcguguagguaggccugugccgcaaacaagcuuaccaugggccagaucaucaccuucuuccaggaggugccccacgugaucgaggaggugaugaacaucgugcugaucgcccugagccugcuggccauccugaagggcaucuacaacguggccaccugcggccuguucggccuggugagcuuccugcugcugugcggcagaagcugcagcaccaccuacaagggcguguacgagcugcagacccuggagcuggacauggccagccugaacaugaccaugccccugagcugcaccaagaacaacagccaccacuacaucauggugggcaacgagaccggccuggagcugacccugaccaacaccagcaucaucaaccacaaguucugcaaccugagcgacgcccacaagaagaaccuguacgaccacgcccugaugagcaucaucagcaccuuccaccugagcauccccaacuucaaccaguacgaggccaugagcugcgacuucaacggcggcaagaucagcgugcaguacaaccugagccacaccuacgccguggacgccgccaaccacugcggcaccaucgccaacggcgugcugcagaccuucaugagaauggccuggggcggcagcuacaucgcccuggacagcggcaagggcagcugggacugcaucaugaccagcuaccaguaccugaucauccagaacaccaccugggaggaccacugccaguucagcagacccagccccaucggcuaccugggccugcugagccagagaaccagagacaucuacaucagcagaagacugcugggcaccuucaccuggacccugagcgacagcgagggcaacgagacccccggcggcuacugccugaccagauggaugcugaucgaggccgagcugaagugcuucggcaacaccgccguggccaagugcaacgagaagcacgacgaggaguucugcgacaugcugagacuguucgacuucaacaagcaggccaucagaagacugaaggccgaggcccagaugagcauccagcugaucaacaaggccgugaacgcccugaucaacgaccagcugaucaugaagaaccaccugagagacaucaugggcauccccuacugcaacuacagcaaguacugcuaccugaaccacaccgugaccggcagaaccagccugcccagaugcugccuggugagcaacggcagcuaccugaacgagacccacuucagcgacgacaucgagcagcaggccgacaacaugaucaccgagcugcugcagaaggaguacaucgacagacagggcaagaccccccugggccugguggaccuguucguguucagcaccagcuucuaccugaucagcaucuuccugcaccuggugaagauccccacccacagacacaucaucggcaagcccugccccaagccccacagacugaaccacaugggcaucugcagcugcggccuguacaagcaccccggcgugcccgugaaguggaagagaugaggacuagucccuguucccagagcccacuuuuuuuucuuuuuuugaaauaaaauagccugucuuucagaucucaaaggcucuuuucagagccaccaaaaaaaaaaaaaaaaaaaaaaaaaaaaaaaaaaaaaaaaaaaaaaaaaaaaaaaaaaaaaaaaaaaaaaaaaaaaaaaaaaaaaaaaaaaaaaaaaaaaa

SEQ ID NO: 38969 - RNA, 1764 nt, Artificial Sequence
  mRNA product Design a-2 (hSL-A100) comprising derived and/or modified sequence from LASV(LASV254-NIG-2011;Clade II)__AIT17674__GPCmut11 (opt4)
aggagaguccgcucagccagguugcagaagcggcuuagcguguguccuaaucuucucucugcguguagguaggccugugccgcaaacaagcuuaccaugggccagaucaucaccuucuuccaggaggugccccacgugaucgaggaggugaugaacaucgugcugaucgcccugagccugcuggccauccugaagggcaucuacaacguggccaccugcggccuguucggccuggugagcuuccugcugcugugcggcagaagcugcagcaccaccuacaagggcguguacgagcugcagacccuggagcuggacaugaccaaccugaacaugaccaugccccugagcugcaccaagaacaacagccaccacuacaucauggugggcaacgagaccggccuggagcugacccugaccaacaccagcaucaucaaccacaaguucugcaaccugagcgacgcccacaagaagaaccuguacaaccacgcccugaugagcaucaucagcaccuuccaccugagcauccccaacuucaaccaguacgaggccaugagcugcgacuucaacggcggcaagaucagcgugcaguacaaccugagccacagcuacgccguggacgccgccaaccacugcggcaccaucgccaacggcgugcugcagaccuucaugagaauggccuggggcggcagcuacaucgcccuggacagcggcaagggcaacugggacugcaucaugaccagcuaccaguaccugaucauccagaacaccaccugggaggaccacugccaguucagcagacccagccccaucggcuaccugggccugcugagccagagaaccagagacaucuacaucagcagaagacugcugggcaccuucaccuggacccugagcgacagcgagggcaacgagacccccggcggcuacugccugaccagauggaugcugaucgaggccgagcugaagugcuucggcaacaccgccguggccaagugcaacgagaagcacgacgaggaguucugcgacaugcugagacuguucgacuucaacaagcaggccaucagaagacugaagaccgaggcccaggccaacauccagcugaucaacaaggccgugaacgcccugaucaacgaccagcugaucaugaagaaccaccugagagacaucaugggcauccccuacugcaacuacagcaaguacugcuaccugaaccacaccgugaccggcaagaccagccugcccagaugcugccuggugagcaacggcagcuaccugaacgagacccacuucagcgacgacaucgagcagcaggccgacaacaugaucaccgagcugcugcagaaggaguacauggacagacagggcaagaccccccugggccugguggaccuguucguguucagcaccagcuucuaccugaucagcaucuuccugcaccuggugaagauccccacccacagacacgugaucggcaagcccugccccaagccccacagacugaaccacaugggcaucugcagcugcggccuguacaagcaccccggcgugcccgugaaguggaagagaugaggacuagucccuguucccagagcccacuuuuuuuucuuuuuuugaaauaaaauagccugucuuucagaucucaaaggcucuuuucagagccaccaaaaaaaaaaaaaaaaaaaaaaaaaaaaaaaaaaaaaaaaaaaaaaaaaaaaaaaaaaaaaaaaaaaaaaaaaaaaaaaaaaaaaaaaaaaaaaaaaaaaa

SEQ ID NO: 38970 - RNA, 1764 nt, Artificial Sequence
  mRNA product Design a-2 (hSL-A100) comprising derived and/or modified sequence from LASV(Nig08-A19;Clade III)__ADU56618__GPCmut11 (opt4)
aggagaguccgcucagccagguugcagaagcggcuuagcguguguccuaaucuucucucugcguguagguaggccugugccgcaaacaagcuuaccaugggccagaucgugaccuucuuccaggaggugccccacgugaucgaggaggugaugaacaucgugcugaucgcccugagcauccuggccauccugaagggccuguacaacaucgccaccugcggccugaucggccuggugaccuuccugcugcugagcggcagaagcugcagcaugaccuacaagggcguguacgagcugcagacccuggagcugaacaugaacacccugaacaugaccaugccccugagcugcaccaagaacaacagccaccacuacaucauggugggcaacgagaccggccuggagcugacccugaccaacaccagccugcugcaccacaaguucugcaaccugagcgacgcccacaagaagaaccuguacgaccacacccugaugagcaucaucagcaccuuccaccugagcauccccaacuucaaccaguacgaggccaugagcugcgacuucaacggcggcaagaucaccgugcaguacaaccugagccacagcuacgccaucgacgccgccaaccacugcggcaccguggccaacggcgugcugcagaccuucaugagaauggccuggggcggcagcuacaucgcccuggacagcggcagaggcaagugggacugcaucaugaccagcuaccaguaccugaucauccagaacaccaccugggaggaccacugccaguucagcagacccagccccaucggcuaccugggccugcugagccagagaaccagagacaucuacaucagcagaagacugcugggcaccuucaccuggacccugagcgacagcgagggcaacgagacccccggcggcuacugccugaccagauggaugcugaucgaggccgagcugaagugcuucggcaacaccgccguggccaagugcaacgagaagcacgacgaggaguucugcgacaugcugagacuguucgacuucaacaagcaggccaucagaagacugaaggccgaggcccagaugagcauccagcugaucaacaaggccgugaacgcccugaucaacgaccagcugaucaugaagaaccaccugagagacaucaugggcauccccuacugcaacuacagcaaguacugcuaccugaaccacaccagcaccggcagaaccagccugcccagaugcugccuggugagcaacggcagcuaccugaacgagacccacuucagcgacgacaucgagcagcaggccgacaacaugaucaccgagaugcugcagaaggaguaccuggacagacagggcaagaccccccugggccugguggaccuguucguguucagcaccagcuucuaccugaucagcaucuuccugcaccuggugaagauccccacccacagacacaucgugggcaagcccugccccaagccccacagacugaaccacaugggcaucugcagcugcggccuguacaagcagcccggcgugcccgugagauggaagagaugaggacuagucccuguucccagagcccacuuuuuuuucuuuuuuugaaauaaaauagccugucuuucagaucucaaaggcucuuuucagagccaccaaaaaaaaaaaaaaaaaaaaaaaaaaaaaaaaaaaaaaaaaaaaaaaaaaaaaaaaaaaaaaaaaaaaaaaaaaaaaaaaaaaaaaaaaaaaaaaaaaaaa

SEQ ID NO: 38971 - RNA, 1767 nt, Artificial Sequence
  mRNA product Design a-2 (hSL-A100) comprising derived and/or modified sequence from LASV(G1180-SLE-2010;Clade IV)__AIT17168__GPCmut11 (opt4)
aggagaguccgcucagccagguugcagaagcggcuuagcguguguccuaaucuucucucugcguguagguaggccugugccgcaaacaagcuuaccaugggccagaucgugaccuucuuccaggaggugccccacgugaucgaggaggugaugaacaucgugcugaucgcccugagcauccuggccgugcugaagggccuguacaacuucgccaccugcggccuggugggccugcugaccuuccugcugcugugcggcagaagcugcaccgccagcagauacaagggcguguacgagcugcagacccuggagcugaacauggagacccugaacaugaccaugccccugagcugcaccaagaacaacagccaccacuacaucauggugggcaacgagaccggccuggagcugacccugaccaacaccagcaucaucaaccacaaguucugcaaccugagcgacgcccacaagaagaaccuguacgaccacgcccugaugagcaucaucagcaccuuccaccugagcauccccaacuucaaccaguacgaggccaugagcugcgacuucaacggcggcaagaucagcgugcaguacaaccugagccacagcuacgccggcgacgccgccaaccacugcggcaccguggccaacggcgugcugcagaccuucaugagaauggccuggggcggcagcuacaucgcccuggacagcggccacggcagcugggacugcaucaugaccagcuaccaguaccugaucauccagaacaccaccugggaggaccacugccaguucagcagacccagccccaucggcuaccugggccugcugagccagagaaccagagacaucuacaucagcagaagacugcugggcaccuucaccuggacccugagcgacagcgagggcaaggacacccccggcggcuacugccugaccagauggaugcugaucgaggccgagcugaagugcuucggcaacaccgccguggccaagugcaacgagaagcacgacgaggaguucugcgacaugcugagacuguucgacuucaacaagcaggccauccagagacugaaggccgaggcccagaugagcauccagcugaucaacaaggccgugaacgcccugaucaacgaccagcugaucaugaagaaccaccugagagacaucaugggcauccccuacugcaacuacagcaaguacugcuaccugaaccacaccaccaccggcaagaccagccugcccaagugcugccuggugagcaacggcagcuaccugaacgagacccacuucagcgacgacaucgagcagcaggccgacaacaugaucaccgagaugcugcagaaggaguacauggagagacagggcaagaccccccugggccugguggaccuguucguguucagcaccagcuucuaccugaucagcaucuuccugcaccuggugaagauccccacccacagacacaucgugggcaagagcugccccaagccccacagacugaaccacaugggcaucugcagcugcggccuguacaagcagcccggcgugcccgugaaguggaagagaugaggacuagucccuguucccagagcccacuuuuuuuucuuuuuuugaaauaaaauagccugucuuucagaucucaaaggcucuuuucagagccaccaaaaaaaaaaaaaaaaaaaaaaaaaaaaaaaaaaaaaaaaaaaaaaaaaaaaaaaaaaaaaaaaaaaaaaaaaaaaaaaaaaaaaaaaaaaaaaaaaaaaa

SEQ ID NO: 38972 - RNA, 1767 nt, Artificial Sequence
  mRNA product Design a-2 (hSL-A100) comprising derived and/or modified sequence from LASV(G1442-SLE-2011;Clade IV)__AIT17180__GPCmut11 (opt4)
aggagaguccgcucagccagguugcagaagcggcuuagcguguguccuaaucuucucucugcguguagguaggccugugccgcaaacaagcuuaccaugggccagaucgugaccuucuuccaggaggugccccacgugaucgaggaggugaugaacaucgugcugaucgcccugagcauccuggccgugcugaagggccuguacaacguggccaccugcggccugaucggccuggugaccuuccugcugcugugcggcagaagcugcaccaccacccuguacaagggcguguacgagcugcagacccuggagcugaacauggagacccugaacaugaccaugccccugagcugcaccaagaacaacagccaccacuacaucagagugggcaacgagaccggccuggagcugacccugaccaacaccagcaucaucaaccacaaguucugcaaccugagcgacgcccacaagaagaaccuguacgaccacgcccugaugagcaucaucagcaccuuccaccugagcauccccaacuucaaccaguacgaggccaugagcugcgacuucaacggcggcaagaucagcgugcaguacaaccugagccacagcuacgccggcgacgccgccaaccacugcggcaccguggccaacggcgugcugcagaccuucaugagaauggccuggggcggcagcuacaucgcccuggacagcggcagaggcaacugggacugcaucaugaccagcuaccaguaccugaucauccagaacaccaccugggacgaccacugccaguucagcagacccagccccaucggcuaccugggccugcugagccagagaaccagagacguguacaucagcagaagacugcugggcaccuucaccuggacccugagcgacagcgagggcaaggacacccccggcggcuacugccugaccagauggaugcugaucgaggccgagcugaagugcuucggcaacaccgccguggccaagugcaacgagaagcacgacgaggaguucugcgacaugcugagacuguucgacuucaacaagcaggccauccagagacugaaggccgaggcccagaugagcauccagcugaucaacaaggccgugaacgcccugaucaacgaccagcugaucaugaagaaccaccugagagacaucaugggcauccccuacugcaacuacagcaaguacugcuaccugaacaacaccgccaccggcaagaccagccugcccaagugcugccugaucagcaacggcagcuaccugaacgagacccacuucagcgacgacaucgagcaggaggccgacaacaugaucaccgagaugcugcagaaggaguacauggagagacagggcaagaccccccugggccugguggaccuguucguguucagcaccagcuucuaccugaucagcaucuuccugcaccuggugaagauccccacccacagacacaucgugggcaagagcugccccaagccccacagacugaaccacaugggcaucugcagcugcggccuguacaagcagcccggcgugcccgugagauggaagagaugaggacuagucccuguucccagagcccacuuuuuuuucuuuuuuugaaauaaaauagccugucuuucagaucucaaaggcucuuuucagagccaccaaaaaaaaaaaaaaaaaaaaaaaaaaaaaaaaaaaaaaaaaaaaaaaaaaaaaaaaaaaaaaaaaaaaaaaaaaaaaaaaaaaaaaaaaaaaaaaaaaaaa

SEQ ID NO: 38973 - RNA, 1767 nt, Artificial Sequence
  mRNA product Design a-2 (hSL-A100) comprising derived and/or modified sequence from LASV(G3010-SLE-2013;Clade IV)__AIT17344__GPCmut11 (opt4)
aggagaguccgcucagccagguugcagaagcggcuuagcguguguccuaaucuucucucugcguguagguaggccugugccgcaaacaagcuuaccaugggccagaucgugaccuucuuccaggaggugccccacgugaucgaggaggugaugaacaucgugcugaucgcccugagcauccuggccgugcugaagggccuguacaacuucgccaccugcggccuggugggccuggugaccuuccugcugcugugcggcagaagcugcaccaccagccuguacaagggcguguacgagcugcagacccuggagcugaacauggagacccugaacaugaccaugccccugagcugcaccaagaacaacagccaccacuacaucauggugggcaacgagaccggccuggagcugacccugaccaacaccagcaucaucaaccacaaguucugcaaccugagcgacgcccacaagaagaaccuguacaaccacgcccugaugagcaucaucagcaccuuccaccugagcauccccaacuucaaccaguacgaggccaugagcugcgacuucaacggcggcaagaucagcgugcaguacaaccugagccacagcuacgccggcgacgccgccagccacugcggcaccguggccaacggcgugcugcagaccuucaugagaauggccuggggcggcagcuacaucgcccuggacagcggcuacggcaagugggacugcaucaugaccagcuaccaguaccugaucauccagaacaccaccugggaggaccacugccaguucagcagacccagccccaucggcuaccugggccugcugagccagagaaccagagacaucuacaucagcagaagacugcugggcaccuucaccuggacccugagcgacagcgagggcaaggacacccccggcggcuacugccugaccagauggaugcugaucgaggccgagcugaagugcuucggcaacaccgccguggccaagugcaacgagaagcacgacgaggaguucugcgacaugcugagacuguucgacuucaacaagcaggccauccagagacugaagaccgaggcccagaugagcauccagcugaucaacaaggccgugaacgcccugaucaacgaccagcugaucaugaagaaccaccugagagacaucaugggcauccccuacugcaacuacagcaaguacugcuaccugaaccacaccaccaccggcaagaccagccugcccaagugcugccuggugagcaacggcagcuaccugaacgagacccacuucagcgacgacaucgagcagcaggccgacaacaugaucaccgagaugcugcagaaggaguacauggagagacagggcaagaccccccugggccugguggaccuguucguguucagcaccagcuucuaccugaucagcaucuuccugcaccuggugaagauccccacccacagacacaucgugggcaagagcugccccaagccccacagacugaaccacaugggcaucugcagcugcggccuguacaagcagcccggcgugcccgugagauggaagagaugaggacuagucccuguucccagagcccacuuuuuuuucuuuuuuugaaauaaaauagccugucuuucagaucucaaaggcucuuuucagagccaccaaaaaaaaaaaaaaaaaaaaaaaaaaaaaaaaaaaaaaaaaaaaaaaaaaaaaaaaaaaaaaaaaaaaaaaaaaaaaaaaaaaaaaaaaaaaaaaaaaaaa

SEQ ID NO: 38974 - RNA, 1767 nt, Artificial Sequence
  mRNA product Design a-2 (hSL-A100) comprising derived and/or modified sequence from LASV(G502-SLE-2009;Clade IV)__AIT17126__GPCmut11 (opt4)
aggagaguccgcucagccagguugcagaagcggcuuagcguguguccuaaucuucucucugcguguagguaggccugugccgcaaacaagcuuaccaugggccagaucgugaccuucuuccaggaggugccccacgugaucgaggaggugaugaacaucgugcugaucgcccugagcauccuggccgugcugaagggccuguacaacuucgccaccugcggccuggugggccugcugaccuuccugcugcugugcggcagaagcugcaccaccggccuguacaagggcguguacgagcugcagacccuggagcugaacauggagacccugaacaugaccaugccccugagcugcaccaagaacaacagccaccacuacaucauggugggcaacgagaccggccuggagcugacccugaccaacaccagcaucaucaaccacaaguucugcaaccugagcgacgcccacaagaagaaccuguacgaccacgcccugaugagcaucaucagcaccuuccaccugagcauccccaacuucaaccaguacgaggccaugagcugcgacuucaacggcggcaagaucagcgugcaguacaaccugagccacagcuacgccggcgacgccgccgaccacugcggcaccguggccaacggcgugcugcagaccuucaugagaauggccuggggcggcagcuacaucgcccuggacagcggcagaggcagaugggacugcaucaugaccagcuaccaguaccugaucauccagaacaccaccugggaggaccacugccaguucagcagacccagccccaucggcuaccugggccugcugagccagagaaccagagacaucuacaucagcagaagacugcugggcaccuucaccuggacccugagcgacagcgagggcaaggacacccccggcggcuacugccugaccagauggaugcugaucgaggccgagcugaagugcuucggcaacaccgccguggccaagugcaacgagaagcacgacgaggaguucugcgacaugcugagacuguucgacuucaacaagcaggccauccagagacugaaggccgaggcccagaugagcauccagcugaucaacaaggccgugaacgcccugaucaacgaccagcuggugaugaagaaccaccugagagacaucaugggcauccccuacugcaacuacagcagauacugcuaccugaaccacaccaccaccggcagaaccagccugcccaagugcugccuggugagcaacggcagcuaccugaacgagacccacuucagcgacgacaucgagcagcaggccgacaacaugaucaccgagaugcugcagaaggaguacauggagagacagggcaagaccccccugggccugguggaccuguucguguucagcaccagcuucuaccugaucagcaucuuccugcaccuggugaagauccccacccacagacacaucgugggcaagagcugccccaagccccacagacugaaccacaugggcaucugcagcugcggccuguacaagcagcccggcgugcccgugaaguggaagagaugaggacuagucccuguucccagagcccacuuuuuuuucuuuuuuugaaauaaaauagccugucuuucagaucucaaaggcucuuuucagagccaccaaaaaaaaaaaaaaaaaaaaaaaaaaaaaaaaaaaaaaaaaaaaaaaaaaaaaaaaaaaaaaaaaaaaaaaaaaaaaaaaaaaaaaaaaaaaaaaaaaaaa

SEQ ID NO: 38975 - RNA, 1767 nt, Artificial Sequence
  mRNA product Design a-2 (hSL-A100) comprising derived and/or modified sequence from LASV(G733-SLE-2010;Clade IV)__AIT17154__GPCmut11 (opt4)
aggagaguccgcucagccagguugcagaagcggcuuagcguguguccuaaucuucucucugcguguagguaggccugugccgcaaacaagcuuaccaugggccagaucgugaccuucuuccaggaggugccccacgugaucgaggaggugaugaacaucgugcugaucgcccugagcauccuggccgugcugaagggccuguacaacuucgccaccugcggcaucgugggccuggugagcuuccugcugcugugcggcagaagcugcaccaccagccuguacaagggcguguacgagcugcagacccuggagcugaacauggagacccugaacaugaccaugccccugagcugcaccaagaacaacagccaccacuacaucauggugggcaacgagaccggccuggagcugacccugaccaacaccagcaucaucaaccacaaguucugcaaccugagcgacgcccacaagaagaaccuguacgaccacgcccugaugagcaucaucagcaccuuccaccugagcauccccaacuucaaccaguacgaggccaugagcugcgacuucaacggcggcaagaucagcgugcaguacaaccugagccacagcuacgccggcgacgccgccaaccacugcggcaccaucgccaacggcgugcugcagaccuucaugagaauggccuggggcggcagcuacaucgcccuggacagcggcagagacagaugggacugcaucaugaccagcuaccaguaccugaucauccagaacaccaccugggaggaccacugccaguucagcagacccagccccaucggcuaccugggccugcugagccagagaaccagagacaucuacaucagcagaagacugcugggcaccuucaccuggacccugagcgacagcgagggcaaggacacccccggcggcuacugccugaccagauggaugcugaucgaggccgagcugaagugcuucggcaacaccgccguggccaagugcaacgagaagcacgacgaggaguucugcgacaugcugagacuguucgacuucaacaagcaggccauccagagacugaaggccgaggcccagaugagcauccagcugaucaacaaggccgugaacgcccugaucaacgaccagcugaucaugaagaaccaccugagagacaucaugggcauccccuacugcaacuacagcaaguacugcuaccugaaccacaccaccaccggcaagaccagccugcccaagugcugccuggugagcaacggcagcuaccugaacgagacccacuucagcgacgacaucgagcagcaggccgacaacaugaucaccgagaugcugcagaaggaguacauggagagacagggcaagaccccccugggccugguggaccuguucguguucagcaccagcuucuaccugaucagcaucuuccugcaccuggugaagauccccacccacagacacguggugggcaagagcugccccaagccccacagacugaaccacaugggcaucugcagcugcggccuguacggccagcccggcgugcccgugaaguggaagagaugaggacuagucccuguucccagagcccacuuuuuuuucuuuuuuugaaauaaaauagccugucuuucagaucucaaaggcucuuuucagagccaccaaaaaaaaaaaaaaaaaaaaaaaaaaaaaaaaaaaaaaaaaaaaaaaaaaaaaaaaaaaaaaaaaaaaaaaaaaaaaaaaaaaaaaaaaaaaaaaaaaaaa

SEQ ID NO: 38976 - RNA, 1767 nt, Artificial Sequence
  mRNA product Design a-2 (hSL-A100) comprising derived and/or modified sequence from MOPV/LASV reassortant(IGS-1;Clade IV)__AFY05576__GPCmut11 (opt4)
aggagaguccgcucagccagguugcagaagcggcuuagcguguguccuaaucuucucucugcguguagguaggccugugccgcaaacaagcuuaccaugggccagaucgugaccuucuuccaggaggugccccacgugaucgaggaggugaugaacaucgugcugaucgcccugagcgugcuggccgugcugaagggccuguacaacuucgccaccugcggccuggugggccuggugaccuuccugcugcugugcggcagaagcugcaccaccagccuguacaagggcguguacgagcugcagacccuggagcugaacauggagacccugaacaugaccaugccccugagcugcaccaagaacaacagccaccacuacaucauggugggcaacgagaccggccuggagcugacccugaccaacaccagcaucaucaaccacaaguucugcaaccugagcgacgcccacaagaagaaccuguacgaccacgcccugaugagcaucaucagcaccuuccaccugagcauccccaacuucaaccaguacgaggccaugagcugcgacuucaacggcggcaagaucagcgugcaguacaaccugagccacagcuacgccggcgacgccgccaaccacugcggcaccguggccaacggcgugcugcagaccuucaugagaauggccuggggcggcagcuacaucgcccuggacagcggcagaggcaacugggacugcaucaugaccagcuaccaguaccugaucauccagaacaccaccugggaggaccacugccaguucagcagacccagccccaucggcuaccugggccugcugagccagagaaccagagacaucuacaucagcagaagacugcugggcaccuucaccuggacccugagcgacagcgagggcgaggacacccccggcggcuacugccugaccagauggaugcugaucgaggccgagcugaagugcuucggcaacaccgccguggccaagugcaacgagaagcacgacgaggaguucugcgacaugcugagacuguucgacuucaacaagcaggccauccagagacugaaggccgaggcccagaugagcauccagcugaucaacaaggccgugaacgcccugaucaacgaccagcugaucaugaagaaccaccugagagacaucaugggcauccccuacugcaacuacagcaaguacugcuaccugaaccacaccaccaccggcagaaccagccugcccaagugcugccuggugagcaacggcagcuaccugaacgagacccacuucagcgacgacaucgagcagcaggccgacaacaugaucaccgagaugcugcagaaggaguacauggagagacagggcaagaccccccugggccugguggaccuguucguguucagcaccagcuucuaccugaucagcaucuuccugcaccuggugaagauccccacccacagacacaucgugggcaagagcugccccaagccccacagacugaaccacaugggcaucugcagcugcggccuguacaagcagcccggcgugcccgugaaguggaagagaugaggacuagucccuguucccagagcccacuuuuuuuucuuuuuuugaaauaaaauagccugucuuucagaucucaaaggcucuuuucagagccaccaaaaaaaaaaaaaaaaaaaaaaaaaaaaaaaaaaaaaaaaaaaaaaaaaaaaaaaaaaaaaaaaaaaaaaaaaaaaaaaaaaaaaaaaaaaaaaaaaaaaa

SEQ ID NO: 38977 - RNA, 1767 nt, Artificial Sequence
  mRNA product Design a-2 (hSL-A100) comprising derived and/or modified sequence from LASV(LM765-SLE-2012;Clade IV)__AIT17814__GPCmut11 (opt4)
aggagaguccgcucagccagguugcagaagcggcuuagcguguguccuaaucuucucucugcguguagguaggccugugccgcaaacaagcuuaccaugggccagaucgugaccuucuuccaggaggugccccacgugaucgaggaggugaugaacaucgugcugaucgcccugagcauccuggccgugcugaagggccuguacaacuucgccaccugcggccuggugggccuggugaccuuccugcugcugugcggcagaagcugcaccaccagccuguacaagggcguguacgagcugcagacccuggagcugaacauggagacccugaacaugaccaugccccugagcugcaccaagaacaacagccaccacuacaucauggugggcaacgagaccggccuggagcugacccugaccaacaccagcaucaucgaccacaaguucugcaaccugagcgacgcccacagaaagaaccuguacgaccacgcccugaugagcaucaucagcaccuuccaccugagcauccccaacuucaaccaguacgaggccaugagcugcgacuucaacggcggcaagaucagcgugcaguacaaccugagccacagcuacgccaaggacgccgccgaccacugcggcaccguggccaacggcgugcugcagaccuucaugagaauggccuggggcggcagcuacaucgcccuggacagcggcagaggcagaugggacugcaucaugaccagcuaccaguaccugaucauccagaacaccaccugggaggaccacugccaguucagcagacccagccccaucggcuaccugggccugcugagccagagaaccagagacaucuacaucagcagaagacugcugggcaccuucaccuggacccugagcgacagcgagggcaaggacacccccggcggcuacugccugaccagauggaugcugaucgaggccgagcugaagugcuucggcaacaccgccguggccaagugcaacgagaagcacgacgaggaguucugcgacaugcugagacuguucgacuucaacaagcaggccauccagagacugaaggccgaggcccagaugagcauccagcugaucaacaaggccgugaacgcccugaucaacgaccagcugaucaugaagaaccaccugagagacaucaugggcauccccuacugcaacuacagcaaguacugcuaccugaaccacaccaccaccggcaagaccagccugcccaagugcugccuggugagcaacggcagcuaccugaacgagacccacuucagcgacgacaucgagcagcaggccgacaacaugaucaccgagaugcugcagaaggaguacauggagagacagggcaagaccccccugggccugguggaccuguucguguucagcaccagcuucuaccugaucagcaucuuccugcaccuggugaagauccccacccacagacacaucgugggcaagcccugccccaagccccacagacugaaccacaugggcaucugcagcugcggccuguacaagcagcccggcgugcccgugaaguggaagagaugaggacuagucccuguucccagagcccacuuuuuuuucuuuuuuugaaauaaaauagccugucuuucagaucucaaaggcucuuuucagagccaccaaaaaaaaaaaaaaaaaaaaaaaaaaaaaaaaaaaaaaaaaaaaaaaaaaaaaaaaaaaaaaaaaaaaaaaaaaaaaaaaaaaaaaaaaaaaaaaaaaaaa

SEQ ID NO: 38978 - RNA, 1767 nt, Artificial Sequence
  mRNA product Design a-2 (hSL-A100) comprising derived and/or modified sequence from LASV(LM776-SLE-2012;Clade IV)__AIT17824__GPCmut11 (opt4)
aggagaguccgcucagccagguugcagaagcggcuuagcguguguccuaaucuucucucugcguguagguaggccugugccgcaaacaagcuuaccaugggccagaucgugaccuucuuccaggaggugccccacgugaucgaggaggugaugaacaucgugcugaucgcccugagcauccuggccgugcugaagggccuguacaacuucgccaccugcggccuggugggccuggugaccuuccugcugcugugcggcagaagcugcaccaccagcguguacaagggcguguacgagcugcagacccuggagcugaacauggagacccugaacaugaccaugccccugagcugcaccaagaacaacagccaccacuacaucauggugggcaacgagaccggccuggagcugacccugaccaacaccagcaucaucaaccacaaguucugcaaccugagcgacgcccacaagaagaaccuguacgaccacgcccugaugagcaucaucagcaccuuccaccugagcauccccaacuucaaccaguacgaggccaugagcugcgacuucaacggcggcaagaucagcgugcaguacaaccugagccacagcuacgccggcgacgccgccaaccacugcggcaccguggccaacggcgugcugcagaccuucaugagaauggccuggggcggcagcuacaucgcccuggacagcggccacggcaagugggacugcaucaugaccagcuaccaguaccugaucauccagaacaccaccugggaggaccacugccaguucagcagacccagccccaucggcuaccugggccugcugagccagagaaccagagacaucuacaucagcagaagacugcugggcaccuucaccuggacccugagcgacagcgagggcaaggacacccccggcggcuacugccugaccagauggaugcugaucgaggccgagcugaagugcuucggcaacaccgccguggccaagugcaacgagaagcacgacgaggaguucugcgacaugcugagacuguucgacuucaacaagcaggccauccagagacugaaggccgaggcccagaugagcauccagcugaucaacaaggccgugaacgcccugaucaacgaccagcugaucaugaagaaccaccugagagacaucaugggcauccccuacugcaacuacagcaaguacugcuaccugaaccacaccaccaccggcaagaccagccugcccaagugcugccuggugagcaacggcagcuaccugaacgagacccacuucagcgacgacaucgagcagcaggccgacaacaugaucaccgagaugcugcagaaggaguacauggagagacagggcaagaccccccugggccugguggaccuguucguguucagcaccagcuucuaccugaucagcaucuuccugcaccuggugaagauccccacccacagacacaucgugggcaagagcugccccaagccccacagacugaaccacaugggcaucugcagcugcggccuguacaagcagcccggcgugcccgugagauggaagagaugaggacuagucccuguucccagagcccacuuuuuuuucuuuuuuugaaauaaaauagccugucuuucagaucucaaaggcucuuuucagagccaccaaaaaaaaaaaaaaaaaaaaaaaaaaaaaaaaaaaaaaaaaaaaaaaaaaaaaaaaaaaaaaaaaaaaaaaaaaaaaaaaaaaaaaaaaaaaaaaaaaaaa

SEQ ID NO: 38979 - RNA, 1767 nt, Artificial Sequence
  mRNA product Design a-2 (hSL-A100) comprising derived and/or modified sequence from LASV(Mad39;Clade IV)__ANH09722__GPCmut11 (opt4)
aggagaguccgcucagccagguugcagaagcggcuuagcguguguccuaaucuucucucugcguguagguaggccugugccgcaaacaagcuuaccaugggccagaucgugaccuucuuccaggaggugccccacgugaucgaggaggugaugaacaucgugcugaucgcccugagcauccuggccgugcugaagggccuguacaacguggccaccugcggccugaucggccuggugaccuuccugcugcugugcggcagaagcugcaccaccacccuguacaagggcguguacgagcugcaggcccuggagcugaacauggagacccugaacaugaccaugccccugagcugcaccaagaacaacagccaccacuacaucagagugggcaacgagaccggccuggagcugacccugaccaacaccagccugaucaaccacaaguucugcaaccugagcgacgcccacaagaagaaccuguacgaccacgcccugaugagcaucaucagcaccuuccaccugagcauccccaacuucaaccaguacgaggccaugagcugcgacuucaacgacggcaagaucagcgugcaguacaaccugagccacaccuacgccggcgacaccgccaaccacugcggcaccguggccaacggcgugcugcagaccuucaugagaauggccuggggcggcagcuacaucgcccuggacagcggcagaggcggcugggacugcaucaugaccagcuaccaguaccugaucauccagaacaccaccugggaggaccacugccaguucagcagacccagccccaucggcuaccugggccugcugagccagagaaccagagacaucuacaucagcagaagacugcugggcaccuucaccuggacccugagcgacagcgagggcaaggacacccccggcggcuacugccugaccagauggaugcugaucgaggccgagcugaagugcuucggcaacaccgccguggccaagugcaacgagaagcacgacgaggaguucugcgacaugcugagacuguucgacuucaacaagcaggccauccagagacugaaggccgaggcccagaugagcauccagcugaucaacaaggccgugaacgcccugaucaacgaccagcugaucaugaagaaccaccugagagacaucaugggcauccccuacugcaacuacagcaaguacugcuaccugaaccacaccgugaccggcaagaccagccugcccaagugcugccuggugagcaacggcagcuaccugaacgagacccacuucagcgacgacaucgagcagcaggccgacaacaugaucaccgagaugcugcagaaggaguacauggagagacagggcaagaccccccugggccugguggaccuguucguguucagcaccagcuucuaccugaucagcaucuuccugcaccuggugaagauccccacccacagacacguggugggcaagcccugccccaagccccacagacugaaccacaugggcaucugcagcugcggcuucuacaagcagcccggcgugcccgugagauggaagagaugaggacuagucccuguucccagagcccacuuuuuuuucuuuuuuugaaauaaaauagccugucuuucagaucucaaaggcucuuuucagagccaccaaaaaaaaaaaaaaaaaaaaaaaaaaaaaaaaaaaaaaaaaaaaaaaaaaaaaaaaaaaaaaaaaaaaaaaaaaaaaaaaaaaaaaaaaaaaaaaaaaaaa

SEQ ID NO: 38980 - RNA, 1767 nt, Artificial Sequence
  mRNA product Design a-2 (hSL-A100) comprising derived and/or modified sequence from LASV(Z0947-SLE-2011;Clade IV)__AIT17840__GPCmut11 (opt4)
aggagaguccgcucagccagguugcagaagcggcuuagcguguguccuaaucuucucucugcguguagguaggccugugccgcaaacaagcuuaccaugggccagaucgugaccuucuuccaggaggugccccacgugaucgaggaggugaugaacaucgugcugaucgcccugagcauccuggccgugcugaagggccuguacaacuucgccaccugcggccuggugggccuggugaccuuccugcugcugugcggcagaagcugcaccaucagccuguacaagggcguguacgagcugcagacccuggagcugaacauggagacccugaacaugaccaugccccugagcugcaccaagaacaacagccaccacuacaucauggugggcaacgagaccggccuggagcugacccugaccaacaccagcaucaucaaccacaaguucugcaaccugagcgacgcccacaagaagaaccuguacgaccacgcccugaugagcaucaucagcaccuuccaccugagcauccccaacuucaaccaguacgaggccaugagcugcgacuucaacggcggcaagaucagcgugcaguacaaccugagccacagcuacgccggcgacgccgccaaccacugcggcaccguggccaacggcgugcugcagaccuucaugagaauggccuggggcggcagcuacaucgcccuggacagcggcagagacagaugggacugcaucaugaccagcuaccaguaccugaucauccagaacaccaccugggaggaccacugccaguucagcagacccagccccaucggcuaccugggccugcugagccagagaaccagagacaucuacaucagcagaagacugcugggcaccuucaccuggacccugagcgacagcgagggcaaggacacccccggcggcuacugccugaccagauggaugcugaucgaggccgagcugaagugcuucggcaacaccgccguggccaagugcaacgagaagcacgacgaggaguucugcgacaugcugagacuguucgacuucaacaagcaggccauccagagacugaaggccgaggcccagaugagcauccagcugaucaacaaggccgugaacgcccugaucaacgaccagcugaucaugaagaaccaccugagagacaucaugggcauccccuacugcaacuacagcaaguacugcuaccugaaccacaccaccaccggcaagaccagccugcccaagugcugccuggugagcaacggcagcuaccugaacgagacccacuucagcgacgacaucgagcagcaggccgacaacaugaucaccgagaugcugcagaaggaguacauggagagacagggcaagaccccccugggccugguggaccuguucguguucagcaccagcuucuaccugaucagcaucuuccugcaccuggugaagauccccacccacagacacaucgugggcaagcccugccccaagccccacagacugaaccacaugggcaucugcagcugcggccuguacaagcagcccggcgugcccgugaaguggaagagaugaggacuagucccuguucccagagcccacuuuuuuuucuuuuuuugaaauaaaauagccugucuuucagaucucaaaggcucuuuucagagccaccaaaaaaaaaaaaaaaaaaaaaaaaaaaaaaaaaaaaaaaaaaaaaaaaaaaaaaaaaaaaaaaaaaaaaaaaaaaaaaaaaaaaaaaaaaaaaaaaaaaaa

SEQ ID NO: 38981 - RNA, 1767 nt, Artificial Sequence
  mRNA product Design a-2 (hSL-A100) comprising derived and/or modified sequence from LASV(Josiah;Clade IV)__NP_694870__GPCmut11 (opt5)
aggagaguccgcucagccagguugcagaagcggcuuagcguguguccuaaucuucucucugcguguagguaggccugugccgcaaacaagcuuaccaugggccagaucgugaccuucuuucaagaggucccccacguuauugaagaggugaugaacaucgugcugauugcccucagcguccuggcugugcuuaaggggcuguacaauuucgccacaugcggacucguuggccuggugacguuucuucugcucugugggagauccugcaccacaucucuguauaaaggagucuacgaacugcagacccucgagcugaacauggaaacacuuaauaugaccaugccucugagcuguacaaagaacaauucccaucacuauaucauggugggcaacgagaccgggcucgagcugacgcuuaccaauacaucuauuaucaaccauaaauucugcaaucugagcgacgcgcacaagaaaaaccucuacgaucaugcucugauguccaucauuucuaccuuucaccugagcaucccgaauuucaaccaguaugaagccauguccugugacuuuaauggaggcaagauuagcguucaguacaaccucucucacuccuaugccggcgaugcugccaaucauugcgggacaguggcuaacggaguccugcaaaccuucaugcggauggccuggggcgggagcuacaucgcgcuugacucuggacgcggcaacugggauuguauuaugacguccuaccaguaucugaucauucagaauacaaccugggaggaccacugccaguuuagcagacccucuccuaucggguaccucggacugcuuucccaacggacacgcgauaucuauauuagcagacggcugcucggcaccuucaccuggacacuguccgacucugaaggcaaggauacgcccgggggauacugucugacccgcuggaugcucaucgaggccgagcugaaaugcuuuggcaacacagcuguggccaaguguaaugaaaaacaugacgaggaguucugcgauaugcuuagacuguuugacuucaacaagcaggcuauucagcggcucaaagccgaagcgcagaugagcauccaacugauuaauaaggccgugaacgcucuuaucaaugaucagcugaucaugaagaaccaccuccgcgacauuauggggaucccuuauugcaauuacuccaaauauuguuaccugaaccacaccacaaccggaagaacgagccugcccaagugcugucucgucucuaauggcuccuaccugaacgaaacacauuucagcgacgauauugagcagcaagccgacaauaugaucaccgagaugcuucagaaagaauauauggagcggcaggggaagaccccucugggacucguugaucuguuuguguucucuaccagcuuuuaccugauuuccaucuuccuucaccucgugaaaaucccgacacaucgccacauugucggcaagucuugccccaaaccucauagacugaaccacaugggcaucuguagcugcgggcuguauaagcagcccggagugccuguuaaguggaaacggugaggacuagucccuguucccagagcccacuuuuuuuucuuuuuuugaaauaaaauagccugucuuucagaucucaaaggcucuuuucagagccaccaaaaaaaaaaaaaaaaaaaaaaaaaaaaaaaaaaaaaaaaaaaaaaaaaaaaaaaaaaaaaaaaaaaaaaaaaaaaaaaaaaaaaaaaaaaaaaaaaaaaa

SEQ ID NO: 38982 - RNA, 1764 nt, Artificial Sequence
  mRNA product Design a-2 (hSL-A100) comprising derived and/or modified sequence from LASV(LP;Clade I)__AAF86701__GPCmut11 (opt5)
aggagaguccgcucagccagguugcagaagcggcuuagcguguguccuaaucuucucucugcguguagguaggccugugccgcaaacaagcuuaccaugggccagaucauuaccuucuuucaagaggugccccacgucaucgaagagguuaugaacauugugcugaucgcccucagccugcuugcuauucugaaggggcucuacaauaucgccacaugcggaaucauuggccugguggcguuccuuuuucugugugggaaauccugcucucucacgcugaagggaggcuaugaacugcagacccucgagcugaacauggaaacacuuaauaugaccaugccucugagcuguaccaaaaacuccucucaucacuacaucagagucgggaaugagacaggacucgagcugacacuuaccaacacgagcauuaucaaucauaaguucugcaaccuguccgacgcucacaaaaagaaucucuaugaucaugcccugaugucuauuaucagcaccuuucaccuguccauuccgaacuucaaucaguacgaagccaugagcugugacuuuaacggcggcaagaucucugugcaguauaaucucucccacagcuacgcuggggaugccgcugagcauugcggaacaguugccaacggcgugcugcaaaccuucaugcggauggcguggggagggcgcuauaucgcccuugacucuggcaaagggaauugggauuguauuaugacauccuaccaguaccugaucauucagaacaccacgugggaagaccacugccaguuuagcagacccucuccuaucggauaucucggccugcuuucccaacggacacgcgauauuuacaucagcagacggcugcucggcaccuucacauggacccuguccgacucugaggggaacgagacccccggaggcuauugucugacacgcuggaugcucaucgaagcugagcugaagugcuuugggaauacggccgucgcuaaauguaacgaaaagcaugaugaggaguucugcgacaugcuuagacuguuugauuucaauaaacaggccauucggcgccucaaggcggaagcccagaugagcauccagcugauuaacaaggcugugaaugcccuuaucaacgaccaacugauuaugaaaaaucaccucagagauaucaugggaaucccuuacugcaacuauuccaaguacuguuaucugaaucacaccagcucuggccggacaucccugcccaaaugcugucucauuagcaacgggucuuaccugaaugagacccaguucagcgacgacaucgaacagcaagcugauaacaugauuacagagaugcuucagaaggaauacaucgagcgccagggaaaaaccccucugggccucguugacauuuuuaucuucuccacgucuuuuuaucugauuagcaucuuccugcaucuuaucaagauuccgacacacagacauaucgugggcaaacccugcccuaagccccaccggcucaaucauaugggggucuguuccugcggacuguacaagcacccuggcgugcccaccaaauggaagcgcugaggacuagucccuguucccagagcccacuuuuuuuucuuuuuuugaaauaaaauagccugucuuucagaucucaaaggcucuuuucagagccaccaaaaaaaaaaaaaaaaaaaaaaaaaaaaaaaaaaaaaaaaaaaaaaaaaaaaaaaaaaaaaaaaaaaaaaaaaaaaaaaaaaaaaaaaaaaaaaaaaaaaa

SEQ ID NO: 38983 - RNA, 1764 nt, Artificial Sequence
  mRNA product Design a-2 (hSL-A100) comprising derived and/or modified sequence from LASV(803213;Clade II)__AAF86703__GPCmut11 (opt5)
aggagaguccgcucagccagguugcagaagcggcuuagcguguguccuaaucuucucucugcguguagguaggccugugccgcaaacaagcuuaccaugggccagaucauuaccuucuuucaagaggugccccacgucaucgaagagguuaugaacauugugcugaucgcccucagccugcuugcuauucugaaggggaucuacaauguggccacaugcggacucuucggccugaucuccuuucuucugcucugugggagaucuugcagcgucacguauaaaggaguguacgaacugcagacccuggagcucaacauggcgaaucugaacaugacaaugccucuuuccuguaccaagaauaacucucaucacuauauuaugguuggcaaugaaacagggcuggagcucacccugacaaacaccagcaucauuaaucauaaauucugcaaccuuuccgacgcucacaagaaaaaucuguacgaucaugcccucaugucuaucauuagcacguuucaccuguccaucccgaacuucaaucaguaugaggccaugagcugugacuuuaacggaggcaagauuucugugcaguacaaucugucccacagcuucgcugucgaugccgcuaaccauugcggcaccaucgccaacggggugcuccaaacauuuaugcggauggcguggggaggcucuuauaucgcccuggacuccgggaagggaaauugggauuguauuaugaccagcuaccaguaccuuaucauucagaacacaaccugggaagaccacugccaguucucucgccccuccccuaucggcuaucuggggcuccugagccaaagaacgcgggauauuuacaucucccgcagacuucugggaacauuuaccuggacacucucugacagcgagggcaaugaagcucccggcggguauugucugacccgguggaugcugaucgaggccgagcucaaaugcuucggaaacaccgcuguugccaaguguaaugaaaaacaugaugaggaauuuugcgacaugcugcgccuuuucgauuucaacaagcaggcgauuaaaagacugaagacagaggcccagauguccauccagcucauuaauaaggcugugaacgcccugaucaaugaccaacuuauuaugaaaaaccaucugcgggauaucaugggcaucccuuacugcaauuauagccgcuacuguuaucucaaccacacggucaccgggaagacaucucugcccagaugcugucugguguccaauggaagcuaccucaacgaaacccacuuuucugacgacauugagcagcaggcugauaauaugaucacagagaugcugcaaaaagaauacauggaccggcagggcaagaccccucuugggcugguggaucucuucgucuuuagcacguccuucuaucugauuucuaucuuucugcaccuuguuaaaauuccgacacaucgccacaucgugggaaagcccugcccuaaaccccauagacucaaccacaugggcauuuguagcugcggccuguacaagcacccuggggugcccgucaaguggaaacggugaggacuagucccuguucccagagcccacuuuuuuuucuuuuuuugaaauaaaauagccugucuuucagaucucaaaggcucuuuucagagccaccaaaaaaaaaaaaaaaaaaaaaaaaaaaaaaaaaaaaaaaaaaaaaaaaaaaaaaaaaaaaaaaaaaaaaaaaaaaaaaaaaaaaaaaaaaaaaaaaaaaaa

SEQ ID NO: 38984 - RNA, 1764 nt, Artificial Sequence
  mRNA product Design a-2 (hSL-A100) comprising derived and/or modified sequence from LASV(GA391;Clade III)__CAA36645__GPCmut11 (opt5)
aggagaguccgcucagccagguugcagaagcggcuuagcguguguccuaaucuucucucugcguguagguaggccugugccgcaaacaagcuuaccaugggccagaucgugaccuucuuucaagaggucccccacguuauugaagaggugaugaacaucgugcugauugcccucagcauccuggcuauucuuaaggggcuguacaaugucgccacaugcggacucaucggccuggugacguuccuucugcucuccgggagaucuuguagccugaucuauaaaggaaccuacgaacugcagacacucgagcugaacauggaaacccuuaauaugacaaugccucuguccugcaccaagaacaauucucaucacuauauucggguuggcaacgagacagggcucgagcugacccuuacgaauaccagcauccugaaccauaaauuuuguaaucucuccgacgcgcacaagcgcaaccuguacgaucauucucugaugagcauuaucuccacauuccaccucagcauuccgaauuuuaaccaguaugaagcuaugucuugcgacuucaauggaggcaaaaucaccgugcaguacaaccugucccacagcuuugccgucgaugccgcuggccauugugggacacuugccaauggagugcugcaaaccuucaugagaauggcuuggggcgggucuuauauugcccucgacuccggacggggcaacugggauugcaucaugacgagcuaccaguaccugaucauucagaacacaaccugggacgaucacugucaguuuucucgccccuccccuaucggguaucuuggacugcucagccaaagaacacgggacauuuacaucucccgcagacugcugggcaccuucaccuggacacucucugauagcgagggcaaugaaacgcccgggggauauugccugacccgguggaugcuuauugaggcggagcugaaguguuuuggcaacacagccguugcuaagugcaaugaaaaacaugacgaggaguucugugauaugcuccgccuguuugacuucaacaagcaggccaucagacggcuuaaaaccgaagcucagauguccauccagcugauuaauaaggccgugaacgcgcucaucaaugaucaacugauuaugaaaaaccaucugcgcgacaucauggggauuccuuacugcaauuauagcagauacugcuaucucaaccacacaucuaccggaaagacgucccugccccgguguugccuuaucagcaauggcucuuaccugaacgaaacaaaguucagcgacgauaucgagcagcaggccgacaauaugauuaccgagaugcuccaaaaagaauacaucgaucgccaggggaagaccccucugggacuggucgaccuuuuuguguucuccacaucuuuuuaucucauuagcaucuuccugcaccuggugaaaauuccgacccacagacauaucgucggcaagcccuguccuaaaccccaccggcucaaccauaugggcauuugcuccugugggcuguacaagcagccuggaguucccgugagauggaaacgcugaggacuagucccuguucccagagcccacuuuuuuuucuuuuuuugaaauaaaauagccugucuuucagaucucaaaggcucuuuucagagccaccaaaaaaaaaaaaaaaaaaaaaaaaaaaaaaaaaaaaaaaaaaaaaaaaaaaaaaaaaaaaaaaaaaaaaaaaaaaaaaaaaaaaaaaaaaaaaaaaaaaaa

SEQ ID NO: 38985 - RNA, 1767 nt, Artificial Sequence
  mRNA product Design a-2 (hSL-A100) comprising derived and/or modified sequence from LASV(AV;Clade V)__CCA30314__GPCmut11 (opt5)
aggagaguccgcucagccagguugcagaagcggcuuagcguguguccuaaucuucucucugcguguagguaggccugugccgcaaacaagcuuaccaugggccagaucgugaccuucuuucaagaggucccccacguuauugaagaggugaugaacaucgugcugauugcccucagcauccuggcuguccuuaaggggcuguacaauauugccacaugcggacucaucggccugaucacguuccuucugcucugugggagauccugcucuagcaaccuguauaaaggaguguacgaacugcagucccucgaccugaauauggagacccuuaacaugacaaugccucugucuuguaccaagaauaacagccaucacuauauucggguuggcaaugauacagggcucgaacugacccuuacaaacaccuccauccugaaucauaaauuuugcaaccucucugacgcgcacaagaaagaucuguacgaccaugcucugaugagcauuaucuccacguuccaccucagcauuccgaauuuuaaccaguaugaggccaugucuugugauuucaauggaggcaagaucuccgugcaguacaaccugagccacucuuaugccauugacgcugccaaucauugcggcaccgucgcuaacgggauccuucaaacauuuaugcgcauggccuggggaggcuccuacaucgcgcuggauagcgggagaggaaacugggacuguauuaugaccucuuaccaguaucucaucauucagaauacaaccugggagaaccacugccaguucucccggcccagcccuaucggcuaccuggggcuucugucccaacgcacgagagauauuuauaucucucggcgccuccugggaacauuuaccuggacacugagcgacuccgaaggcaaugccacccccggcggguacugucucaccagauggaugcugaucgaggcugaacuuaagugcuucggaaacacagccguggcuaaauguaaugagaagcaugaugaggaauuuugcgacaugcugcgccucuucgauuuuaacaaacaggccauuagccggcugaagucugaggcgcagauguccauccagcuuauuaauaaagccguuaacgcucugaucaaugaccaacucauuaugaagaaccaccugagagacaucaugggcaucccuuauugcaauuacagcaaguauuguuaccugaaccacacgauuaccgggaaaacaucucuccccaagugcugucuggugagcaauggauccuaccuuaacgaaacccauuucucugaugacaucgagcagcaggccgauaauaugauuacagaaaugcugcaaaaagaguauauggagcggcagggcaagaccccucucgggcuggucgaccuguucguguuuagcacguccuucuaccuuaucagcauuuuucuccgccuggugaaaaucccgacacacagacauauugucggaaagcccugcccuaaaccccaccggcugaaccauaugggcaucuguucuugcggccucuauaagcagccugggguucccgugcgcuggaagagaugaggacuagucccuguucccagagcccacuuuuuuuucuuuuuuugaaauaaaauagccugucuuucagaucucaaaggcucuuuucagagccaccaaaaaaaaaaaaaaaaaaaaaaaaaaaaaaaaaaaaaaaaaaaaaaaaaaaaaaaaaaaaaaaaaaaaaaaaaaaaaaaaaaaaaaaaaaaaaaaaaaaaa

SEQ ID NO: 38986 - RNA, 1764 nt, Artificial Sequence
  mRNA product Design a-2 (hSL-A100) comprising derived and/or modified sequence from LASV(Togo/2016/7082;Clade VI)__AMR44577__GPCmut11 (opt5)
aggagaguccgcucagccagguugcagaagcggcuuagcguguguccuaaucuucucucugcguguagguaggccugugccgcaaacaagcuuaccaugggccagaucauuaccuucuuucaagaggugccccacgucaucgaagagguuaugaacauugugcugaucgcccucagccugcuugcuauucugaaggggguguacaaugucgccacaugcggaaucaucggccucgugacguuccuguuucuuugugggagauccugcucucugauuuauaaaggaagcuacgaacuccagacccuggagcugaacauggaaacacucaauaugaccaugccucuguccuguacaaagaacucuagccaucacuauauccggguuggcaaugagaccgggcuugagcugacacucaccaacacguccauuaucaaucauaaauucugcaaccugucugacgcgcacaagcgcaaucuuuacgaucaugcucugaugagcauucucuccaccuuucaccugagcaucccgaacuucaaucaguaugaagccaugucuugugacuuuaacggaggcaaaauuuccgugcaguacaaucugagccacgccuaugcugucgaugccgcugagcauugcggcacaguggccaacgggguucuccaaaccuucaugagaauggcguggggaggcucuuacaucgcccuggacuccgggcggggaaauugggauuguaucaugacaagcuaccaguaucuuauuauccagaacaccacgugggaagaccacugccaguuuucucgccccuccccuauuggcuaccuggggcuccugagccaaagaacacgggauaucuauauuucccgcagacuucugggaaccuucacauggacccucucugacagcgagggcaacgagacccccggcggguacugucugacacgguggaugcugaucgaagcugagcucaagugcuuuggaaauacggccguggcuaaguguaacgaaaaacaugaugaggaguucugcgacaugcugcgccuuuuugauuucaauaagcaggccauccagagacugaaauccgaagcgcagaugagcauucaacucaucaacaaggccgucaaugcucugauuaacgaccagcuuaucaugaaaaaucaucugcgggauaugaugggcauuccuuauugcaacuacucuaaguauuguuaccucaaucacaccuccagcgggcgcacaucucugcccaagugcugucuggugagcaacggauccuaccucaaugagacccacuucucugacgacaucgaacagcaagccgauaacaugaucacagagaugcugcagaaagaauauauugacagacagggcaagaccccucuugggcugguggaucucuuugucuucagcacguccuuuuaccugaucagcauuuuccugcaccuuaucaaaauuccgacacaucggcacaucguuggaaagcccugcccuaaaccccaucgccucaaucacaugggcauuuguucuugcggccuguauaagcagccuggggugcccaccagauggaaacggugaggacuagucccuguucccagagcccacuuuuuuuucuuuuuuugaaauaaaauagccugucuuucagaucucaaaggcucuuuucagagccaccaaaaaaaaaaaaaaaaaaaaaaaaaaaaaaaaaaaaaaaaaaaaaaaaaaaaaaaaaaaaaaaaaaaaaaaaaaaaaaaaaaaaaaaaaaaaaaaaaaaaa

SEQ ID NO: 38987 - RNA, 1764 nt, Artificial Sequence
  mRNA product Design a-2 (hSL-A100) comprising derived and/or modified sequence from LASV(KAK-428;Clade n.d. (VII))__ANH09740__GPCmut11 (opt5)
aggagaguccgcucagccagguugcagaagcggcuuagcguguguccuaaucuucucucugcguguagguaggccugugccgcaaacaagcuuaccaugggccagaucgugaccuucuuucaagaggucccccacguuauugaagaggugaugaacaucgugcugauugcccucagccugcuugcuauccugaaggggcucuacaauuucgccacaugcggagucauuggccugaucacguuucuucugcucugugggagauccugcucugcgaccuauaaaggacaguacgaacugcagacacuggagcucaacauggaaagccugaauaugaccaugccucuuuccuguacaaagaacaauucucaucacuauauccgggcuggcaacaauaccgggcuggagcucacacugaccaacacgagcauuaucucccauaaauucugcaaucuuucugacgcccacaagaaaaaccuguacgaucauacccucaugagcauuaucacaaccuuucaccuguccauuccgaauuucaaccaguaugaggccaugagcugugacuuuaauggaggcaagaucucuauucaauacaaccugucccacagcuaugcuggcgaugccgcucagcauugcgggacaguggccaauggaguucuccagaccuucaugcgcauggcguggggcgggucuuaccuggcccuugacuccggaagacggggcugggauuguaucaucagcucuuaccaguaucugauuauccaaaacacgacaugggacgaucacugccaguuuucccgccccagcccuauuggguaccucggauucgugucccagaagaccagagacaucuauauuucucggcgccugcuuggcacauuuaccuggacccugagcgauuccgaaggccaugacaugcccgggggauacugucucacaagauggaugcugaucgaggcugaucugaaaugcuucggcaacacggccgucgcuaaguguaaugaaaaacacgacgaggaguuuugcgauauguggcgccucuucgacuucaacaagcaggccauccaacggcugaaagcggaagcccagaugaauauucagcuuaucaacaaggcugugaaugcccugauuaacgaccaacucaugaugaagaaucaccugagagauaucauggggauuccuuauugcaacuacagcaaauuuuguuaucuuaauaacaccacaaccggacggacaucucugccccgcugcugucucaucuccaauggcagcuaccugaacgagacccauuucucugacgauaucgaacagcaggcugacaauaugauuacggagaugcugcagaaggaauacauggauagacaagggaaaacaccucucggacugguugaccuuuuuguguucagcaccuccuuuuaucugaucaccauuuuccuccaccuggucaagaucccgacacaucggcacauugugggcaaacccugcccuaagccccaucgccugaaccacaugggcaucuguucuugcgggcuuuacaaacagccuggagugcccgucagauggaagcggugaggacuagucccuguucccagagcccacuuuuuuuucuuuuuuugaaauaaaauagccugucuuucagaucucaaaggcucuuuucagagccaccaaaaaaaaaaaaaaaaaaaaaaaaaaaaaaaaaaaaaaaaaaaaaaaaaaaaaaaaaaaaaaaaaaaaaaaaaaaaaaaaaaaaaaaaaaaaaaaaaaaaa

SEQ ID NO: 38988 - RNA, 1764 nt, Artificial Sequence; identical to SEQ ID NO: 38982
  mRNA product Design a-2 (hSL-A100) comprising derived and/or modified sequence from LASV(Pinneo-NIG-1969;Clade I)__AIT17836__GPCmut11 (opt5)

SEQ ID NO: 38989 - RNA, 1764 nt, Artificial Sequence
  mRNA product Design a-2 (hSL-A100) comprising derived and/or modified sequence from LASV(ISTH0009-NIG-2011;Clade II)__AIT17404__GPCmut11 (opt5)
aggagaguccgcucagccagguugcagaagcggcuuagcguguguccuaaucuucucucugcguguagguaggccugugccgcaaacaagcuuaccaugggccagaucauuaccuucuuucaagaggugccccacgucaucgaagagguuaugaacauugugcugaucgcccucagccugcuugcuauucugaaggggaucuacaauguggccacaugcggacucuucggccuggucuccuuucuucugcucugugggagaucuugcagcacgaccuauaaaggaguguacgaacugcagacacuggagcucgacauggcgucccugaacaugaccaugccucuuucuuguacaaagaauaacagccaucacuauaucaugguuggcaaugaaaccgggcuggagcucacacugaccaacacguccauuaucaaucauaaauucugcaaccuuucugaugcucacaagaaaaaucuguacgaccaugcccucaugagcauuaucuccaccuuucaccugagcauuccgaacuucaaucaguaugaggccaugucuugugauuuuaacggaggcaagaucuccgugcaguacaaucugagccacgcuuaugccgucgacgcugccaaccauugcggcacaauugcgaauggggugcuccaaaccuucaugcggauggccuggggaggcucuuacaucgcucuggauuccgggaagggaagcugggacuguaucaugacaucuuaccaguaucuuauuauccagaacaccacgugggaagaucacugccaguuuucccgccccagcccuauuggcuaccuggggcuccugucccaaagaacacgggacaucuauauuucucgcagacuucugggaaccuucacauggacccucagcgauuccgagggcaacgaaacccccggcggguacugucugacacgguggaugcugaucgaggccgagcucaaaugcuuuggaaauacggcuguugccaaguguaacgaaaaacaugacgaggaguucugcgauaugcugcgccuuuuugacuucaauaagcaggcgaucagacggcugaaaaccgaagcccagaugagcauucagcucaucaacaaggcugugaaugcccugauuaacgaucaacuuaucaugaagaaucaucugcgcgacauuaugggcaucccuuauugcaacuacucuaaauauuguuaccucaaucacacagucaccgggaagacaucccugcccagaugcugucuggugagcaacggaucuuaccucaaugaaacccacuucagcgacgauaucgagcagcaggcugacaacaugauuacggagcugcuucaaaaagaauauauggaucggcagggcaagacaccucuggggcucguggaccuguuugucuucuccaccucuuuuuaccugaucagcauuuuccuucaccucaucaaaauuccgacccaucgccacaucacaggaaagcccugcccuaaaccccauagacugaaucacaugggcauuuguuccugcggccuguauaagcacccugggguucccgugaaguggaaacggugaggacuagucccuguucccagagcccacuuuuuuuucuuuuuuugaaauaaaauagccugucuuucagaucucaaaggcucuuuucagagccaccaaaaaaaaaaaaaaaaaaaaaaaaaaaaaaaaaaaaaaaaaaaaaaaaaaaaaaaaaaaaaaaaaaaaaaaaaaaaaaaaaaaaaaaaaaaaaaaaaaaaa

SEQ ID NO: 38990 - RNA, 1764 nt, Artificial Sequence
  mRNA product Design a-2 (hSL-A100) comprising derived and/or modified sequence from LASV(ISTH2010-NIG-2012;Clade II)__AIT17482__GPCmut11 (opt5)
aggagaguccgcucagccagguugcagaagcggcuuagcguguguccuaaucuucucucugcguguagguaggccugugccgcaaacaagcuuaccaugggccagaucauuaccuucuuucaagaggugccccacgucaucgaagagguuaugaacauugugcugaucgcccucagccugcuugcuauucugaaggggaucuacaauguggccacaugcggacucuucggccuggucuccuuucuucugcucugugggagaucuugcagcacgaccuauaaaggaguguacgaacugcagacacuggagcucgacauggcgucccugaacaugaccaugccucuuucuuguacaaagaauaacagccaucacuauaucaugguuggcaaugaaaccgggcuggagcucacacugaccaacacguccauuaucaaucauaaauucugcaaccuuucugaugcucacaagaaaaaucuguacgaccaugcccucaugagcauuaucuccaccuuucaccugagcauuccgaacuucaaucaguaugaggccaugucuugugauuuuaacggaggcaagaucuccgugcaguacaaucugagccacgcuuaugccgucgacgcugccaaccauugcggcacaauugcgaauggggugcuccaaaccuucaugcggauggccuggggaggcucuuacaucgcucuggauuccgggaagggaagcugggacuguaucaugacaucuuaccaguaucuuauuauccagaacauuaccugggaagaucacugccaguuuucccgccccagcccuaucggcuaccuggggcuccugucccaaagaacgcgggacauuuauaucucucgcagacuucugggaacauucaccuggacacucagcgauuccgagggcaacgaaacccccggcggguacugucugacccgguggaugcugaucgaggccgagcucaaaugcuuuggaaauacagcuguugccaaguguaacgaaaaacaugacgaggaguucugcgauaugcugcgccuuuuugacuucaauaagcaggcgauuagacggcugaaaacggaagcccagaugagcauccagcucauuaacaaggcugugaaugcccugaucaacgaucaacuuauuaugaagaaucaucugcgcgacaucaugggcaucccuuauugcaacuacucuaaauauuguuaccucaaucacaccgucacagggaagaccucccugcccagaugcugucuggugagcaacggaucuuaccucaaugaaacacacuucagcgacgauauugagcagcaggcugacaacaugaucaccgagcugcuucaaaaagaauauauugaucggcagggcaagacgccucuggggcucguggaccuguuugucuucuccacaucuuuuuaccugaucagcauuuuccuucaccucguuaaaaucccgacccaucgccacguggugggaaagcccugcccuaaaccccauagacugaaucacaugggcauuuguuccugcggccuguauaagcacccugggguccccgugaaguggaaacggugaggacuagucccuguucccagagcccacuuuuuuuucuuuuuuugaaauaaaauagccugucuuucagaucucaaaggcucuuuucagagccaccaaaaaaaaaaaaaaaaaaaaaaaaaaaaaaaaaaaaaaaaaaaaaaaaaaaaaaaaaaaaaaaaaaaaaaaaaaaaaaaaaaaaaaaaaaaaaaaaaaaaa

SEQ ID NO: 38991 - RNA, 1764 nt, Artificial Sequence
  mRNA product Design a-2 (hSL-A100) comprising derived and/or modified sequence from LASV(Lassa virus/H.sapiens-wt/NGA/2015/ISTH_0543;Clade II)__AVO03639__GPCmut11 (opt5)
aggagaguccgcucagccagguugcagaagcggcuuagcguguguccuaaucuucucucugcguguagguaggccugugccgcaaacaagcuuaccaugggccagaucauuaccuucuuucaagaggugccccacgucaucgaagagguuaugaacauugugcugaucgcccucagccugcuugcuauucugaaggggaucuacaauguggccacaugcggacucuucggccuggucuccuuucuucugcucugugggagaucuugcagcacgaccuauaaaggaguguacgaacugcagacacuggagcucgacauggcgaaccugaauaugaccaugccucuuuccuguacaaagaacaauucucaucacuauaucaugguuggcaacgaaaccgggcuggagcucacacugaccaauacgagcauuaucaaccauaaauucugcaaucuuuccgaugcucacaagaaaaaccuguacgaccaugcccucaugucuauuaucagcaccuuucaccuguccauuccgaauuucaaccaguaugaggccaugagcugugauuuuaauggaggcaagaucucugugcaguacaaccugucccacacauaugcugucgacgccgcuaaucauugcggcaccauugccaacggggugcuccaaacauucaugcggauggcguggggaggcagcuacaucgcccuggauucugggaagggauccugggacuguaucaugaccagcuaccaguaucuuguuauucagaacacgacaugggaagaucacugccaguuuucucgccccuccccuaucggcuaccuggggcuccugagccaaagaacccgggacauuuauaucucccgcagacuucugggaacauucaccuggacccucucugauagcgagggcaaugaaacacccggcggguacugucugacgcgguggaugcugauugaggcugagcucaaaugcuuuggaaacaccgccguggcuaaguguaaugaaaaacaugacgaggaguucugcgauaugcugcgccuuuuugacuucaacaagcaggccaucagacggcugaaaacagaagcgcagauguccauccagcucauuaauaaggccgucaacgcucugaucaaugaucaacuuauuaugaagaaccaucugcgcgacaucaugggcauuccuuauugcaauuacagcaaauauuguuaccucaaccacaccgugacagggaagaccucucugcccagaugcugucugguguccaauggaagcuaccucaacgaaacgcacuucucugacgauaucgagcagcaggccgacaauaugaucacagagcugcuucaaaaagaauauauugaucggcagggcaagaccccucuggggcucgucgaccuguuuguuuucagcaccuccuuuuaccugaucucuauuuuccuucaccucgugaaaaucccgacacaucgccacauuaccggaaagcccugcccuaaaccccauagacugaaccacaugggcaucuguagcugcggccuguauaagcacccuggggugcccgucaaguggaaacggugaggacuagucccuguucccagagcccacuuuuuuuucuuuuuuugaaauaaaauagccugucuuucagaucucaaaggcucuuuucagagccaccaaaaaaaaaaaaaaaaaaaaaaaaaaaaaaaaaaaaaaaaaaaaaaaaaaaaaaaaaaaaaaaaaaaaaaaaaaaaaaaaaaaaaaaaaaaaaaaaaaaaa

SEQ ID NO: 38992 - RNA, 1764 nt, Artificial Sequence
  mRNA product Design a-2 (hSL-A100) comprising derived and/or modified sequence from LASV(Lassa virus/H.sapiens-wt/NGA/2016/ISTH_0009;Clade II)__AVO03571__GPCmut11 (opt5)
aggagaguccgcucagccagguugcagaagcggcuuagcguguguccuaaucuucucucugcguguagguaggccugugccgcaaacaagcuuaccaugggccagaucauuaccuucuuucaagaggugccccacgucaucgaagagguuaugaacauugugcugaucgcccucagccugcuugcuauucugaaggggaucuacaauguggccacaugcggacuccugggccuugucuccuuccugcuccugugugggagaucuugcagcacgaccuauaaaggaguguacgaacugcagacacucgagcuggacauggcgucccuuaacaugaccaugccucugucuuguacaaagaauaacagccaucacuauaucaugguuggcaaugaaaccgggcucgagcugacacuuaccaacacguccauuaucaaucauaaauuuugcaaccugucugaugcucacaagaaaaaucucuacgaccaugcccugaugagcauuaucuccaccuuccaccugagcauuccgaacuuuaaucaguaugaggccaugucuugugauuucaacggaggccggaucuccgugcaguacaaucucagccacucuuaugcugucgacgccgcuaaccauugcggcacaauugccaauggggugcugcaaaccuuuaugcgcauggcguggggaggcuccuacaucgcccuugauagcgggaagggaucuugggacuguaucaugacauccuaccaguaucugauuauccagaacaccacgugggaagaucacugccaguucagcagacccuccccuauuggcuaccucgggcugcuuucucaacggacacgcgacaucuauauuagcagacggcugcucggaaccuuuacauggacccuguccgauagcgagggcaacgaaacccccggcggguacugucugacacgcuggaugcucaucgaggcugagcugaagugcuucggaaauacggccguugcuaaauguaacgaaaagcaugacgaggaauuuugcgauaugcuuagacuguucgacuuuaauaaacaggccauccggcgccucaagaccgaggcgcagaugucuauucagcugaucaacaaagccgugaaugcucuuauuaacgaucaacugaucaugaagaaucaccucagagacauuaugggcaucccuuauugcaacuacuccaaguauuguuaccugaaucacacagucaccgggaaaacaagccugccccggugcugucucgugucuaacggaagcuaccugaaugaaacccauuucuccgacgauaucgagcagcaggccgacaacaugauuacggagcuucugcaaaaggaauauaucgaucgccagggcaaaacaccucucgggcugguggaccuguucgucuuuucuaccagcuucuaccuuauuuccaucuuucuccaccugguuaagauuccgacccauagacacaucacaggaaaacccugcccuaagccccaucggcugaaucacaugggcauuuguagcugcggccucuauaaccacccuggggugcccgugaaauggaagcgcugaggacuagucccuguucccagagcccacuuuuuuuucuuuuuuugaaauaaaauagccugucuuucagaucucaaaggcucuuuucagagccaccaaaaaaaaaaaaaaaaaaaaaaaaaaaaaaaaaaaaaaaaaaaaaaaaaaaaaaaaaaaaaaaaaaaaaaaaaaaaaaaaaaaaaaaaaaaaaaaaaaaaa

SEQ ID NO: 38993 - RNA, 1764 nt, Artificial Sequence
  mRNA product Design a-2 (hSL-A100) comprising derived and/or modified sequence from LASV(Lassa virus/H.sapiens-wt/NGA/2016/ISTH_0017;Clade II)__AVO03567__GPCmut11 (opt5)
aggagaguccgcucagccagguugcagaagcggcuuagcguguguccuaaucuucucucugcguguagguaggccugugccgcaaacaagcuuaccaugggccagaucauuaccuucuuucaagaggugccccacgucaucgaagagguuaugaacauugugcugaucgcccucagccugcuugcuauucugaaggggaucuacaauguggccacaugcggacucuucggccuggucuccuuucuucugcucugugggagaucuugcagcacgaccuauaaaggaguguacgaacugcagacacuggagcucgacauggcgucccugaacaugaccaugccucuuucuuguacaaagaauaacagccaucacuauaucaugguuggcaaugaaaccgggcuggagcucacacugaccaacacguccauuaucaaucauaaauucugcaaccuuucugaugcucacaagaaaaaucuguacgaccaugcccucaugagcauuaucuccaccuuucaccugagcauuccgaacuucaaucaguaugaggccaugucuugugauuuuaacggaggcaagaucuccgugcaguacaaucugagccacacauaugcuauugacgccgcuaaccauugcggcaccaucgccaaugggguccuccaaacauucaugcggauggcguggggaggcucuuacaucgcccuggauuccgggaagggaagcugggacuguauuaugaccucuuaccaguaucuuaucauucagaacacgacaugggaagaucacugccaguuuucccgccccagcccuaucggcuaccuggggcuccugucccaaagaacccgggacauuuauaucucucgcagacuucugggaacauucaccuggacccucagcgauuccgagggcaacgaaacacccggcggguacugucugacgcgguggaugcugaucgaggcugagcucaaaugcuuuggaaauaccgccguggcuaaguguaacgaaaaacaugacgaggaguucugcgauaugcugcgccuuuuugacuucaauaagcaggccauuagacggcugaaaacagaagcgcagaugagcauccagcucauuaacaaggccguuaaugcucugaucaacgaucaacuuauuaugaagaaucaucugcgcgacaucaugggcaucccuuauugcaacuacucuaaauauuguuaccucaaucacaccgugacagggaagaccucccugcccagaugcugucuggucagcaacggaucuuaccucaaugaaacgcacuucagcgacgauauugagcagcaggccgacaacaugaucacagagcugcuucaaaaagaauauauggaucggcagggcaagaccccucuggggcucguggaccuguuuguguucuccaccucuuuuuaccugauuagcaucuuccuucaccucguccgcauuccgacacauagacacguuaucggaaaacccugcccuaagccccaucggcugaaucacaugggcauuuguuccugcggccuguauaaacacccuggggugcccgugaaguggaagcgcugaggacuagucccuguucccagagcccacuuuuuuuucuuuuuuugaaauaaaauagccugucuuucagaucucaaaggcucuuuucagagccaccaaaaaaaaaaaaaaaaaaaaaaaaaaaaaaaaaaaaaaaaaaaaaaaaaaaaaaaaaaaaaaaaaaaaaaaaaaaaaaaaaaaaaaaaaaaaaaaaaaaaa

SEQ ID NO: 38994 - RNA, 1764 nt, Artificial Sequence
  mRNA product Design a-2 (hSL-A100) comprising derived and/or modified sequence from LASV(Lassa virus/H.sapiens-wt/NGA/2018/ISTH_0959;Clade II)__AVV65099__GPCmut11 (opt5)
aggagaguccgcucagccagguugcagaagcggcuuagcguguguccuaaucuucucucugcguguagguaggccugugccgcaaacaagcuuaccaugggccagaucauuaccuucuuucaagaggugccccacgucaucgaagagguuaugaacauugugcugaucgcccucagccugcuugcuauucugaaggggaucuacaauguggucacaugcggacucuucggccugguguccuuucuucugcucugugggagaucuugcagcacgaccuauaaaggaguuuacgaacugcagacacuggagcucgacauggccucccugaacaugaccaugccucuuucuuguacaaagaauaacagccaucacuauaucauggugggcaaugaaaccgggcuggagcucacacugaccaacacguccauuaucaaucauaaauucugcaaccuuucugaugcgcacaagaaaaaucuguacgaccaugcucucaugagcauuaucuccaccuuucaccugagcauuccgaacuucaaucaguaugaggccaugucuugugauuuuaacggaggcaagaucuccguccaguacaaucugagccacgccuaugcuauugacgccgcuaaccauugcggcacaaucgccaauggggugcuccaaaccuucaugcggauggcguggggaggcucuuacaucgcccuggauuccgggaagggaagcugggacuguauuaugacaucuuaccaguaucuuaucauucagaacaccacgugggaagaucacugccaguuuucccgccccagcccuaucggcuaccuggggcuccugucccaaagaacacgggacauuuauaucucucgcagacuucugggaaccuucacauggacccucagcgauuccgagggcaacgaaacccccggcggguacugucugacacgguggaugcugaucgaggcugagcucaaaugcuuuggaaauacggccguugcuaaguguaacgaaaaacaugacgaggaguucugcgauaugcugcgccuuuuugacuucaauaagcaggccauuagacggcugaaaaccgaagcgcagaugagcauccagcucauuaacaaggccgugaaugcucugaucaacgaucaacuuauuaugaagaaucaucugcgcgacaucaugggcaucccuuauugcaacuacucuaaauauuguuaccucaaucacacagucaccgggaagacaucccugcccagaugcugucuggugagcaacggaucuuaccucaaugaaacccacuucagcgacgauauugagcagcaggccgacaacaugaucacggagcugcuucaaaaagaauauauugaucggcagggcaagacaccucuggggcucguggaccuguuugucuucuccaccucuuuuuaccugaucagcauuuuccuucaccucguuaaaaucccgacccaucgccacgugauuggaaagcccugcccuaaaccccauagacugaaucacaugggcaucuguuccugcggccuguauaagcacccuggggugcccgucaaguggaaacggugaggacuagucccuguucccagagcccacuuuuuuuucuuuuuuugaaauaaaauagccugucuuucagaucucaaaggcucuuuucagagccaccaaaaaaaaaaaaaaaaaaaaaaaaaaaaaaaaaaaaaaaaaaaaaaaaaaaaaaaaaaaaaaaaaaaaaaaaaaaaaaaaaaaaaaaaaaaaaaaaaaaaa

SEQ ID NO: 38995 - RNA, 1764 nt, Artificial Sequence
  mRNA product Design a-2 (hSL-A100) comprising derived and/or modified sequence from LASV(LASV003-NIG-2008;Clade II)__AIT17580__GPCmut11 (opt5)
aggagaguccgcucagccagguugcagaagcggcuuagcguguguccuaaucuucucucugcguguagguaggccugugccgcaaacaagcuuaccaugggccagaucauuaccuucuuucaagaggugccccacgucaucgaagagguuaugaacauugugcugaucgcccucagccugcuugcuauucugaaggggaucuacaauguggccacaugcggacucuucggccuggucuccuuucuucugcucugugggagaucuugcagcacgaccuauaaaggaguguacgaacugcagacacuggagcucgacauggcgucccugaacaugaccaugccucuuucuuguacaaagaauaacagccaucacuauaucaugguuggcaaugaaaccgggcuggagcucacacugaccaacacguccauuaucaaucauaaauucugcaaccuuucugaugcucacaagaaaaaucuguacgaccaugcccucaugagcauuaucuccaccuuucaccugagcauuccgaacuucaaucaguaugaggccaugucuugugauuuuaacggaggcaagaucuccgugcaguacaaucugagccacacauaugcugucgacgccgcuaaccauugcggcaccauugccaauggggugcuccaaacauucaugcggauggcguggggaggcucuuacaucgcccuggauuccgggaagggaagcugggacuguaucaugaccucuuaccaguaucuuauuauccagaacacgacaugggaagaucacugccaguuuucccgccccagcccuauuggcuaccuggggcuccugucccaaagaacccgggacaucuauauuucucgcagacuucugggaacauucaccuggacccucagcgauuccgagagcaacgaaacacccggcggcuacugucugacgcgguggaugcugaucgaggcugagcucaaaugcuuugggaauaccgccguugcuaaguguaacgaaaaacaugacgaggaguucugcgauaugcugcgccuuuuugacuucaauaagcaggccaucagacggcugaaagcggaagcccagaugucuauucagcucaucaacaaggcugugaaugcccugauuaacgaucaacuuaucaugaagaaucaucugcgcgacauuaugggaaucccuuauugcaacuacuccaaauauuguuaccucaaucacacagucaccggcagaacaagccugccccggugcugucuggugucuaacgggagcuaccucaaugaaacccacuucuccgacgauaucgagcagcaggcugacaacaugauuacggagcugcuucaaaaggaauauauggaucgccagggaaaaacaccucugggccucguggaccuguuugucuucucuaccagcuuuuaccugaucuccauuuuccuucaccucguuaagaucccgacccauagacacgugauugggaaacccugcccuaagccccaucggcugaaucacaugggaaucuguagcugcggccuguauaaacacccuggcgugcccgucaaguggaagcgcugaggacuagucccuguucccagagcccacuuuuuuuucuuuuuuugaaauaaaauagccugucuuucagaucucaaaggcucuuuucagagccaccaaaaaaaaaaaaaaaaaaaaaaaaaaaaaaaaaaaaaaaaaaaaaaaaaaaaaaaaaaaaaaaaaaaaaaaaaaaaaaaaaaaaaaaaaaaaaaaaaaaaa

SEQ ID NO: 38996 - RNA, 1764 nt, Artificial Sequence
  mRNA product Design a-2 (hSL-A100) comprising derived and/or modified sequence from LASV(LASV035-NIG-2009;Clade II)__AIT17588__GPCmut11 (opt5)
aggagaguccgcucagccagguugcagaagcggcuuagcguguguccuaaucuucucucugcguguagguaggccugugccgcaaacaagcuuaccaugggccagaucauuaccuucuuucaagaggugccccacgucaucgaagagguuaugaacauugugcugaucgcccucagccugcuugcuauucugaaggggaucuacaauguggccacaugcggacucuucggccuggucuccuuucuucugcucugugggagaucuugcagcacgaccuauaaaggaguguacgaacugcagacacuggagcucgacauggcgucccugaacaugaccaugccucuuucuuguacaaagaauaacagccaucacuauaucaugguuggcaaugaaaccgggcuggagcucacacugaccaacacguccauuaucaaucauaaauucugcaaccuuucugaugcucacaagaaaaaucuguacgaccaugcccucaugagcauuaucuccaccuuucaccugagcauuccgaacuucaaucaguaugaggccaugucuugugauuuuaacggaggcaagaucuccgugcaguacaaucugagccacgcuuaugccgucgacgcugccaaccauugcggcacaauugcgaauggggugcuccaaaccuucaugcggauggccuggggaggcucuuacaucgcucuggauuccgggaagggaagcugggacuguaucaugacaucuuaccaguaucuuauuauccagaacaccacgugggaagaucacugccaguuuucccgccccagcccuauuggcuaccuggggcuccugucccaaagaacacgggacaucuauauuucucgcagacuucugggaaccuucacauggacccucagcgauuccgagggcaacgaaacccccggcggguacugucugacacgguggaugcugaucgaggccgagcucaaaugcuuuggaaauacggcuguugccaaguguaacgaaaaacaugacgaggaguucugcgauaugcugcgccuuuuugacuucaauaagcaggcgaucagacggcugaaagccgaagcucagaugagcauucagcucaucaacaaggccgugaaugcucugauuaacgaucaacuuaucaugaagaaucaucugcgcgacauuaugggcaucccuuauugcaacuacucuaaauauuguuaccucaaucacaccgucacagggaagaccucccugcccagaugcugucuggugagcaacggaucuuaccucaaugaaacacacuucagcgacgauaucgagcagcaggccgacaacaugauuaccgagcugcuucaaaaagaauauaucgaucggcagggcaagacgccucuggggcucguggaccuguuugucuucuccacaucuuuuuaccugauuagcaucuuccuucaccucguuaaaauuccgacccaucgccacgugaucggaaagcccugcccuaaaccccauagacugaaucacaugggcauuuguuccugcggccuguauaagcacccuggggugcccgucaaguggaaacggugaggacuagucccuguucccagagcccacuuuuuuuucuuuuuuugaaauaaaauagccugucuuucagaucucaaaggcucuuuucagagccaccaaaaaaaaaaaaaaaaaaaaaaaaaaaaaaaaaaaaaaaaaaaaaaaaaaaaaaaaaaaaaaaaaaaaaaaaaaaaaaaaaaaaaaaaaaaaaaaaaaaaa

SEQ ID NO: 38997 - RNA, 1764 nt, Artificial Sequence
  mRNA product Design a-2 (hSL-A100) comprising derived and/or modified sequence from LASV(LASV1000-NIG-2009;Clade II)__AIT17782__GPCmut11 (opt5)
aggagaguccgcucagccagguugcagaagcggcuuagcguguguccuaaucuucucucugcguguagguaggccugugccgcaaacaagcuuaccaugggccagaucauuaccuucuuucaagaggugccccacgucaucgaagagguuaugaacauugugcugaucgcccucagccugcuugcuauucugaaggggaucuacaauguggccacaugcggacucuucggccuggucuccuuucuucugcucugugggagaucuugcagcacgaccuauaaaggaguguacgaacugcagacacuggagcucgacauggcgucccugaacaugaccaugccucuuucuuguacaaagaauaacagccaucacuauaucaugguuggcaaugaaaccgggcuggagcucacacugaccaacacguccauuaucaaucauaaauucugcaaccuuucugaugcucacaagaaaaaucuguacgaccaugcccucaugagcauuaucuccaccuuucaccugagcauuccgaacuucaaucaguaugaggccaugucuugugauuuuaacggaggcaagaucuccgugcaguacaaucugagccacacauaugcugucgacgccgcuaaccauugcggcaccauugccaauggggugcuccaaacauucaugcggauggcguggggaggcucuuacaucgcccuggauuccgggaagggaagcugggacuguaucaugaccucuuaccaguaucuuauuauccagaacacgacaugggaagaucacugccaguuuucccgccccagcccuauuggcuaccuggggcuccugucccaaagaacccgggacaucuauauuucucgcagacuucugggaacauucaccuggacccucagcgauuccgagggcaacgaaacacccggcggguacugucugacgcgguggaugcugaucgaggcugagcucaaaugcuuuggaaauaccgccguugcuaaguguaacgaaaaacaugacgaggaguucugcgauaugcugcgccuuuuugacuucaauaagcaggccaucaaaagacugaagacagaagcgcagaugagcauucagcucaucaacaaggccgugaaugcucugauuaacgaucaacuuaucaugaaaaaucaucugcgggacauuaugggcaucccuuauugcaacuacucuaaguauuguuaccucaaucacaccgucacagggaaaaccucccugccccgcugcugucuggugagcaacggaucuuaccucaaugaaacgcacuucagcgacgauaucgagcagcaggccgacaacaugauuacagagcugcuucaaaaggaauauaucgauagacagggcaaaaccccucuggggcucguggaccuguuugucuucuccaccucuuuuuaccugauuagcaucuuccuucaccucguuaagauuccgacacaucggcacguggugggaaaacccugcccuaagccccaucgccugaaucacaugggcaucuguuccugcggccuguauaagcacccugggguccccgugaaauggaagagaugaggacuagucccuguucccagagcccacuuuuuuuucuuuuuuugaaauaaaauagccugucuuucagaucucaaaggcucuuuucagagccaccaaaaaaaaaaaaaaaaaaaaaaaaaaaaaaaaaaaaaaaaaaaaaaaaaaaaaaaaaaaaaaaaaaaaaaaaaaaaaaaaaaaaaaaaaaaaaaaaaaaaa

SEQ ID NO: 38998 - RNA, 1764 nt, Artificial Sequence
  mRNA product Design a-2 (hSL-A100) comprising derived and/or modified sequence from LASV(LASV221-NIG-2010;Clade II)__AIT17624__GPCmut11 (opt5)
aggagaguccgcucagccagguugcagaagcggcuuagcguguguccuaaucuucucucugcguguagguaggccugugccgcaaacaagcuuaccaugggccagaucauuaccuucuuucaagaggugccccacgucaucgaagagguuaugaacauugugcugaucgcccucagccugcuugcuauucugaaggggaucuacaauguggccacaugcggacucuucggccuggucuccuuucuucugcucugugggagaucuugcagcacgaccuauaaaggaguguacgaacugcagacacuggagcucgacauggcgucccugaacaugaccaugccucuuucuuguacaaagaauaacagccaucacuauaucaugguuggcaaugaaaccgggcuggagcucacacugaccaacacguccauuaucaaucauaaauucugcaaccuuucugaugcucacaagaaaaaucuguacgaccaugcccucaugagcauuaucuccaccuuucaccugagcauuccgaacuucaaucaguaugaggccaugucuugugauuuuaacggaggcaagaucuccgugcaguacaaucugagccacacauaugcuauugacgccgcuaaccauugcggcaccaucgccaaugggguccuccaaacauucaugcggauggcguggggaggcucuuacaucgcccuggauuccgggaagggaagcugggacuguauuaugaccucuuaccaguaucuuaucauucagaacacgacaugggaagaucacugccaguuuucccgccccagcccuaucggcuaccuggggcuccugucccaaagaacccgggacauuuauaucucucgcagacuucugggaacauucaccuggacccucagcgauuccgagggcaacgaaacacccggcggguacugucugacgcgguggaugcugaucgaggcugagcucaaaugcuuuggaaauaccgccguggcuaaguguaacgaaaaacaugacgaggaguucugcgauaugcugcgccuuuuugacuucaauaagcaggccauuagacggcugaaaacagaagcgcagaugagcauccagcucauuaacaaggccguuaaugcucugaucaacgaucaacuuauuaugaagaaucaucugcgcgacaucaugggcaucccuuauugcaacuacucuaaauauuguuaccucaaucacaccgugacagggaagaccucccugcccagaugcugucuggucagcaacggaucuuaccucaaugaaacgcacuucagcgacgauauugagcagcaggccgacaacaugaucacagagaugcugcaaaaagaauauauggaucggcagggcaagaccccucuugggcugguggaccucuuuguguucuccaccucuuuuuaccugauuagcaucuuccugcaccuugucaaaauuccgacacaucgccacguuaucggaaagcccugcccuaaaccccauagacucaaucacaugggcauuuguuccugcggccuguauaagcacccuggggugcccgugaaguggaaacggugaggacuagucccuguucccagagcccacuuuuuuuucuuuuuuugaaauaaaauagccugucuuucagaucucaaaggcucuuuucagagccaccaaaaaaaaaaaaaaaaaaaaaaaaaaaaaaaaaaaaaaaaaaaaaaaaaaaaaaaaaaaaaaaaaaaaaaaaaaaaaaaaaaaaaaaaaaaaaaaaaaaaa

SEQ ID NO: 38999 - RNA, 1764 nt, Artificial Sequence
  mRNA product Design a-2 (hSL-A100) comprising derived and/or modified sequence from LASV(LASV237-NIG-2010;Clade II)__AIT17638__GPCmut11 (opt5)
aggagaguccgcucagccagguugcagaagcggcuuagcguguguccuaaucuucucucugcguguagguaggccugugccgcaaacaagcuuaccaugggccagaucauuaccuucuuucaagaggugccccacgucaucgaagagguuaugaacauugugcugaucgcccucagccugcuugcuauucugaaggggaucuacaauguggccacaugcggacucuucggccuggucuccuuucuucugcucugugggagaucuugcagcacgaccuauaaaggaguguacgaacugcagacacuggagcucgacauggcgucccugaacaugaccaugccucuuucuuguacaaagaauaacagccaucacuauaucaugguuggcaaugaaaccgggcuggagcucacacugaccaacacguccauuaucaaucauaaauucugcaaccuuucugaugcucacaagaaagaccuguacgaucaugcccucaugagcauuaucuccaccuuucaccugagcauuccgaauuucaaccaguaugaggccaugucuugugacuuuaauggaggcaagaucuccgugcaguacaaccugagccacacauaugcugucgaugccgcuaaucauugcggcaccauugccaacggggugcuccaaacauucaugcggauggcguggggaggcucuuacaucgcccuggacuccgggaagggaagcugggauuguaucaugaccucuuaccaguaucuuauuauccagaauacgacaugggaagaccacugccaguuuucccgccccagcccuauuggcuaccuggggcuccugucccaaagaacccgggauaucuauauuucucgcagacuucugggaacauucaccuggacccucagcgacuccgagggcaacgaaacacccggcggguacugucugacgcgguggaugcugaucgaggcugagcucaaaugcuuuggaaacaccgccguugcuaaguguaaugaaaaacaugaugaggaguucugcgacaugcugcgccuuuuugauuucaacaagcaggccaucagacggcugaaaacagaagcgcagaugagcauucagcucaucaauaaggccgugaacgcucugauuaaugaccaacuuaucaugaagaaccaucugcgcgacauuaugggcaucccuuauugcaauuacucuaaauauuguuaccucaaccacaccgucacagggaagaccucccugcccagaugcugucuggugagcaauggaucuuaccucaacgaaacgcacuucagcgaugacaucgagcagcaggccgauaauaugauuacagagcugcuucaaaaagaauauauggaccggcagggcaagaccccucuggggcucguggaucuguuugucuucuccaccucuuuuuaccugaucagcauuuuccuucaccucaucaaaauuccgacacaucgccacaucaccggaaagcccugcccuaaaccccauagacugaaccacaugggcauuuguuccugcggccuguauaagcacccugggguucccgugaaguggaaacggugaggacuagucccuguucccagagcccacuuuuuuuucuuuuuuugaaauaaaauagccugucuuucagaucucaaaggcucuuuucagagccaccaaaaaaaaaaaaaaaaaaaaaaaaaaaaaaaaaaaaaaaaaaaaaaaaaaaaaaaaaaaaaaaaaaaaaaaaaaaaaaaaaaaaaaaaaaaaaaaaaaaaa

SEQ ID NO: 39000 - RNA, 1764 nt, Artificial Sequence
  mRNA product Design a-2 (hSL-A100) comprising derived and/or modified sequence from LASV(LASV253-NIG-2011;Clade II)__AIT17670__GPCmut11 (opt5)
aggagaguccgcucagccagguugcagaagcggcuuagcguguguccuaaucuucucucugcguguagguaggccugugccgcaaacaagcuuaccaugggccagaucauuaccuucuuucaagaggugccccacgucaucgaagagguuaugaacauugugcugaucgcccucagccugcuugcuauucugaaggggaucuacaauguggccacaugcggacucuucggccuggucuccuuucuucugcucugugggagaucuugcagcacgaccuauaaaggaguguacgaacugcagacacuggagcucgacauggcgucccugaacaugaccaugccucuuucuuguacaaagaauaacagccaucacuauaucaugguuggcaaugaaaccgggcuggagcucacacugaccaacacguccauuaucaaucauaaauucugcaaccuuucugaugcucacaagaaaaaucuguacgaccaugcccucaugagcauuaucuccaccuuucaccugagcauuccgaacuucaaucaguaugaggccaugucuugugauuuuaacggaggcaagaucuccgugcaguacaaucugagccacacauaugcugucgacgccgcuaaccauugcggcaccauugccaauggggugcuccaaacauucaugcggauggcguggggaggcucuuacaucgcccuggauuccgggaagggaagcugggacuguaucaugaccucuuaccaguaucuuauuauccagaacacgacaugggaagaucacugccaguuuucccgccccagcccuauuggcuaccuggggcuccugucccaaagaacccgggacaucuauauuucucgcagacuucugggaacauucaccuggacccucagcgauuccgagggcaacgaaacacccggcggguacugucugacgcgguggaugcugaucgaggcugagcucaaaugcuuuggaaauaccgccguugcuaaguguaacgaaaaacaugacgaggaguucugcgauaugcugcgccuuuuugacuucaauaagcaggccaucagacggcugaaagcggaagcccagaugagcauucagcucaucaacaaggcugugaaugcccugauuaacgaucaacuuaucaugaagaaucaucugcgcgacauuaugggcaucccuuauugcaacuacucuaaauauuguuaccucaaucacacagucaccgggagaacaucccugccccggugcugucuggugagcaacggaucuuaccucaaugaaacccacuucagcgacgauaucgagcagcaggcugacaacaugauuacggagcugcuucaaaaggaauauaucgaucgccagggcaaaacaccucuggggcucguggaccuguuugucuucuccaccucuuuuuaccugauuagcaucuuccuucaccucguuaagauuccgacccauagacacaucauuggaaaacccugcccuaagccccaucggcugaaucacaugggcaucuguuccugcggccuguauaaacacccuggggugcccgugaaguggaagcgcugaggacuagucccuguucccagagcccacuuuuuuuucuuuuuuugaaauaaaauagccugucuuucagaucucaaaggcucuuuucagagccaccaaaaaaaaaaaaaaaaaaaaaaaaaaaaaaaaaaaaaaaaaaaaaaaaaaaaaaaaaaaaaaaaaaaaaaaaaaaaaaaaaaaaaaaaaaaaaaaaaaaaa

SEQ ID NO: 39001 - RNA, 1764 nt, Artificial Sequence
  mRNA product Design a-2 (hSL-A100) comprising derived and/or modified sequence from LASV(LASV254-NIG-2011;Clade II)__AIT17674__GPCmut11 (opt5)
aggagaguccgcucagccagguugcagaagcggcuuagcguguguccuaaucuucucucugcguguagguaggccugugccgcaaacaagcuuaccaugggccagaucauuaccuucuuucaagaggugccccacgucaucgaagagguuaugaacauugugcugaucgcccucagccugcuugcuauucugaaggggaucuacaauguggccacaugcggacucuucggccuggucuccuuucuucugcucugugggagaucuugcagcacgaccuauaaaggaguguacgaacugcagacacuggagcucgacaugaccaaccugaauaugacaaugccucuuuccuguaccaagaacaauucucaucacuauaucaugguuggcaacgaaacagggcuggagcucacccugacgaauaccagcauuaucaaccauaaauucugcaaucuuuccgaugcgcacaagaaaaaccuguacaaucaugcucucaugucuauuaucagcacauuucaccuguccauuccgaacuucaaucaguaugaggccaugagcugugacuuuaacggaggcaagaucucugugcaguacaaucugucccacagcuaugccgucgaugcugccaaccauugcggcaccauugcuaacggggugcuccaaacauucaugcggauggccuggggaggcucuuacaucgcgcuggacuccgggaagggaaauugggauuguaucaugaccagcuaccaguaucuuauuauccagaacacgacaugggaagaccacugccaguuuucucgccccuccccuauuggcuaccuggggcuccugagccaaagaacccgggauaucuauauuucccgcagacuucugggaacauucaccuggacccucucugacagcgagggcaaugaaacacccggcggguacugucugacgcgguggaugcugaucgaggccgagcucaaaugcuuuggaaacaccgcuguugccaaguguaaugaaaaacaugaugaggaguucugcgacaugcugcgccuuuuugauuucaacaagcaggcuaucagacggcugaaaacagaagcccaggcgaauauucagcucaucaacaaggccgugaaugcucugauuaacgaccaacuuaucaugaagaaucaucugcgcgauauuaugggcaucccuuauugcaacuacuccaaauauuguuaccucaaucacaccgucacagggaagaccagccugcccagaugcugucuggugucuaacggauccuaccucaaugaaacgcacuucagcgacgacaucgagcagcaggccgauaacaugauuacagagcugcuucaaaaagaauauauggaccggcagggcaagaccccucuggggcucguggaucuguuugucuucucuaccagcuuuuaccugaucuccauuuuccuucaccucguuaaaaucccgacacaucgccacgugauuggaaagcccugcccuaaaccccauagacugaaccacaugggcaucuguucuugcggccuguauaagcacccuggggugcccgucaaguggaaacggugaggacuagucccuguucccagagcccacuuuuuuuucuuuuuuugaaauaaaauagccugucuuucagaucucaaaggcucuuuucagagccaccaaaaaaaaaaaaaaaaaaaaaaaaaaaaaaaaaaaaaaaaaaaaaaaaaaaaaaaaaaaaaaaaaaaaaaaaaaaaaaaaaaaaaaaaaaaaaaaaaaaaa

SEQ ID NO: 39002 - RNA, 1764 nt, Artificial Sequence
  mRNA product Design a-2 (hSL-A100) comprising derived and/or modified sequence from LASV(Nig08-A19;Clade III)__ADU56618__GPCmut11 (opt5)
aggagaguccgcucagccagguugcagaagcggcuuagcguguguccuaaucuucucucugcguguagguaggccugugccgcaaacaagcuuaccaugggccagaucgugaccuucuuucaagaggucccccacguuauugaagaggugaugaacaucgugcugauugcccucagcauccuggcuauucuuaaggggcuguacaauaucgccacaugcggacucaucggccuggucacguuccuucugcucuccgggagaucuuguagcaugaccuauaaaggaguguacgaacugcagacacuggagcucaacaugaauacccugaacaugacaaugccucuuuccugcaccaagaauaacucucaucacuauauuaugguuggcaaugaaacagggcuggagcucacccugacgaacaccagccuucugcaucacaaauuuuguaaucucuccgacgcgcauaagaaaaaccuguacgaucacacacugaugucuaucauuagcaccuuccaccucuccaucccgaauuuuaaccaguaugaggcuaugagcugcgacuucaauggaggcaagauuacagugcaguacaaccugucucauuccuaugccaucgaugccgcuaaucacuguggcaccgucgccaacggggugcuucaaacguuuaugcggauggcuuggggaggcagcuacauugcccuggacucugggcgcggaaagugggauugcaucaugacauccuaccaguaucucaucauucagaacaccacaugggaagaccauugucaguucagcagacccucuccuaucggcuaccuggggcuucugucccaacggacccgcgauauuuauaucagcagacggcuccugggaaccuuuacauggacgcuguccgacucugagggcaaugaaacccccggcggguacugccucacacgcuggaugcugauugaggcggagcuuaaauguuucggaaacaccgccguugcuaagugcaaugaaaaacacgaugaggaauuuugugacaugcugagacucuucgauuuuaacaagcaggccauccggcgccugaaagcugaggcccagaugagcauccagcuuauuaauaaggcggugaacgcccugaucaaugaccaacucauuaugaagaaccaccugagagauaucaugggcauuccuuauugcaauuacuccaaauauugcuaccugaaccauacaagcaccgggcggacgucucucccccgcuguugccuggucuccaauggaagcuaccuuaacgaaacacacuucucugacgacaucgagcagcaggcugauaauaugaucaccgagaugcugcaaaaggaauaucucgacagacagggcaaaaccccucuggggcugguggaucuuuucguguuuagcacauccuucuaccucauuucuaucuuucugcaucuggucaagauuccgacccaccggcauaucguuggaaaacccuguccuaagccccaccgccucaaccacaugggcauuugcagcuguggccuguauaaacagccuggggugcccgugagauggaagcggugaggacuagucccuguucccagagcccacuuuuuuuucuuuuuuugaaauaaaauagccugucuuucagaucucaaaggcucuuuucagagccaccaaaaaaaaaaaaaaaaaaaaaaaaaaaaaaaaaaaaaaaaaaaaaaaaaaaaaaaaaaaaaaaaaaaaaaaaaaaaaaaaaaaaaaaaaaaaaaaaaaaaa

SEQ ID NO: 39003 - RNA, 1767 nt, Artificial Sequence
  mRNA product Design a-2 (hSL-A100) comprising derived and/or modified sequence from LASV(G1180-SLE-2010;Clade IV)__AIT17168__GPCmut11 (opt5)
aggagaguccgcucagccagguugcagaagcggcuuagcguguguccuaaucuucucucugcguguagguaggccugugccgcaaacaagcuuaccaugggccagaucgugaccuucuuucaagaggucccccacguuauugaagaggugaugaacaucgugcugauugcccucagcauccuggcuguccuuaaggggcuguacaauuucgccacaugcggacucgugggccugcuuacguuucugcuccugugugggagauccugcaccgcgucucgguauaaaggaguuuacgaacugcagacacucgagcugaacauggaaacccuuaauaugacaaugccucugagcuguaccaagaacaauucccaucacuauauuauggugggcaacgagacagggcucgagcugacccuuacgaauaccucuaucaucaaccauaaauucugcaaucugagcgacgcucacaagaaaaaccucuacgaucaugcccugauguccauuaucucuacauuucaccugagcauuccgaauuucaaccaguaugaagccauguccugugacuuuaauggaggcaagaucagcguccaguacaaccucucucacuccuaugcuggcgaugccgcuaaucauugcgggaccguggccaacggaguucugcaaacauucaugcgcauggcguggggcgggagcuacauugcccuugacucuggacacggcuccugggauuguaucaugaccagcuaccaguaucugauuauccagaacacgacaugggaggaccauugccaguuuucuagacccuccccuaucggguaccucggacugcuuagccaacggacccgcgauauuuauaucuccagacggcugcucggcacauucaccuggacccugucugacagcgaaggcaaggauacacccgggggauacugucugacgcgcuggaugcucauugaggcugagcugaaaugcuuuggcaauaccgccguggcuaaguguaacgaaaaacacgacgaggaguucugcgauaugcuuagacuguuugacuucaauaagcaggccauccagcggcucaaagcggaagcccagauguccauucaacugaucaacaaggcugucaaugcccuuaucaacgaucagcugauuaugaagaaucaccuccgcgacaucauggggauuccuuauugcaacuacagcaaauauuguuaccugaaucauacaaccacaggaaagaccucucugcccaaaugcugucucguguccaacggcagcuaccugaaugaaacgcacuucucugacgauaucgagcagcaagcugacaacaugauuacagagaugcuucagaaggaauauauggagagacaggggaaaaccccucugggacucguggaucuguuugucuucagcaccuccuuuuaccugaucucuaucuuccuucaucucguuaagauuccgacacaccggcauaucgugggcaaaagcugccccaagccucaccgccugaaucacaugggcauuuguuccugcgggcuguauaagcagcccggagugccugucaaauggaagagaugaggacuagucccuguucccagagcccacuuuuuuuucuuuuuuugaaauaaaauagccugucuuucagaucucaaaggcucuuuucagagccaccaaaaaaaaaaaaaaaaaaaaaaaaaaaaaaaaaaaaaaaaaaaaaaaaaaaaaaaaaaaaaaaaaaaaaaaaaaaaaaaaaaaaaaaaaaaaaaaaaaaaa

SEQ ID NO: 39004 - RNA, 1767 nt, Artificial Sequence
  mRNA product Design a-2 (hSL-A100) comprising derived and/or modified sequence from LASV(G1442-SLE-2011;Clade IV)__AIT17180__GPCmut11 (opt5)
aggagaguccgcucagccagguugcagaagcggcuuagcguguguccuaaucuucucucugcguguagguaggccugugccgcaaacaagcuuaccaugggccagaucgugaccuucuuucaagaggucccccacguuauugaagaggugaugaacaucgugcugauugcccucagcauccuggcuguccuuaaggggcuguacaauguggccacaugcggacucauuggccugguuacguuccuucugcucugugggagauccugcaccacaacccuguauaaaggaguguacgaacugcagacacucgagcugaacauggaaacccuuaauaugacaaugccucugucuuguaccaagaacaauagccaucacuauauccgggucggcaacgagacggggcucgagcugacccuuacaaauaccuccaucauuaaccauaaauuuugcaaucugucugacgcgcacaagaaaaaccucuacgaucaugcucugaugagcaucauuuccacauuccaccugucuaucccgaauuuuaaccaguaugaagccaugagcugugacuucaauggaggcaagauuuccgugcaguacaaccucagccacucuuaugccggcgaugcugccaaucauugcgggaccguugcuaacggagugcugcaaacguuuaugcgcauggccuggggcggguccuacaucgcgcuugacagcggaagaggcaacugggauuguauuaugacaucuuaccaguaucugaucauccagaauaccacaugggacgaucacugccaguucucccggcccagcccuauuggguaccucggacugcuuucucaacgcaccagagacgucuauaucucccggcgccugcucggcaccuuuacauggacgcugagcgauuccgagggcaaggacacccccgggggauacugucugacaagauggaugcucauugaagccgagcugaaaugcuucggcaacaccgcuguggccaaguguaaugagaaacaugaugaagaguuuugcgacaugcuucggcuguucgauuuuaacaagcaggcuauccagcgccucaaagccgaagcgcagaugucuauucaacugaucaauaaggccgugaacgcucuuaucaaugaccagcugauuaugaagaaccaccucagagacaucauggggauuccuuauugcaauuacagcaaauauuguuaccugaacaauacagccaccggaaagacgucccugcccaaaugcugucucaucagcaacggcucuuaccugaaugagacacacuucuccgaugacauugaacaggaggcugauaacaugaucaccgagaugcuucaaaaggaauauauggagcggcaggggaaaaccccucugggacucgucgaccuguucguuuuuagcacaucuuucuaccugaucagcauuuuucuucaucucgugaagaucccgacccaccgccauauugugggcaaauccugccccaagccucacagacugaaucauaugggcaucuguucuugcgggcuguauaagcagcccggagucccugugcgguggaaacgcugaggacuagucccuguucccagagcccacuuuuuuuucuuuuuuugaaauaaaauagccugucuuucagaucucaaaggcucuuuucagagccaccaaaaaaaaaaaaaaaaaaaaaaaaaaaaaaaaaaaaaaaaaaaaaaaaaaaaaaaaaaaaaaaaaaaaaaaaaaaaaaaaaaaaaaaaaaaaaaaaaaaaa

SEQ ID NO: 39005 - RNA, 1767 nt, Artificial Sequence
  mRNA product Design a-2 (hSL-A100) comprising derived and/or modified sequence from LASV(G3010-SLE-2013;Clade IV)__AIT17344__GPCmut11 (opt5)
aggagaguccgcucagccagguugcagaagcggcuuagcguguguccuaaucuucucucugcguguagguaggccugugccgcaaacaagcuuaccaugggccagaucgugaccuucuuucaagaggucccccacguuauugaagaggugaugaacaucgugcugauugcccucagcauccuggcuguccuuaaggggcuguacaauuucgccacaugcggacucgugggccugguuacguuucuucugcucugugggagauccugcaccacaucucuguauaaaggaguguacgaacugcagacccucgagcugaacauggaaacacuuaauaugaccaugccucugagcuguacaaagaacaauucccaucacuauauuauggucggcaacgagaccgggcucgagcugacgcuuaccaauacaucuaucaucaaccauaaauucugcaaucugagcgacgcgcacaagaaaaaccucuacaaucaugcucugauguccauuaucucuaccuuucaccugagcauuccgaacuucaaucaguaugaagccauguccugugauuuuaacggaggcaagaucagcgugcaguacaaucucucucacuccuaugccggcgacgcugccagccauugcgggacaguugcuaacggagugcugcaaaccuucaugcggauggccuggggcgggucuuacauugcgcuugauuccggauacggcaagugggacuguaucaugacgagcuaucaguaccugauuauccagaacacaaccugggaggaucacugccaguuuucucgccccuccccuaucggguaucucggacugcuuagccaaagaacacgggacauuuacaucucccgcagacugcucggcaccuucaccuggacacugucugauagcgaaggcaaagacacgcccgggggauauugucugacccgguggaugcucauugaggccgagcugaagugcuuuggcaauacagcugucgccaaauguaacgaaaagcaugaugaggaguucugcgacaugcuucgccuguuugauuucaauaaacaggcuauccagagacucaagaccgaagcccagauguccauucaacugaucaacaaggcggugaaugcccuuaucaacgaccagcugauuaugaaaaaucaccuccgggauaucauggggauuccuuacugcaacuauagcaaguacuguuaccugaaucacacaaccacgggaaaaacaucucugcccaagugcugucucguguccaacggcagcuaucugaaugaaacccauuucucugacgacaucgagcagcaagcugauaacaugauuaccgagaugcuucagaaagaauacauggagcgccaggggaagacaccucugggacucgucgaccuguuuguuuucagcaccuccuuuuaucugaucucuaucuuccuucaccucgugaaaauuccgacacauagacacaucgugggcaagagcugccccaagccucaucggcugaaucacaugggcauuuguuccugcgggcuguacaaacagcccggagucccugugcgcuggaagagaugaggacuagucccuguucccagagcccacuuuuuuuucuuuuuuugaaauaaaauagccugucuuucagaucucaaaggcucuuuucagagccaccaaaaaaaaaaaaaaaaaaaaaaaaaaaaaaaaaaaaaaaaaaaaaaaaaaaaaaaaaaaaaaaaaaaaaaaaaaaaaaaaaaaaaaaaaaaaaaaaaaaaa

SEQ ID NO: 39006 - RNA, 1767 nt, Artificial Sequence
  mRNA product Design a-2 (hSL-A100) comprising derived and/or modified sequence from LASV(G502-SLE-2009;Clade IV)__AIT17126__GPCmut11 (opt5)
aggagaguccgcucagccagguugcagaagcggcuuagcguguguccuaaucuucucucugcguguagguaggccugugccgcaaacaagcuuaccaugggccagaucgugaccuucuuucaagaggucccccacguuauugaagaggugaugaacaucgugcugauugcccucagcauccuggcuguccuuaaggggcuguacaauuucgccacaugcggacucgugggccugcuuacguuucugcuccugugugggagauccugcaccacaggacuguauaaaggcguuuacgaacuccagacccuggagcuuaacauggaaacacugaauaugaccaugccucucucuuguacaaagaacaauagccaucacuauauuaugguggggaacgagaccggacuggagcuuacgcugaccaauacauccaucaucaaccauaaauucugcaaucucucugacgcgcacaagaaaaaccuguacgaucaugcucugaugagcauuaucuccaccuuucaccucucuauuccgaauuucaaccaguaugaagccaugagcugugacuuuaauggcggcaagaucuccguccaguacaaccugagccacucuuaugccggggaugcugccgaccauugcggaacaguggcuaauggcguucuucaaaccuucaugcggauggccuggggaggguccuacauugcgcuggauagcggccgcgggagaugggacuguaucaugacgucuuaccaguaucucauuauccagaacacaaccugggaggaucacugccaguuuucccggcccagcccuaucggauaccugggccuucugucucaacgcacaagagacauuuauaucucccggcgccuccugggcaccuucaccuggacacugagcgauuccgaagggaaggacacgcccggaggcuacugucucaccagauggaugcugauugaggccgagcuuaaaugcuuugggaacacagcuguggccaaguguaaugaaaaacaugaugaggaguucugcgacaugcugcggcucuuugauuucaacaagcaggcuauccagcgccugaaagccgaagcgcagaugucuauucaacuuaucaauaaggccgucaacgcucugaucaaugaccagcucgugaugaagaaccaccugagagacauuaugggaaucccuuauugcaauuacagccgguauuguuaccugaaccacaccacaaccggccgcacgucccuccccaaaugcugucuggugagcaaugggucuuaccuuaacgaaacacauuucuccgaugacauugagcagcaagccgauaauaugaucaccgagaugcugcagaaggaauauauggagagacagggaaaaaccccucucggccuggucgaccuguuuguuuucagcacaucuuuuuaccuuauuagcaucuuccuccaccuggugaagaucccgacccaucggcacauugugggcaaauccugccccaagccucaucgccugaaccacauggggaucuguucuugcggacucuauaaacagcccggcgucccugugaaguggaagagaugaggacuagucccuguucccagagcccacuuuuuuuucuuuuuuugaaauaaaauagccugucuuucagaucucaaaggcucuuuucagagccaccaaaaaaaaaaaaaaaaaaaaaaaaaaaaaaaaaaaaaaaaaaaaaaaaaaaaaaaaaaaaaaaaaaaaaaaaaaaaaaaaaaaaaaaaaaaaaaaaaaaaa

SEQ ID NO: 39007 - RNA, 1767 nt, Artificial Sequence
  mRNA product Design a-2 (hSL-A100) comprising derived and/or modified sequence from LASV(G733-SLE-2010;Clade IV)__AIT17154__GPCmut11 (opt5)
aggagaguccgcucagccagguugcagaagcggcuuagcguguguccuaaucuucucucugcguguagguaggccugugccgcaaacaagcuuaccaugggccagaucgugaccuucuuucaagaggucccccacguuauugaagaggugaugaacaucgugcugauugcccucagcauccuggcuguccuuaaggggcuguacaauuucgccacaugcggaauugugggccucguuuccuuucugcuucugugugggagaucuugcacgaccagccucuauaaaggaguguacgaacugcagacacuggagcucaacauggaaacccugaauaugacaaugccucuuuccuguaccaagaacaauucucaucacuauaucauggucggcaacgagacagggcuggagcucacccugacgaauaccagcaucauuaaccauaaauucugcaaucuuuccgacgcgcacaagaaaaaccuguacgaucaugcucucaugucuaucauuagcacauuucaccuguccaucccgaauuucaaccaguaugaagccaugagcugugacuuuaauggaggcaagauuucugugcaguacaaccugucccacagcuaugccggcgaugcugccaaucauugcgggaccaucgcuaacggaguucuccaaacauucaugcggauggccuggggcgggucuuacauugcgcuggacuccggacgcgauagaugggacuguaucaugaccagcuaccaguaucuuaucauucagaacacgacaugggaggaucacugccaguuuucucggcccuccccuaucggcuaccuggggcuccugagccaacgcaccagagacauuuauaucucccggcgccuucugggaacauucaccuggacccucucugauagcgaaggcaaggacacacccggcggguacugucugacgagauggaugcugauugaggccgagcucaaaugcuuuggaaauaccgcuguggccaaguguaacgaaaaacaugaugaggaguucugcgacaugcugcggcuuuuugauuucaauaagcaggcuauccagcgccugaaagccgaagcgcagauguccauccaacucauuaacaaggccgucaaugcucugaucaacgaccagcuuauuaugaagaaucaccugagagacaucaugggcauuccuuauugcaacuacagcaaauauuguuaccucaaucacacaaccacagggaagaccucucugcccaaaugcugucugguguccaacggaagcuaccucaaugaaacgcauuucucugaugacaucgagcagcaagccgauaacaugaucacagagaugcugcagaaggaauauauggagcggcagggcaaaaccccucuugggcugguggaccucuuugucuucagcaccuccuuuuaccugauuucuaucuuccugcaccuuguuaagauuccgacacaucgccacguggugggaaaaagcugccccaagccucauagacucaaucacaugggcaucuguuccugcggccuguaugggcagcccggagucccugugaaguggaaacggugaggacuagucccuguucccagagcccacuuuuuuuucuuuuuuugaaauaaaauagccugucuuucagaucucaaaggcucuuuucagagccaccaaaaaaaaaaaaaaaaaaaaaaaaaaaaaaaaaaaaaaaaaaaaaaaaaaaaaaaaaaaaaaaaaaaaaaaaaaaaaaaaaaaaaaaaaaaaaaaaaaaaa

SEQ ID NO: 39008 - RNA, 1767 nt, Artificial Sequence
  mRNA product Design a-2 (hSL-A100) comprising derived and/or modified sequence from MOPV/LASV reassortant(IGS-1;Clade IV)__AFY05576__GPCmut11 (opt5)
aggagaguccgcucagccagguugcagaagcggcuuagcguguguccuaaucuucucucugcguguagguaggccugugccgcaaacaagcuuaccaugggccagaucgugaccuucuuucaagaggucccccacguuauugaagaggugaugaacaucgugcugauugcccucagcguccuggcugugcuuaaggggcuguacaauuucgccacaugcggacucguuggccuggugacguuucuucugcucugugggagauccugcaccacaucucuguauaaaggagucuacgaacugcagacccucgagcugaacauggaaacacuuaauaugaccaugccucugagcuguacaaagaacaauucccaucacuauaucauggugggcaacgagaccgggcucgagcugacgcuuaccaauacaucuauuaucaaccauaaauucugcaaucugagcgacgcgcacaagaaaaaccucuacgaucaugcucugauguccaucauuucuaccuuucaccugagcaucccgaauuucaaccaguaugaagccauguccugugacuuuaauggaggcaagauuagcguucaguacaaccucucucacuccuaugccggcgaugcugccaaucauugcgggacaguggcuaacggaguccugcaaaccuucaugcggauggccuggggcgggagcuacaucgcgcuugacucuggacgcggcaacugggauuguauuaugacguccuaccaguaucugaucauucagaauacaaccugggaggaccacugccaguuuagcagacccucuccuaucggguaccucggacugcuuucccaacggacacgcgauaucuauauuagcagacggcugcucggcaccuucaccuggacacuguccgacucugaaggcgaggauacgcccgggggauacugucugacccgcuggaugcucaucgaggccgaacugaagugcuuuggcaacacagcuguggccaaauguaaugagaagcaugacgaagaguucugcgauaugcuuagacuguuugacuucaacaaacaggcuauucagcggcucaaggccgaagcgcagaugagcauccaacugauuaauaaagccgugaacgcucuuaucaaugaucagcugaucaugaagaaccaccuccgcgacauuauggggaucccuuauugcaauuacuccaaguauuguuaccugaaccacaccacaaccggaagaacgagccugcccaaaugcugucucgucucuaauggcuccuaccugaacgagacacauuucagcgacgauauugagcagcaagccgacaauaugaucaccgaaaugcuucagaaggaguauauggaacggcaggggaaaaccccucugggacucguugaucuguuuguguucucuaccagcuuuuaccugauuuccaucuuccuucaccucgugaagaucccgacacaucgccacauugucggcaaaucuugccccaagccucauagacugaaccacaugggcaucuguagcugcgggcuguauaaacagcccggagugccuguuaaguggaagcggugaggacuagucccuguucccagagcccacuuuuuuuucuuuuuuugaaauaaaauagccugucuuucagaucucaaaggcucuuuucagagccaccaaaaaaaaaaaaaaaaaaaaaaaaaaaaaaaaaaaaaaaaaaaaaaaaaaaaaaaaaaaaaaaaaaaaaaaaaaaaaaaaaaaaaaaaaaaaaaaaaaaaa

SEQ ID NO: 39009 - RNA, 1767 nt, Artificial Sequence
  mRNA product Design a-2 (hSL-A100) comprising derived and/or modified sequence from LASV(LM765-SLE-2012;Clade IV)__AIT17814__GPCmut11 (opt5)
aggagaguccgcucagccagguugcagaagcggcuuagcguguguccuaaucuucucucugcguguagguaggccugugccgcaaacaagcuuaccaugggccagaucgugaccuucuuucaagaggucccccacguuauugaagaggugaugaacaucgugcugauugcccucagcauccuggcuguccuuaaggggcuguacaauuucgccacaugcggacucgugggccugguuacguuucuucugcucugugggagauccugcaccacaucucuguauaaaggaguguacgaacugcagacccucgagcugaacauggaaacacuuaauaugaccaugccucugagcuguacaaagaacaauucccaucacuauauuauggucggcaacgagaccgggcucgagcugacgcuuaccaauacaucuaucaucgaccauaaauucugcaaccugagcgaugcgcaccggaagaaucucuacgaccaugcucugauguccauuaucucuaccuuucaccugagcauuccgaacuucaaucaguaugaagccauguccugugauuuuaacggaggcaaaaucagcgugcaguacaaucucucucacuccuaugccaaggacgcugccgaucauugcggcacaguugcuaacggggugcugcaaaccuucaugcgcauggccuggggaggcagcuacauugcgcuugacucugggagaggacggugggauuguaucaugacguccuaccaguaucugauuauccagaauacaaccugggaggaccacugccaguuuagccgccccucuccuaucggcuaccucgggcugcuuucccaaagaacacgggauauuuauaucagccgcagacugcucggaaccuucaccuggacacuguccgacucugaaggcaaggauacgcccggcggguacugucugacccgguggaugcucauugaggccgagcugaaaugcuuuggaaacacagcugucgccaaguguaacgaaaaacaugacgaggaguucugcgauaugcuucgccuguuugacuucaauaagcaggcuauccagagacucaaagccgaagcgcagaugagcauucaacugaucaacaaggccgugaaugcucuuaucaacgaccagcugauuaugaagaaucaccuccgggauaucaugggcauuccuuauugcaacuacuccaaauauuguuaccugaaucacaccacaaccgggaagacgagccugcccaaaugcugucucgugucuaacggauccuaccugaaugaaacacauuucagcgacgauaucgagcagcaagccgacaacaugauuaccgagaugcuucagaaggaauauauggagcgccagggcaaaaccccucuggggcucgucgaucuguuuguuuucucuaccagcuuuuaccugaucuccaucuuccuucaccucgugaagauuccgacacauagacacaucgugggaaaacccugcccuaagccccaucggcugaaucacaugggcauuuguucuugcggccuguauaagcagccugggguccccgugaaauggaagcgcugaggacuagucccuguucccagagcccacuuuuuuuucuuuuuuugaaauaaaauagccugucuuucagaucucaaaggcucuuuucagagccaccaaaaaaaaaaaaaaaaaaaaaaaaaaaaaaaaaaaaaaaaaaaaaaaaaaaaaaaaaaaaaaaaaaaaaaaaaaaaaaaaaaaaaaaaaaaaaaaaaaaaa

SEQ ID NO: 39010 - RNA, 1767 nt, Artificial Sequence
  mRNA product Design a-2 (hSL-A100) comprising derived and/or modified sequence from LASV(LM776-SLE-2012;Clade IV)__AIT17824__GPCmut11 (opt5)
aggagaguccgcucagccagguugcagaagcggcuuagcguguguccuaaucuucucucugcguguagguaggccugugccgcaaacaagcuuaccaugggccagaucgugaccuucuuucaagaggucccccacguuauugaagaggugaugaacaucgugcugauugcccucagcauccuggcuguccuuaaggggcuguacaauuucgccacaugcggacucgugggccugguuacguuucuucugcucugugggagauccugcaccacaucuguguauaaaggagucuacgaacugcagacccuggagcucaacauggaaacacugaauaugaccaugccucuuagcuguacaaagaacaauucccaucacuauauuauggugggcaacgagaccgggcuggagcucacgcugaccaauacaucuaucaucaaccauaaauucugcaaucuuagcgacgcgcacaagaaaaaccuguacgaucaugcucucauguccauuaucucuaccuuucaccugagcauuccgaauuucaaccaguaugaagccauguccugugacuuuaauggaggcaagaucagcguucaguacaaccugucucacuccuaugccggcgaugcugccaaucauugcgggacaguggcuaacggaguccuccaaaccuucaugcggauggccuggggcgggagcuacauugcgcuggacucuggacacggcaagugggauuguaucaugacguccuaccaguaucuuauuauccagaacacaaccugggaggaccauugccaguuuagccgccccucuccuaucggguaccugggacuccugucccaaagaacacgggauauuuauaucagccgcagacuucugggcaccuucaccuggacacucuccgacucugaaggcaaagauacgcccgggggauacugucugacccgguggaugcugauugaggccgagcucaagugcuuuggcaauacagcuguggccaaauguaacgaaaagcacgacgaggaguucugcgauaugcugcgccuuuuugacuucaauaaacaggcuauccagagacugaaggccgaagcgcagaugagcauucaacucaucaacaaggccgugaaugcucugaucaacgaucagcuuauuaugaaaaaucaucugcgggacaucauggggauuccuuauugcaacuacuccaaguauuguuaccucaaucacaccacaaccggaaaaacgagccugcccaagugcugucuggucucuaacggcuccuaccucaaugaaacacacuucagcgacgauaucgagcagcaagccgacaacaugauuaccgagaugcugcagaaagaauauauggagcgccaggggaagaccccucuuggacugguugaucucuuuguguucucuaccagcuuuuaccugaucuccaucuuccugcaucuugugaaaauuccgacacacagacauaucgucggcaagucuugccccaagccucaccggcucaaucacaugggcauuuguagcugcgggcuguauaaacagcccggagugccuguucgcuggaagagaugaggacuagucccuguucccagagcccacuuuuuuuucuuuuuuugaaauaaaauagccugucuuucagaucucaaaggcucuuuucagagccaccaaaaaaaaaaaaaaaaaaaaaaaaaaaaaaaaaaaaaaaaaaaaaaaaaaaaaaaaaaaaaaaaaaaaaaaaaaaaaaaaaaaaaaaaaaaaaaaaaaaaa

SEQ ID NO: 39011 - RNA, 1767 nt, Artificial Sequence
  mRNA product Design a-2 (hSL-A100) comprising derived and/or modified sequence from LASV(Mad39;Clade IV)__ANH09722__GPCmut11 (opt5)
aggagaguccgcucagccagguugcagaagcggcuuagcguguguccuaaucuucucucugcguguagguaggccugugccgcaaacaagcuuaccaugggccagaucgugaccuucuuucaagaggucccccacguuauugaagaggugaugaacaucgugcugauugcccucagcauccuggcuguccuuaaggggcuguacaauguggccacaugcggacucauuggccugguuacguuccuucugcucugugggagauccugcaccacaacccuguauaaaggaguguacgaacugcaggcgcucgagcugaacauggaaacacuuaauaugaccaugccucugucuuguacaaagaacaauagccaucacuauauccgggucggcaacgagaccgggcucgagcugacgcuuaccaauacaucccugaucaaccauaaauuuugcaaucucucugacgcucacaagaaaaaccuguacgaucaugcccugaugagcauuaucuccaccuuccaccucucuauuccgaauuuuaaccaguaugaagccaugagcugugacuucaaugauggaaagaucuccgugcaguacaaccugagccacacauaugcuggcgacaccgccaaucauugcggcacgguugcuaacggggugcuucaaacauuuaugcgcauggccuggggaggcucuuacauugcgcuggauuccgggagaggaggcugggacuguaucaugaccagcuaccaguaucucauuauccagaacacaaccugggaggaucacugccaguucucucggcccuccccuaucggguaccugggacuucugagccaacgcaccagagacauuuauaucucucggcgccuccugggcacauuuacguggacccuguccgauagcgaaggcaaggacacacccgggggauacugucucaccagauggaugcugauugaggccgagcuuaaaugcuucggcaauacagcugucgccaaguguaacgaaaaacaugaugaggaauuuugcgacaugcugcgccucuucgauuuuaauaagcaggcuauccagcggcugaaagccgaggcgcagauguccauucaacuuaucaacaaggccgugaaugcucugaucaacgaccagcucauuaugaagaaucaccugagagacaucauggggauuccuuauugcaacuacucuaaauauuguuaccugaaucacaccgugacgggaaagacaagccuccccaaaugcugucuggucuccaacggcagcuaccuuaaugaaacccauuucucugaugacaucgagcagcaagccgauaacaugauuaccgagaugcugcagaaggaauauauggagcggcaggggaaaacaccucucggacugguugaccuguucguguuuuccaccagcuucuaccuuaucucuaucuuucuccaccuggugaagauuccgacacaucgccacgucgugggcaaacccugcccuaagccccauagacugaaucacaugggcaucuguagcugcggguucuauaagcagccuggaguucccgugcgguggaaacgcugaggacuagucccuguucccagagcccacuuuuuuuucuuuuuuugaaauaaaauagccugucuuucagaucucaaaggcucuuuucagagccaccaaaaaaaaaaaaaaaaaaaaaaaaaaaaaaaaaaaaaaaaaaaaaaaaaaaaaaaaaaaaaaaaaaaaaaaaaaaaaaaaaaaaaaaaaaaaaaaaaaaaa

SEQ ID NO: 39012 - RNA, 1767 nt, Artificial Sequence
  mRNA product Design a-2 (hSL-A100) comprising derived and/or modified sequence from LASV(Z0947-SLE-2011;Clade IV)__AIT17840__GPCmut11 (opt5)
aggagaguccgcucagccagguugcagaagcggcuuagcguguguccuaaucuucucucugcguguagguaggccugugccgcaaacaagcuuaccaugggccagaucgugaccuucuuucaagaggucccccacguuauugaagaggugaugaacaucgugcugauugcccucagcauccuggcuguccuuaaggggcuguacaauuucgccacaugcggacucgugggccugguuacguuucuucugcucugugggagauccugcaccauuucucuguauaaaggaguguacgaacugcagacacucgagcugaacauggaaacccuuaauaugacaaugccucugagcuguaccaagaacaauucccaucacuauaucauggucggcaacgagacagggcucgagcugacccuuacgaauaccucuaucauuaaccauaaauucugcaaucugagcgacgcgcacaagaaaaaccucuacgaucaugcucugauguccaucauuucuacauuucaccugagcaucccgaauuucaaccaguaugaagccauguccugugacuuuaauggaggcaagauuagcgugcaguacaaccucucucacuccuaugccggcgaugcugccaaucauugcgggaccguugcuaacggagugcugcaaacauucaugcggauggccuggggcgggagcuacaucgcgcuugacucuggacgcgauagaugggacuguauuaugaccuccuaccaguaucugaucauccagaacacgacaugggaggaucacugccaguuuagccggcccucuccuauuggcuaccucgggcugcuuucccaacgcaccagagacaucuauauuagccggcgccugcucggaacauucaccuggacccuguccgauucugaaggcaaggacacacccggcggguacugucugacgagauggaugcucaucgaggccgagcugaaaugcuuuggaaauaccgcugucgccaaguguaacgaaaaacaugaugaggaguucugcgacaugcuucggcuguuugauuucaauaagcaggcuauucagcgccucaaagccgaagcgcagaugagcauccaacugaucaacaaggccgugaaugcucuuauuaacgaccagcugaucaugaagaaucaccucagagacauuaugggcaucccuuauugcaacuacuccaaauauuguuaccugaaucacacaaccacagggaagaccagccugcccaaaugcugucucgugucuaacggauccuaccugaaugaaacgcauuucagcgaugacauugagcagcaagccgauaacaugaucacagagaugcuucagaaggaauauauggagcggcagggcaaaaccccucuggggcucgucgaccuguuuguuuucucuaccagcuuuuaccugaucuccauuuuccuucaccucgugaagaucccgacacaucgccacauugugggaaaacccugcccuaagccccauagacugaaucacaugggcaucuguucuugcggccuguauaagcagccugggguccccgugaaauggaagcggugaggacuagucccuguucccagagcccacuuuuuuuucuuuuuuugaaauaaaauagccugucuuucagaucucaaaggcucuuuucagagccaccaaaaaaaaaaaaaaaaaaaaaaaaaaaaaaaaaaaaaaaaaaaaaaaaaaaaaaaaaaaaaaaaaaaaaaaaaaaaaaaaaaaaaaaaaaaaaaaaaaaaa

SEQ ID NO: 39013 - RNA, 1743 nt, Artificial Sequence
  mRNA product Design a-2 (A100) comprising derived and/or modified sequence from LASV(Josiah;Clade IV)__NP_694870__GPCmut11 (opt1)
aggagaguccgcucagccagguugcagaagcggcuuagcguguguccuaaucuucucucugcguguagguaggccugugccgcaaacaagcuuaccaugggccagaucgugaccuucuuccaggaggucccccacgugaucgaggaggugaugaacaucguccugaucgcccucagcgugcuggccgugcugaaggggcucuacaacuucgcgaccugcggccuggucgggcuggugacguuccuccugcugugcggccgcuccugcaccaccagccucuacaaggggguguacgagcugcagacccuggagcucaacauggagacgcugaacaugaccaugccgcuguccugcaccaagaacaacagccaccacuacaucauggucggcaacgagaccggccucgagcugacgcugaccaacaccuccaucaucaaccacaaguucugcaaccucagcgacgcccacaagaagaaccuguacgaccacgcccugauguccaucaucagcaccuuccaccucuccauccccaacuucaaccaguacgaggccaugagcugcgacuucaacgggggcaagaucuccgugcaguacaaccugagccacuccuacgccggggacgcggccaaccacugcggcacgguggccaacgggguccugcagaccuucaugcggauggccuggggcggcagcuacaucgcgcucgacuccgggcgcggcaacugggacugcaucaugaccagcuaccaguaccugaucauccagaacaccacgugggaggaccacugccaguucucccggcccagccccaucggguaccugggccuccugucccagcgcacccgggacaucuacaucagccgccggcugcucggcaccuucaccuggacgcugagcgacuccgaggggaaggacaccccgggcggguacugccugacccgcuggaugcucaucgaggccgagcugaagugcuucggcaacaccgccguggccaagugcaacgagaagcacgacgaggaguucugcgacaugcugcggcuguucgacuucaacaagcaggccauccagcgccugaaggcggaggcccagaugagcauccagcugaucaacaaggccgugaacgcccucaucaacgaccagcugaucaugaagaaccaccuccgggacaucauggggauccccuacugcaacuacuccaaguacugcuaccucaaccacacgaccaccggccgcaccagccugcccaagugcugccuggucuccaacggcagcuaccucaacgagacgcacuucuccgacgacaucgagcagcaggccgacaacaugaucaccgagaugcugcagaaggaguacauggagcggcaggggaagacgccccugggccucguggaccuguucguguucagcaccuccuucuaccugaucagcaucuuccugcaccucgucaagaucccgacccaccgccacaucguggggaaguccugccccaagccccaccggcugaaccacaugggcaucugcagcugcgggcuguacaagcagcccggcgugccggucaaguggaagcgcugaggacuagucccuguucccagagcccacuuuuuuuucuuuuuuugaaauaaaauagccugucuuucagaucuaaaaaaaaaaaaaaaaaaaaaaaaaaaaaaaaaaaaaaaaaaaaaaaaaaaaaaaaaaaaaaaaaaaaaaaaaaaaaaaaaaaaaaaaaaaaaaaaaaaa

SEQ ID NO: 39014 - RNA, 1740 nt, Artificial Sequence
  mRNA product Design a-2 (A100) comprising derived and/or modified sequence from LASV(LP;Clade I)__AAF86701__GPCmut11 (opt1)
aggagaguccgcucagccagguugcagaagcggcuuagcguguguccuaaucuucucucugcguguagguaggccugugccgcaaacaagcuuaccaugggccagaucaucaccuucuuccaggaggugccccacgucaucgaggaggugaugaacaucgugcugaucgcccucagccugcuggccauccucaaggggcuguacaacaucgcgaccugcggcaucaucgggcuggucgccuuccucuuccugugcggcaaguccugcagccugacgcucaagggcggguacgagcugcagacccuggagcucaacauggagacccugaacaugaccaugccgcuguccugcacgaagaacagcucccaccacuacauccgcgugggcaacgagaccgggcucgagcugacccugaccaacacgagcaucaucaaccacaaguucugcaaccucuccgacgcccacaagaagaaccuguacgaccacgcccugaugagcaucaucuccaccuuccaccucagcauccccaacuucaaccaguacgaggccauguccugcgacuucaacggcgggaagaucagcgugcaguacaaccugucccacagcuacgcgggcgacgccgccgagcacugcgggaccgucgccaacggcgugcugcagaccuucaugcggauggcguggggcgggcgcuacaucgcccucgacuccggcaaggggaacugggacugcaucaugacgagcuaccaguaccugaucauccagaacaccaccugggaggaccacugccaguucucccggcccagccccaucggcuaccugggccuccugucccagcgcacccgggacaucuacaucagccgccggcugcucgggacguucaccuggacccugagcgacuccgagggcaacgagacccccgggggcuacugccugacgcgcuggaugcucaucgaggccgagcugaagugcuucgggaacaccgccguggccaagugcaacgagaagcacgacgaggaguucugcgacaugcugcggcuguucgacuucaacaagcaggcgauccgccggcugaaggccgaggcccagaugagcauccagcugaucaacaaggccgucaacgcccucaucaacgaccagcugaucaugaagaaccaccuccgcgacaucaugggcauccccuacugcaacuacuccaaguacugcuaccucaaccacaccagcuccggccggaccagccugcccaagugcugccugaucuccaacgggagcuaccucaacgagacgcaguucuccgacgacaucgagcagcaggcggacaacaugaucaccgagaugcugcagaaggaguacaucgagcgccagggcaagaccccgcuggggcucguggacaucuucaucuucagcaccuccuucuaccugaucagcaucuuccugcaccugaucaagaucccgacgcaccggcacaucgugggcaagcccugccccaagccccaccgccucaaccacaugggggucugcuccugcggccuguacaagcacccgggcgugcccaccaaguggaagcggugaggacuagucccuguucccagagcccacuuuuuuuucuuuuuuugaaauaaaauagccugucuuucagaucuaaaaaaaaaaaaaaaaaaaaaaaaaaaaaaaaaaaaaaaaaaaaaaaaaaaaaaaaaaaaaaaaaaaaaaaaaaaaaaaaaaaaaaaaaaaaaaaaaaaa

SEQ ID NO: 39015 - RNA, 1740 nt, Artificial Sequence
  mRNA product Design a-2 (A100) comprising derived and/or modified sequence from LASV(803213;Clade II)__AAF86703__GPCmut11 (opt1)
aggagaguccgcucagccagguugcagaagcggcuuagcguguguccuaaucuucucucugcguguagguaggccugugccgcaaacaagcuuaccaugggccagaucaucaccuucuuccaggaggugccccacgucaucgaggaggugaugaacaucgugcugaucgcccucagccugcuggccauccucaaggggaucuacaacgucgcgaccugcggccuguucgggcugaucuccuuccuccugcugugcggccgcagcugcuccgugacguacaaggggguguacgagcuccagacccuggagcugaacauggccaaccucaacaugaccaugccgcugagcugcaccaagaacaacucccaccacuacaucauggucggcaacgagacgggccuggagcucacccugaccaacaccagcaucaucaaccacaaguucugcaaccuguccgacgcccacaagaagaaccucuacgaccacgcccugaugagcaucaucuccacguuccaccugagcauccccaacuucaaccaguacgaggccauguccugcgacuucaacgggggcaagaucagcgugcaguacaaccucucccacagcuucgcgguggacgccgccaaccacugcgggaccaucgccaacggcguccugcagaccuucaugcggauggcguggggcggguccuacaucgcccuggacagcggcaaggggaacugggacugcaucaugaccuccuaccaguaccucaucauccagaacacgaccugggaggaccacugccaguucagccgccccucccccaucggcuaccuggggcugcucagccagcggacccgcgacaucuacaucagccggcgccugcugggcaccuucacguggacccucuccgacagcgagggcaacgaggcccccgggggcuacugccugacccgguggaugcugaucgaggccgagcucaagugcuucgggaacaccgccguggcgaagugcaacgagaagcacgacgaggaguucugcgacaugcugcgccuguucgacuucaacaagcaggccaucaagcggcucaagacggaggcccagauguccauccagcugaucaacaaggccgugaacgcccugaucaacgaccagcucaucaugaagaaccaccuccgcgacaucaugggcauccccuacugcaacuacagccgguacugcuaccugaaccacaccgucaccgggaagaccucccugccccgcugcugccuggugagcaacggcuccuaccugaacgagacgcacuucagcgacgacaucgagcagcaggcggacaacaugaucaccgagaugcuccagaaggaguacauggaccggcagggcaagaccccgcuggggcugguggaccucuucgucuucuccaccagcuucuaccugaucuccaucuuccugcaccuggugaagaucccgacgcaccgccacaucgugggcaagcccugccccaagccccaccggcucaaccacauggggaucugcagcugcggccuguacaagcacccggggguccccgugaaguggaagcgcugaggacuagucccuguucccagagcccacuuuuuuuucuuuuuuugaaauaaaauagccugucuuucagaucuaaaaaaaaaaaaaaaaaaaaaaaaaaaaaaaaaaaaaaaaaaaaaaaaaaaaaaaaaaaaaaaaaaaaaaaaaaaaaaaaaaaaaaaaaaaaaaaaaaaa

SEQ ID NO: 39016 - RNA, 1740 nt, Artificial Sequence
  mRNA product Design a-2 (A100) comprising derived and/or modified sequence from LASV(GA391;Clade III)__CAA36645__GPCmut11 (opt1)
aggagaguccgcucagccagguugcagaagcggcuuagcguguguccuaaucuucucucugcguguagguaggccugugccgcaaacaagcuuaccaugggccagaucgugaccuucuuccaggaggucccccacgugaucgaggaggugaugaacaucguccugaucgcccucagcauccuggccauccugaaggggcucuacaacguggcgaccugcggccugaucgggcuggugacguuccuccugcuguccggccgcagcugcucccucaucuacaaggggaccuacgagcugcagacccuggagcucaacauggagacccugaacaugacgaugccgcugagcugcaccaagaacaacucccaccacuacauccgggucggcaacgagaccggccucgagcugacccugacgaacaccagcauccucaaccacaaguucugcaaccuguccgacgcccacaagcgcaaccuguacgaccacagccucauguccaucaucagcaccuuccaccuguccauccccaacuucaaccaguacgaggccaugagcugcgacuucaacgggggcaagaucaccgugcaguacaaccugucccacagcuucgccguggacgccgcggggcacugcggcacgcucgccaacgggguccugcagaccuucaugcggauggccuggggcggcuccuacaucgcccuggacagcgggcgcggcaacugggacugcaucaugaccuccuaccaguaccucaucauccagaacaccacgugggacgaccacugccaguucagccggcccucccccaucggguaccugggccugcucagccagcgcacccgggacaucuacaucagccgccggcugcugggcaccuucaccuggacgcucuccgacagcgaggggaacgagaccccgggcggguacugccugacccgcuggaugcugaucgaggcggagcucaagugcuucggcaacaccgccguggccaagugcaacgagaagcacgacgaggaguucugcgacaugcugcggcuguucgacuucaacaagcaggccauccgccggcucaagacggaggcccagauguccauccagcugaucaacaaggcggugaacgcccugaucaacgaccagcucaucaugaagaaccaccuccgcgacaucauggggauccccuacugcaacuacagccgguacugcuaccugaaccacaccuccaccggcaagaccagccugccccgcugcugccugaucuccaacggcagcuaccugaacgagacgaaguucuccgacgacaucgagcagcaggccgacaacaugaucaccgagaugcuccagaaggaguacaucgaccggcaggggaagacgccccugggccuggucgaccuguucguguucagcaccuccuucuaccucaucagcaucuuccugcaccuggugaagaucccgacccaccgccacaucgucgggaagcccugccccaagccccaccggcucaaccacaugggcaucugcuccugcgggcuguacaagcagccgggcgugcccgugcgcuggaagcggugaggacuagucccuguucccagagcccacuuuuuuuucuuuuuuugaaauaaaauagccugucuuucagaucuaaaaaaaaaaaaaaaaaaaaaaaaaaaaaaaaaaaaaaaaaaaaaaaaaaaaaaaaaaaaaaaaaaaaaaaaaaaaaaaaaaaaaaaaaaaaaaaaaaaa

SEQ ID NO: 39017 - RNA, 1743 nt, Artificial Sequence
  mRNA product Design a-2 (A100) comprising derived and/or modified sequence from LASV(AV;Clade V)__CCA30314__GPCmut11 (opt1)
aggagaguccgcucagccagguugcagaagcggcuuagcguguguccuaaucuucucucugcguguagguaggccugugccgcaaacaagcuuaccaugggccagaucgugaccuucuuccaggaggucccccacgugaucgaggaggugaugaacaucguccugaucgcccucagcauccuggccgugcugaaggggcucuacaacaucgcgaccugcggccugaucgggcugaucacguuccuccugcugugcggccgcuccugcagcuccaaccucuacaaggggguguacgagcugcagagccuggaccucaacauggagacccugaacaugaccaugccgcuguccugcaccaagaacaacagccaccacuacauccgggucggcaacgacacgggccucgagcugacccugaccaacaccuccauccucaaccacaaguucugcaaccugagcgacgcccacaagaaggaccuguacgaccacgcccucauguccaucaucagcacguuccaccuguccauccccaacuucaaccaguacgaggccaugagcugcgacuucaacgggggcaagaucuccgugcaguacaaccugagccacuccuacgccaucgacgcggccaaccacugcgggaccguggccaacggcauccuccagaccuucaugcgcauggccuggggcgggagcuacaucgcgcuggacuccggccgggggaacugggacugcaucaugaccagcuaccaguaccugaucauccagaacacgaccugggagaaccacugccaguucucccgccccagccccaucggcuaccucgggcugcugagccagcggacccgcgacaucuacaucucccggcgccuccugggcaccuucacguggacccugagcgacuccgagggcaacgccacccccgggggcuacugccucacccgguggaugcugaucgaggccgagcugaagugcuucgggaacacggccgucgccaagugcaacgagaagcacgacgaggaguucugcgacaugcuccgccuguucgacuucaacaagcaggcgaucagccggcugaaguccgaggcccagaugagcauccagcucaucaacaaggccgugaacgcccugaucaacgaccagcugaucaugaagaaccaccuccgcgacaucaugggcauccccuacugcaacuacuccaaguacugcuaccugaaccacaccaucaccgggaagaccagccugcccaagugcugccucguguccaacggcagcuaccugaacgagacgcacuucuccgacgacaucgagcagcaggccgacaacaugaucaccgagaugcugcagaaggaguacauggagcggcagggcaagaccccgcucgggcuggucgaccuguucguguucagcaccuccuucuaccugaucagcaucuuccuccgccuggugaagaucccgacgcaccggcacaucgucggcaagcccugccccaagccccaccgccugaaccacauggggaucugcuccugcggccucuacaagcagccgggggugcccgugcgguggaagcgcugaggacuagucccuguucccagagcccacuuuuuuuucuuuuuuugaaauaaaauagccugucuuucagaucuaaaaaaaaaaaaaaaaaaaaaaaaaaaaaaaaaaaaaaaaaaaaaaaaaaaaaaaaaaaaaaaaaaaaaaaaaaaaaaaaaaaaaaaaaaaaaaaaaaaa

SEQ ID NO: 39018 - RNA, 1740 nt, Artificial Sequence
  mRNA product Design a-2 (A100) comprising derived and/or modified sequence from LASV(Togo/2016/7082;Clade VI)__AMR44577__GPCmut11 (opt1)
aggagaguccgcucagccagguugcagaagcggcuuagcguguguccuaaucuucucucugcguguagguaggccugugccgcaaacaagcuuaccaugggccagaucaucaccuucuuccaggaggugccccacgucaucgaggaggugaugaacaucgugcugaucgcccucagccugcuggccauccucaagggggucuacaacguggcgaccugcggcaucaucgggcuggugacguuccuguuccucugcggccgcuccugcagccugaucuacaagggguccuacgagcugcagacccucgagcugaacauggagacccugaacaugaccaugccgcucagcugcacgaagaacuccagccaccacuacauccgggucggcaacgagaccggccuggagcugacccucaccaacacguccaucaucaaccacaaguucugcaaccugagcgacgcccacaagcgcaaccuguacgaccacgcccucauguccauccugagcaccuuccaccuguccauccccaacuucaaccaguacgaggccaugagcugcgacuucaacgggggcaagaucuccgugcaguacaaccucagccacgccuacgcgguggacgccgccgagcacugcgggaccgucgccaacggcgugcugcagaccuucaugcggauggcguggggcggguccuacaucgcccuggacagcggccgcgggaacugggacugcaucaugacguccuaccaguaccucaucauccagaacaccaccugggaggaccacugccaguucagccggcccucccccaucggcuaccuggggcugcucagccagcgcacccgggacaucuacaucagccgccggcugcugggcacguucaccuggacccucuccgacagcgagggcaacgagacccccgggggcuacugccugacgcgcuggaugcugaucgaggccgagcucaagugcuucgggaacaccgccguggccaagugcaacgagaagcacgacgaggaguucugcgacaugcugcggcuguucgacuucaacaagcaggcgauccagcgccucaaguccgaggcccagaugagcauccagcugaucaacaaggccgucaacgcccugaucaacgaccagcucaucaugaagaaccaccuccgggacaugaugggcauccccuacugcaacuacuccaaguacugcuaccugaaccacaccagcuccgggcgcaccagccugcccaagugcugccugguguccaacggcagcuaccugaacgagacgcacuucuccgacgacaucgagcagcaggccgacaacaugaucaccgagaugcuccagaaggaguacaucgaccggcagggcaagaccccgcuggggcugguggaccucuucgucuucagcaccuccuucuaccugaucagcaucuuccugcaccugaucaagaucccgacgcaccgccacaucgugggcaagcccugccccaagccccaccggcucaaccacauggggaucugcuccugcggccuguacaagcagccgggggugcccacccgcuggaagcggugaggacuagucccuguucccagagcccacuuuuuuuucuuuuuuugaaauaaaauagccugucuuucagaucuaaaaaaaaaaaaaaaaaaaaaaaaaaaaaaaaaaaaaaaaaaaaaaaaaaaaaaaaaaaaaaaaaaaaaaaaaaaaaaaaaaaaaaaaaaaaaaaaaaaa

SEQ ID NO: 39019 - RNA, 1740 nt, Artificial Sequence
  mRNA product Design a-2 (A100) comprising derived and/or modified sequence from LASV(KAK-428;Clade n.d. (VII))__ANH09740__GPCmut11 (opt1)
aggagaguccgcucagccagguugcagaagcggcuuagcguguguccuaaucuucucucugcguguagguaggccugugccgcaaacaagcuuaccaugggccagaucgugaccuucuuccaggaggucccccacgugaucgaggaggugaugaacaucguccugaucgcccucagccugcuggccauccucaaggggcuguacaacuucgcgaccugcggcgugaucgggcugaucacguuccuccugcugugcggccgcuccugcagcgccaccuacaaggggcaguacgagcuccagacccuggagcugaacauggagucccucaacaugaccaugccgcugagcugcacgaagaacaacucccaccacuacauccgggccggcaacaacaccggccuggagcucacccugaccaacacgagcaucaucucccacaaguucugcaaccugagcgacgcccacaagaagaaccucuacgaccacacccugauguccaucaucaccaccuuccaccugagcauccccaacuucaaccaguacgaggccauguccugcgacuucaacgggggcaagaucagcauccaguacaaccucucccacagcuacgcgggggacgccgcccagcacugcggcacgguggccaacgggguccugcagaccuucaugcgcauggcguggggcggcuccuaccuggcccucgacagcgggcggcgcggcugggacugcaucaucuccagcuaccaguaccugaucauccagaacaccaccugggacgaccacugccaguucucccggcccagccccaucggguaccugggcuucgugagccagaagacgcgcgacaucuacaucucccggcgccuccugggcaccuucaccuggacccugagcgacuccgaggggcacgacaugccgggcggguacugccucacgcgguggaugcugaucgaggccgaccugaagugcuucggcaacaccgccguggccaagugcaacgagaagcacgacgaggaguucugcgacauguggcgccucuucgacuucaacaagcaggcgauccagcggcugaaggccgaggcccagaugaacauccagcugaucaacaaggccgucaacgcccucaucaacgaccagcugaugaugaagaaccaccuccgcgacaucauggggauccccuacugcaacuacagcaaguucugcuaccugaacaacaccaccacgggccggaccucccugccccgcugcugccugaucagcaacggcuccuaccucaacgagacccacuucagcgacgacaucgagcagcaggcggacaacaugaucaccgagaugcugcagaaggaguacauggaccggcaggggaagacgccccugggccucguggaccuguucguguucuccaccagcuucuaccugaucaccaucuuccuccaccuggucaagaucccgacccaccgccacaucguggggaagcccugccccaagccccaccggcugaaccacaugggcaucugcuccugcgggcuguacaagcagccgggcgugcccguccgcuggaagcggugaggacuagucccuguucccagagcccacuuuuuuuucuuuuuuugaaauaaaauagccugucuuucagaucuaaaaaaaaaaaaaaaaaaaaaaaaaaaaaaaaaaaaaaaaaaaaaaaaaaaaaaaaaaaaaaaaaaaaaaaaaaaaaaaaaaaaaaaaaaaaaaaaaaaa

SEQ ID NO: 39020 - RNA, 1740 nt, Artificial Sequence; identical to SEQ ID NO: 39014
  mRNA product Design a-2 (A100) comprising derived and/or modified sequence from LASV(Pinneo-NIG-1969;Clade I)__AIT17836__GPCmut11 (opt1)

SEQ ID NO: 39021 - RNA, 1740 nt, Artificial Sequence
  mRNA product Design a-2 (A100) comprising derived and/or modified sequence from LASV(ISTH0009-NIG-2011;Clade II)__AIT17404__GPCmut11 (opt1)
aggagaguccgcucagccagguugcagaagcggcuuagcguguguccuaaucuucucucugcguguagguaggccugugccgcaaacaagcuuaccaugggccagaucaucaccuucuuccaggaggugccccacgucaucgaggaggugaugaacaucgugcugaucgcccucagccugcuggccauccucaaggggaucuacaacgucgcgaccugcggccuguucgggcugguguccuuccuccugcugugcggccgcagcugcuccacgaccuacaaggggguguacgagcuccagacccuggagcuggacauggccagccucaacaugaccaugccgcuguccugcacgaagaacaacagccaccacuacaucauggucggcaacgagaccggccuggagcucacccugaccaacacguccaucaucaaccacaaguucugcaaccugagcgacgcccacaagaagaaccucuacgaccacgcccugauguccaucaucagcaccuuccaccuguccauccccaacuucaaccaguacgaggccaugagcugcgacuucaacgggggcaagaucuccgugcaguacaaccucagccacgcguacgccguggacgccgccaaccacugcgggaccaucgcgaacggcguccugcagaccuucaugcggauggccuggggcggguccuacaucgcccuggacagcggcaagggguccugggacugcaucaugacgagcuaccaguaccucaucauccagaacaccaccugggaggaccacugccaguucucccgccccagccccaucggcuaccuggggcugcucagccagcggacccgcgacaucuacaucucccggcgccugcugggcacguucaccuggacccucagcgacuccgagggcaacgagacccccgggggcuacugccugacgcgguggaugcugaucgaggccgagcucaagugcuucgggaacaccgccguggcgaagugcaacgagaagcacgacgaggaguucugcgacaugcugcgccuguucgacuucaacaagcaggccauccggcgccucaagaccgaggcccagaugagcauccagcugaucaacaaggccgugaacgcccugaucaacgaccagcucaucaugaagaaccaccuccgggacaucaugggcaucccguacugcaacuacuccaaguacugcuaccugaaccacaccgucacggggaagaccagccugccccgcugcugccugguguccaacggcagcuaccugaacgagacccacuucuccgacgacaucgagcagcaggcggacaacaugaucaccgagcuccugcagaaggaguacauggaccggcagggcaagacgccccuggggcucguggaccuguucgucuucagcaccuccuucuaccugaucagcaucuuccugcaccucaucaagaucccgacccaccgccacaucaccggcaagcccugccccaagccccaccggcugaaccacauggggaucugcuccugcggccuguacaagcacccgggggugcccgugaaguggaagcgcugaggacuagucccuguucccagagcccacuuuuuuuucuuuuuuugaaauaaaauagccugucuuucagaucuaaaaaaaaaaaaaaaaaaaaaaaaaaaaaaaaaaaaaaaaaaaaaaaaaaaaaaaaaaaaaaaaaaaaaaaaaaaaaaaaaaaaaaaaaaaaaaaaaaaa

SEQ ID NO: 39022 - RNA, 1740 nt, Artificial Sequence
  mRNA product Design a-2 (A100) comprising derived and/or modified sequence from LASV(ISTH2010-NIG-2012;Clade II)__AIT17482__GPCmut11 (opt1)
aggagaguccgcucagccagguugcagaagcggcuuagcguguguccuaaucuucucucugcguguagguaggccugugccgcaaacaagcuuaccaugggccagaucaucaccuucuuccaggaggugccccacgucaucgaggaggugaugaacaucgugcugaucgcccucagccugcuggccauccucaaggggaucuacaacgucgcgaccugcggccuguucgggcugguguccuuccuccugcugugcggccgcagcugcuccacgaccuacaaggggguguacgagcuccagacccuggagcuggacauggccagccucaacaugaccaugccgcuguccugcacgaagaacaacagccaccacuacaucauggucggcaacgagaccggccuggagcucacccugaccaacacguccaucaucaaccacaaguucugcaaccugagcgacgcccacaagaagaaccucuacgaccacgcccugauguccaucaucagcaccuuccaccuguccauccccaacuucaaccaguacgaggccaugagcugcgacuucaacgggggcaagaucuccgugcaguacaaccucagccacgcguacgccguggacgccgccaaccacugcgggaccaucgcgaacggcguccugcagaccuucaugcggauggccuggggcggguccuacaucgcccuggacagcggcaagggguccugggacugcaucaugacgagcuaccaguaccucaucauccagaacaucaccugggaggaccacugccaguucucccgccccagccccaucggcuaccuggggcugcucagccagcggacccgcgacaucuacaucucccggcgccugcugggcaccuucacguggacccucagcgacuccgagggcaacgagacccccgggggcuacugccugacccgguggaugcugaucgaggccgagcucaagugcuucgggaacacggccguggcgaagugcaacgagaagcacgacgaggaguucugcgacaugcugcgccuguucgacuucaacaagcaggccauccggcgccucaagaccgaggcccagaugagcauccagcugaucaacaaggccgugaacgcccugaucaacgaccagcucaucaugaagaaccaccuccgggacaucaugggcauccccuacugcaacuacuccaaguacugcuaccugaaccacaccgucaccgggaagacgagccugccccgcugcugccugguguccaacggcagcuaccugaacgagacccacuucuccgacgacaucgagcagcaggcggacaacaugaucaccgagcuccugcagaaggaguacaucgaccggcagggcaagaccccgcuggggcucguggaccuguucgucuucagcacguccuucuaccugaucagcaucuuccugcaccucgugaagaucccgacccaccgccacguggucggcaagcccugccccaagccccaccggcugaaccacauggggaucugcuccugcggccuguacaagcacccgggggugcccgugaaguggaagcgcugaggacuagucccuguucccagagcccacuuuuuuuucuuuuuuugaaauaaaauagccugucuuucagaucuaaaaaaaaaaaaaaaaaaaaaaaaaaaaaaaaaaaaaaaaaaaaaaaaaaaaaaaaaaaaaaaaaaaaaaaaaaaaaaaaaaaaaaaaaaaaaaaaaaaa

SEQ ID NO: 39023 - RNA, 1740 nt, Artificial Sequence
  mRNA product Design a-2 (A100) comprising derived and/or modified sequence from LASV(Lassa virus/H.sapiens-wt/NGA/2015/ISTH_0543;Clade II)__AVO03639__GPCmut11 (opt1)
aggagaguccgcucagccagguugcagaagcggcuuagcguguguccuaaucuucucucugcguguagguaggccugugccgcaaacaagcuuaccaugggccagaucaucaccuucuuccaggaggugccccacgucaucgaggaggugaugaacaucgugcugaucgcccucagccugcuggccauccucaaggggaucuacaacgucgcgaccugcggccuguucgggcugguguccuuccuccugcugugcggccgcagcugcuccacgaccuacaaggggguguacgagcuccagacccuggagcuggacauggccaaccucaacaugaccaugccgcugagcugcacgaagaacaacucccaccacuacaucauggucggcaacgagaccggccuggagcucacccugaccaacacgagcaucaucaaccacaaguucugcaaccuguccgacgcccacaagaagaaccucuacgaccacgcccugaugagcaucaucuccaccuuccaccugagcauccccaacuucaaccaguacgaggccauguccugcgacuucaacgggggcaagaucagcgugcaguacaaccucucccacaccuacgcgguggacgccgccaaccacugcgggaccaucgccaacggcguccugcagacguucaugcggauggcguggggcgggagcuacaucgcccuggacuccggcaaggggagcugggacugcaucaugaccuccuaccaguaccucgugauccagaacaccaccugggaggaccacugccaguucagccgccccucccccaucggcuaccuggggcugcucagccagcggacgcgcgacaucuacaucagccggcgccugcugggcaccuucaccuggacccucuccgacagcgagggcaacgagacgcccgggggcuacugccugacccgguggaugcugaucgaggccgagcucaagugcuucgggaacaccgccguggccaagugcaacgagaagcacgacgaggaguucugcgacaugcugcgccuguucgacuucaacaagcaggcgauccggcgccucaagaccgaggcccagauguccauccagcugaucaacaaggccgucaacgcccugaucaacgaccagcucaucaugaagaaccaccuccgggacaucaugggcauccccuacugcaacuacagcaaguacugcuaccugaaccacacggugaccgggaagaccucccugccccgcugcugccuggugagcaacggcuccuaccugaacgagacccacuucagcgacgacaucgagcagcaggccgacaacaugaucacggagcuccugcagaaggaguacaucgaccggcagggcaagaccccgcuggggcucgucgaccuguucguguucuccaccagcuucuaccugaucuccaucuuccugcaccucgugaagaucccgacccaccgccacaucacgggcaagcccugccccaagccccaccggcugaaccacauggggaucugcagcugcggccuguacaagcacccggggguccccgugaaguggaagcgcugaggacuagucccuguucccagagcccacuuuuuuuucuuuuuuugaaauaaaauagccugucuuucagaucuaaaaaaaaaaaaaaaaaaaaaaaaaaaaaaaaaaaaaaaaaaaaaaaaaaaaaaaaaaaaaaaaaaaaaaaaaaaaaaaaaaaaaaaaaaaaaaaaaaaa

SEQ ID NO: 39024 - RNA, 1740 nt, Artificial Sequence
  mRNA product Design a-2 (A100) comprising derived and/or modified sequence from LASV(Lassa virus/H.sapiens-wt/NGA/2016/ISTH_0009;Clade II)__AVO03571__GPCmut11 (opt1)
aggagaguccgcucagccagguugcagaagcggcuuagcguguguccuaaucuucucucugcguguagguaggccugugccgcaaacaagcuuaccaugggccagaucaucaccuucuuccaggaggugccccacgucaucgaggaggugaugaacaucgugcugaucgcccucagccugcuggccauccucaaggggaucuacaacgucgcgaccugcggccugcuggggcucguguccuuccugcugcucugcggccgcagcugcuccacgaccuacaaggggguguacgagcugcagacccuggagcucgacauggccagccugaacaugaccaugccgcuguccugcacgaagaacaacagccaccacuacaucauggucggcaacgagaccggccucgagcugacccugaccaacacguccaucaucaaccacaaguucugcaaccucagcgacgcccacaagaagaaccuguacgaccacgcccugauguccaucaucagcaccuuccaccucuccauccccaacuucaaccaguacgaggccaugagcugcgacuucaacgggggccggaucuccgugcaguacaaccugagccacuccuacgcgguggacgccgccaaccacugcgggaccaucgccaacggcguccugcagaccuucaugcgcauggcguggggcgggagcuacaucgcccucgacuccggcaaggggagcugggacugcaucaugacguccuaccaguaccugaucauccagaacaccaccugggaggaccacugccaguucagccggcccagccccaucggcuaccuggggcuccugucccagcgcacccgggacaucuacaucagccgccggcugcucggcacguucaccuggacccuguccgacagcgagggcaacgagacccccgggggcuacugccugacgcgcuggaugcucaucgaggccgagcugaagugcuucgggaacaccgccguggccaagugcaacgagaagcacgacgaggaguucugcgacaugcugcggcuguucgacuucaacaagcaggcgauccgccggcugaagaccgaggcccagauguccauccagcugaucaacaaggccgugaacgcccucaucaacgaccagcugaucaugaagaaccaccuccgcgacaucaugggcaucccguacugcaacuacagcaaguacugcuaccucaaccacaccgucacggggaagaccucccugccccggugcugccuggugagcaacggcuccuaccucaacgagacccacuucagcgacgacaucgagcagcaggccgacaacaugaucaccgagcugcugcagaaggaguacaucgaccgccagggcaagacgccccucgggcugguggaccuguucgucuucuccaccagcuucuaccugaucuccaucuuccuccaccuggugaagaucccgacccaccggcacaucaccggcaagcccugccccaagccccaccgccugaaccacauggggaucugcagcugcggccucuacaaccacccgggggugcccgucaaguggaagcggugaggacuagucccuguucccagagcccacuuuuuuuucuuuuuuugaaauaaaauagccugucuuucagaucuaaaaaaaaaaaaaaaaaaaaaaaaaaaaaaaaaaaaaaaaaaaaaaaaaaaaaaaaaaaaaaaaaaaaaaaaaaaaaaaaaaaaaaaaaaaaaaaaaaaa

SEQ ID NO: 39025 - RNA, 1740 nt, Artificial Sequence
  mRNA product Design a-2 (A100) comprising derived and/or modified sequence from LASV(Lassa virus/H.sapiens-wt/NGA/2016/ISTH_0017;Clade II)__AVO03567__GPCmut11 (opt1)
aggagaguccgcucagccagguugcagaagcggcuuagcguguguccuaaucuucucucugcguguagguaggccugugccgcaaacaagcuuaccaugggccagaucaucaccuucuuccaggaggugccccacgucaucgaggaggugaugaacaucgugcugaucgcccucagccugcuggccauccucaaggggaucuacaacgucgcgaccugcggccuguucgggcugguguccuuccuccugcugugcggccgcagcugcuccacgaccuacaaggggguguacgagcuccagacccuggagcuggacauggccagccucaacaugaccaugccgcuguccugcacgaagaacaacagccaccacuacaucauggucggcaacgagaccggccuggagcucacccugaccaacacguccaucaucaaccacaaguucugcaaccugagcgacgcccacaagaagaaccucuacgaccacgcccugauguccaucaucagcaccuuccaccuguccauccccaacuucaaccaguacgaggccaugagcugcgacuucaacgggggcaagaucuccgugcaguacaaccucagccacaccuacgcgaucgacgccgccaaccacugcgggaccaucgccaacggcgugcugcagacguucaugcggauggcguggggcggguccuacaucgcccuggacagcggcaagggguccugggacugcaucaugaccagcuaccaguaccucaucauccagaacaccaccugggaggaccacugccaguucucccgccccagccccaucggcuaccuggggcugcucagccagcggacgcgcgacaucuacaucucccggcgccugcugggcaccuucaccuggacccucagcgacuccgagggcaacgagacgcccgggggcuacugccugacccgguggaugcugaucgaggccgagcucaagugcuucgggaacaccgccgucgccaagugcaacgagaagcacgacgaggaguucugcgacaugcugcgccuguucgacuucaacaagcaggcgauccggcgccucaagaccgaggcccagaugagcauccagcugaucaacaaggccgugaacgcccugaucaacgaccagcucaucaugaagaaccaccuccgggacaucaugggcauccccuacugcaacuacuccaaguacugcuaccugaaccacacggugaccgggaagaccagccugccccgcugcugccuggucuccaacggcagcuaccugaacgagacccacuucuccgacgacaucgagcagcaggccgacaacaugaucacggagcuccugcagaaggaguacauggaccggcagggcaagaccccgcuggggcucguggaccuguucguguucagcaccuccuucuaccugaucagcaucuuccugcaccucguccgcaucccgacccaccggcacgugaucggcaagcccugccccaagccccaccgccugaaccacauggggaucugcuccugcggccuguacaagcacccgggggugcccgucaaguggaagcggugaggacuagucccuguucccagagcccacuuuuuuuucuuuuuuugaaauaaaauagccugucuuucagaucuaaaaaaaaaaaaaaaaaaaaaaaaaaaaaaaaaaaaaaaaaaaaaaaaaaaaaaaaaaaaaaaaaaaaaaaaaaaaaaaaaaaaaaaaaaaaaaaaaaaa

SEQ ID NO: 39026 - RNA, 1740 nt, Artificial Sequence
  mRNA product Design a-2 (A100) comprising derived and/or modified sequence from LASV(Lassa virus/H.sapiens-wt/NGA/2018/ISTH_0959;Clade II)__AVV65099__GPCmut11 (opt1)
aggagaguccgcucagccagguugcagaagcggcuuagcguguguccuaaucuucucucugcguguagguaggccugugccgcaaacaagcuuaccaugggccagaucaucaccuucuuccaggaggugccccacgucaucgaggaggugaugaacaucgugcugaucgcccucagccugcuggccauccucaaggggaucuacaacgucgugaccugcggccuguucgggcugguguccuuccuccugcugugcggccgcagcugcuccacgaccuacaagggggucuacgagcuccagacccuggagcuggacauggcgagccucaacaugaccaugccgcuguccugcacgaagaacaacagccaccacuacaucauggugggcaacgagaccggccuggagcucacccugaccaacacguccaucaucaaccacaaguucugcaaccugagcgacgcccacaagaagaaccucuacgaccacgcccugauguccaucaucagcaccuuccaccuguccauccccaacuucaaccaguacgaggccaugagcugcgacuucaacgggggcaagaucuccgugcaguacaaccucagccacgccuacgcgaucgacgccgccaaccacugcgggaccaucgccaacggcguccugcagaccuucaugcggauggcguggggcggguccuacaucgcccuggacagcggcaagggguccugggacugcaucaugacgagcuaccaguaccucaucauccagaacaccaccugggaggaccacugccaguucucccgccccagccccaucggcuaccuggggcugcucagccagcggacccgcgacaucuacaucucccggcgccugcugggcacguucaccuggacccucagcgacuccgagggcaacgagacccccgggggcuacugccugacgcgguggaugcugaucgaggccgagcucaagugcuucgggaacaccgccguggccaagugcaacgagaagcacgacgaggaguucugcgacaugcugcgccuguucgacuucaacaagcaggcgauccggcgccucaagaccgaggcccagaugagcauccagcugaucaacaaggccgugaacgcccugaucaacgaccagcucaucaugaagaaccaccuccgggacaucaugggcaucccguacugcaacuacuccaaguacugcuaccugaaccacaccgucacggggaagaccagccugccccgcugcugccugguguccaacggcagcuaccugaacgagacccacuucuccgacgacaucgagcagcaggccgacaacaugaucaccgagcuccugcagaaggaguacaucgaccggcagggcaagacgccccuggggcucguggaccuguucgucuucagcaccuccuucuaccugaucagcaucuuccugcaccucgugaagaucccgacccaccgccacgugaucggcaagcccugccccaagccccaccggcugaaccacauggggaucugcuccugcggccuguacaagcacccggggguccccgugaaguggaagcgcugaggacuagucccuguucccagagcccacuuuuuuuucuuuuuuugaaauaaaauagccugucuuucagaucuaaaaaaaaaaaaaaaaaaaaaaaaaaaaaaaaaaaaaaaaaaaaaaaaaaaaaaaaaaaaaaaaaaaaaaaaaaaaaaaaaaaaaaaaaaaaaaaaaaaa

SEQ ID NO: 39027 - RNA, 1740 nt, Artificial Sequence
  mRNA product Design a-2 (A100) comprising derived and/or modified sequence from LASV(LASV003-NIG-2008;Clade II)__AIT17580__GPCmut11 (opt1)
aggagaguccgcucagccagguugcagaagcggcuuagcguguguccuaaucuucucucugcguguagguaggccugugccgcaaacaagcuuaccaugggccagaucaucaccuucuuccaggaggugccccacgucaucgaggaggugaugaacaucgugcugaucgcccucagccugcuggccauccucaaggggaucuacaacgucgcgaccugcggccuguucgggcugguguccuuccuccugcugugcggccgcagcugcuccacgaccuacaaggggguguacgagcuccagacccuggagcuggacauggccagccucaacaugaccaugccgcuguccugcacgaagaacaacagccaccacuacaucauggucggcaacgagaccggccuggagcucacccugaccaacacguccaucaucaaccacaaguucugcaaccugagcgacgcccacaagaagaaccucuacgaccacgcccugauguccaucaucagcaccuuccaccuguccauccccaacuucaaccaguacgaggccaugagcugcgacuucaacgggggcaagaucuccgugcaguacaaccucagccacaccuacgcgguggacgccgccaaccacugcgggaccaucgccaacggcguccugcagacguucaugcggauggcguggggcggguccuacaucgcccuggacagcggcaagggguccugggacugcaucaugaccagcuaccaguaccucaucauccagaacaccaccugggaggaccacugccaguucucccgccccagccccaucggcuaccuggggcugcucagccagcggacgcgcgacaucuacaucucccggcgccugcugggcaccuucaccuggacccucagcgacuccgagagcaacgagacgccgggcggguacugccugacccgguggaugcugaucgaggccgagcucaagugcuucggcaacaccgccguggccaagugcaacgagaagcacgacgaggaguucugcgacaugcugcgccuguucgacuucaacaagcaggcgauccggcgccucaaggccgaggcccagauguccauccagcugaucaacaaggccgugaacgcccugaucaacgaccagcucaucaugaagaaccaccuccgggacaucauggggauccccuacugcaacuacagcaaguacugcuaccugaaccacaccgucacgggccgcaccucccugccccggugcugccuggugagcaacggguccuaccugaacgagacccacuucagcgacgacaucgagcagcaggcggacaacaugaucaccgagcuccugcagaaggaguacauggaccgccagggcaagacgccccugggccucguggaccuguucgucuucuccaccagcuucuaccugaucuccaucuuccugcaccucgugaagaucccgacccaccggcacgugaucgggaagcccugccccaagccccaccgccugaaccacaugggcaucugcagcugcgggcuguacaagcacccgggcguccccgugaaguggaagcggugaggacuagucccuguucccagagcccacuuuuuuuucuuuuuuugaaauaaaauagccugucuuucagaucuaaaaaaaaaaaaaaaaaaaaaaaaaaaaaaaaaaaaaaaaaaaaaaaaaaaaaaaaaaaaaaaaaaaaaaaaaaaaaaaaaaaaaaaaaaaaaaaaaaaa

SEQ ID NO: 39028 - RNA, 1740 nt, Artificial Sequence
  mRNA product Design a-2 (A100) comprising derived and/or modified sequence from LASV(LASV035-NIG-2009;Clade II)__AIT17588__GPCmut11 (opt1)
aggagaguccgcucagccagguugcagaagcggcuuagcguguguccuaaucuucucucugcguguagguaggccugugccgcaaacaagcuuaccaugggccagaucaucaccuucuuccaggaggugccccacgucaucgaggaggugaugaacaucgugcugaucgcccucagccugcuggccauccucaaggggaucuacaacgucgcgaccugcggccuguucgggcugguguccuuccuccugcugugcggccgcagcugcuccacgaccuacaaggggguguacgagcuccagacccuggagcuggacauggccagccucaacaugaccaugccgcuguccugcacgaagaacaacagccaccacuacaucauggucggcaacgagaccggccuggagcucacccugaccaacacguccaucaucaaccacaaguucugcaaccugagcgacgcccacaagaagaaccucuacgaccacgcccugauguccaucaucagcaccuuccaccuguccauccccaacuucaaccaguacgaggccaugagcugcgacuucaacgggggcaagaucuccgugcaguacaaccucagccacgcguacgccguggacgccgccaaccacugcgggaccaucgcgaacggcguccugcagaccuucaugcggauggccuggggcggguccuacaucgcccuggacagcggcaagggguccugggacugcaucaugacgagcuaccaguaccucaucauccagaacaccaccugggaggaccacugccaguucucccgccccagccccaucggcuaccuggggcugcucagccagcggacccgcgacaucuacaucucccggcgccugcugggcacguucaccuggacccucagcgacuccgagggcaacgagacccccgggggcuacugccugacgcgguggaugcugaucgaggccgagcucaagugcuucgggaacaccgccguggcgaagugcaacgagaagcacgacgaggaguucugcgacaugcugcgccuguucgacuucaacaagcaggccauccggcgccucaaggccgaggcccagaugagcauccagcugaucaacaaggccgugaacgcgcugaucaacgaccagcucaucaugaagaaccaccuccgggacaucaugggcauccccuacugcaacuacuccaaguacugcuaccugaaccacaccgucaccgggaagacgagccugccccgcugcugccugguguccaacggcagcuaccugaacgagacccacuucuccgacgacaucgagcagcaggccgacaacaugaucaccgagcuccugcagaaggaguacaucgaccggcagggcaagaccccgcuggggcucguggaccuguucgucuucagcacguccuucuaccugaucagcaucuuccugcaccucgugaagaucccgacccaccgccacgugaucggcaagcccugccccaagccccaccggcugaaccacauggggaucugcuccugcggccuguacaagcacccggggguccccgugaaguggaagcgcugaggacuagucccuguucccagagcccacuuuuuuuucuuuuuuugaaauaaaauagccugucuuucagaucuaaaaaaaaaaaaaaaaaaaaaaaaaaaaaaaaaaaaaaaaaaaaaaaaaaaaaaaaaaaaaaaaaaaaaaaaaaaaaaaaaaaaaaaaaaaaaaaaaaaa

SEQ ID NO: 39029 - RNA, 1740 nt, Artificial Sequence
  mRNA product Design a-2 (A100) comprising derived and/or modified sequence from LASV(LASV1000-NIG-2009;Clade II)__AIT17782__GPCmut11 (opt1)
aggagaguccgcucagccagguugcagaagcggcuuagcguguguccuaaucuucucucugcguguagguaggccugugccgcaaacaagcuuaccaugggccagaucaucaccuucuuccaggaggugccccacgucaucgaggaggugaugaacaucgugcugaucgcccucagccugcuggccauccucaaggggaucuacaacgucgcgaccugcggccuguucgggcugguguccuuccuccugcugugcggccgcagcugcuccacgaccuacaaggggguguacgagcuccagacccuggagcuggacauggccagccucaacaugaccaugccgcuguccugcacgaagaacaacagccaccacuacaucauggucggcaacgagaccggccuggagcucacccugaccaacacguccaucaucaaccacaaguucugcaaccugagcgacgcccacaagaagaaccucuacgaccacgcccugauguccaucaucagcaccuuccaccuguccauccccaacuucaaccaguacgaggccaugagcugcgacuucaacgggggcaagaucuccgugcaguacaaccucagccacaccuacgcgguggacgccgccaaccacugcgggaccaucgccaacggcguccugcagacguucaugcggauggcguggggcggguccuacaucgcccuggacagcggcaagggguccugggacugcaucaugaccagcuaccaguaccucaucauccagaacaccaccugggaggaccacugccaguucucccgccccagccccaucggcuaccuggggcugcucagccagcggacgcgcgacaucuacaucucccggcgccugcugggcaccuucaccuggacccucagcgacuccgagggcaacgagacgcccgggggcuacugccugacccgguggaugcugaucgaggccgagcucaagugcuucgggaacaccgccguggccaagugcaacgagaagcacgacgaggaguucugcgacaugcugcgccuguucgacuucaacaagcaggcgaucaagcggcucaagaccgaggcccagaugagcauccagcugaucaacaaggccgugaacgcccugaucaacgaccagcucaucaugaagaaccaccuccgcgacaucaugggcauccccuacugcaacuacuccaaguacugcuaccugaaccacacggucaccgggaagaccagccugccccggugcugccugguguccaacggcagcuaccugaacgagacccacuucuccgacgacaucgagcagcaggccgacaacaugaucacggagcuccugcagaaggaguacaucgaccgccagggcaagaccccgcuggggcucguggaccuguucgucuucagcaccuccuucuaccugaucagcaucuuccugcaccucgugaagaucccgacccaccggcacguggucggcaagcccugccccaagccccaccgccugaaccacauggggaucugcuccugcggccuguacaagcacccgggggugcccgugaaguggaagcggugaggacuagucccuguucccagagcccacuuuuuuuucuuuuuuugaaauaaaauagccugucuuucagaucuaaaaaaaaaaaaaaaaaaaaaaaaaaaaaaaaaaaaaaaaaaaaaaaaaaaaaaaaaaaaaaaaaaaaaaaaaaaaaaaaaaaaaaaaaaaaaaaaaaaa

SEQ ID NO: 39030 - RNA, 1740 nt, Artificial Sequence
  mRNA product Design a-2 (A100) comprising derived and/or modified sequence from LASV(LASV221-NIG-2010;Clade II)__AIT17624__GPCmut11 (opt1)
aggagaguccgcucagccagguugcagaagcggcuuagcguguguccuaaucuucucucugcguguagguaggccugugccgcaaacaagcuuaccaugggccagaucaucaccuucuuccaggaggugccccacgucaucgaggaggugaugaacaucgugcugaucgcccucagccugcuggccauccucaaggggaucuacaacgucgcgaccugcggccuguucgggcugguguccuuccuccugcugugcggccgcagcugcuccacgaccuacaaggggguguacgagcuccagacccuggagcuggacauggccagccucaacaugaccaugccgcuguccugcacgaagaacaacagccaccacuacaucauggucggcaacgagaccggccuggagcucacccugaccaacacguccaucaucaaccacaaguucugcaaccugagcgacgcccacaagaagaaccucuacgaccacgcccugauguccaucaucagcaccuuccaccuguccauccccaacuucaaccaguacgaggccaugagcugcgacuucaacgggggcaagaucuccgugcaguacaaccucagccacaccuacgcgaucgacgccgccaaccacugcgggaccaucgccaacggcgugcugcagacguucaugcggauggcguggggcggguccuacaucgcccuggacagcggcaagggguccugggacugcaucaugaccagcuaccaguaccucaucauccagaacaccaccugggaggaccacugccaguucucccgccccagccccaucggcuaccuggggcugcucagccagcggacgcgcgacaucuacaucucccggcgccugcugggcaccuucaccuggacccucagcgacuccgagggcaacgagacgcccgggggcuacugccugacccgguggaugcugaucgaggccgagcucaagugcuucgggaacaccgccgucgccaagugcaacgagaagcacgacgaggaguucugcgacaugcugcgccuguucgacuucaacaagcaggcgauccggcgccucaagaccgaggcccagaugagcauccagcugaucaacaaggccgugaacgcccugaucaacgaccagcucaucaugaagaaccaccuccgggacaucaugggcauccccuacugcaacuacuccaaguacugcuaccugaaccacacggugaccgggaagaccagccugccccgcugcugccuggucuccaacggcagcuaccugaacgagacccacuucuccgacgacaucgagcagcaggccgacaacaugaucacggagaugcuccagaaggaguacauggaccggcagggcaagaccccgcuggggcugguggaccucuucguguucagcaccuccuucuaccugaucagcaucuuccugcaccuggucaagaucccgacccaccgccacgugaucggcaagcccugccccaagccccaccggcucaaccacauggggaucugcuccugcggccuguacaagcacccgggggugcccgucaaguggaagcgcugaggacuagucccuguucccagagcccacuuuuuuuucuuuuuuugaaauaaaauagccugucuuucagaucuaaaaaaaaaaaaaaaaaaaaaaaaaaaaaaaaaaaaaaaaaaaaaaaaaaaaaaaaaaaaaaaaaaaaaaaaaaaaaaaaaaaaaaaaaaaaaaaaaaaa

SEQ ID NO: 39031 - RNA, 1740 nt, Artificial Sequence
  mRNA product Design a-2 (A100) comprising derived and/or modified sequence from LASV(LASV237-NIG-2010;Clade II)__AIT17638__GPCmut11 (opt1)
aggagaguccgcucagccagguugcagaagcggcuuagcguguguccuaaucuucucucugcguguagguaggccugugccgcaaacaagcuuaccaugggccagaucaucaccuucuuccaggaggugccccacgucaucgaggaggugaugaacaucgugcugaucgcccucagccugcuggccauccucaaggggaucuacaacgucgcgaccugcggccuguucgggcugguguccuuccuccugcugugcggccgcagcugcuccacgaccuacaaggggguguacgagcuccagacccuggagcuggacauggccagccucaacaugaccaugccgcuguccugcacgaagaacaacagccaccacuacaucauggucggcaacgagaccggccuggagcucacccugaccaacacguccaucaucaaccacaaguucugcaaccugagcgacgcccacaagaaggaccucuacgaccacgcccugauguccaucaucagcaccuuccaccuguccauccccaacuucaaccaguacgaggccaugagcugcgacuucaacgggggcaagaucuccgugcaguacaaccucagccacaccuacgcgguggacgccgccaaccacugcgggaccaucgccaacggcguccugcagacguucaugcggauggcguggggcggguccuacaucgcccuggacagcggcaagggguccugggacugcaucaugaccagcuaccaguaccucaucauccagaacaccaccugggaggaccacugccaguucucccgccccagccccaucggcuaccuggggcugcucagccagcggacgcgcgacaucuacaucucccggcgccugcugggcaccuucaccuggacccucagcgacuccgagggcaacgagacgcccgggggcuacugccugacccgguggaugcugaucgaggccgagcucaagugcuucgggaacaccgccguggccaagugcaacgagaagcacgacgaggaguucugcgacaugcugcgccuguucgacuucaacaagcaggcgauccggcgccucaagaccgaggcccagaugagcauccagcugaucaacaaggccgugaacgcccugaucaacgaccagcucaucaugaagaaccaccuccgggacaucaugggcauccccuacugcaacuacuccaaguacugcuaccugaaccacacggucaccgggaagaccagccugccccgcugcugccugguguccaacggcagcuaccugaacgagacccacuucuccgacgacaucgagcagcaggccgacaacaugaucacggagcuccugcagaaggaguacauggaccggcagggcaagaccccgcuggggcucguggaccuguucgucuucagcaccuccuucuaccugaucagcaucuuccugcaccucaucaagaucccgacccaccgccacaucacgggcaagcccugccccaagccccaccggcugaaccacauggggaucugcuccugcggccuguacaagcacccgggggugcccgugaaguggaagcgcugaggacuagucccuguucccagagcccacuuuuuuuucuuuuuuugaaauaaaauagccugucuuucagaucuaaaaaaaaaaaaaaaaaaaaaaaaaaaaaaaaaaaaaaaaaaaaaaaaaaaaaaaaaaaaaaaaaaaaaaaaaaaaaaaaaaaaaaaaaaaaaaaaaaaa

SEQ ID NO: 39032 - RNA, 1740 nt, Artificial Sequence
  mRNA product Design a-2 (A100) comprising derived and/or modified sequence from LASV(LASV253-NIG-2011;Clade II)__AIT17670__GPCmut11 (opt1)
aggagaguccgcucagccagguugcagaagcggcuuagcguguguccuaaucuucucucugcguguagguaggccugugccgcaaacaagcuuaccaugggccagaucaucaccuucuuccaggaggugccccacgucaucgaggaggugaugaacaucgugcugaucgcccucagccugcuggccauccucaaggggaucuacaacgucgcgaccugcggccuguucgggcugguguccuuccuccugcugugcggccgcagcugcuccacgaccuacaaggggguguacgagcuccagacccuggagcuggacauggccagccucaacaugaccaugccgcuguccugcacgaagaacaacagccaccacuacaucauggucggcaacgagaccggccuggagcucacccugaccaacacguccaucaucaaccacaaguucugcaaccugagcgacgcccacaagaagaaccucuacgaccacgcccugauguccaucaucagcaccuuccaccuguccauccccaacuucaaccaguacgaggccaugagcugcgacuucaacgggggcaagaucuccgugcaguacaaccucagccacaccuacgcgguggacgccgccaaccacugcgggaccaucgccaacggcguccugcagacguucaugcggauggcguggggcggguccuacaucgcccuggacagcggcaagggguccugggacugcaucaugaccagcuaccaguaccucaucauccagaacaccaccugggaggaccacugccaguucucccgccccagccccaucggcuaccuggggcugcucagccagcggacgcgcgacaucuacaucucccggcgccugcugggcaccuucaccuggacccucagcgacuccgagggcaacgagacgcccgggggcuacugccugacccgguggaugcugaucgaggccgagcucaagugcuucgggaacaccgccguggccaagugcaacgagaagcacgacgaggaguucugcgacaugcugcgccuguucgacuucaacaagcaggcgauccggcgccucaaggccgaggcccagaugagcauccagcugaucaacaaggccgugaacgcccugaucaacgaccagcucaucaugaagaaccaccuccgggacaucaugggcaucccguacugcaacuacuccaaguacugcuaccugaaccacaccgucacggggcgcaccagccugccccggugcugccugguguccaacggcagcuaccugaacgagacccacuucuccgacgacaucgagcagcaggcggacaacaugaucaccgagcuccugcagaaggaguacaucgaccgccagggcaagacgccccuggggcucguggaccuguucgucuucagcaccuccuucuaccugaucagcaucuuccugcaccucgugaagaucccgacccaccggcacaucaucggcaagcccugccccaagccccaccgccugaaccacauggggaucugcuccugcggccuguacaagcacccgggggugcccgucaaguggaagcggugaggacuagucccuguucccagagcccacuuuuuuuucuuuuuuugaaauaaaauagccugucuuucagaucuaaaaaaaaaaaaaaaaaaaaaaaaaaaaaaaaaaaaaaaaaaaaaaaaaaaaaaaaaaaaaaaaaaaaaaaaaaaaaaaaaaaaaaaaaaaaaaaaaaaa

SEQ ID NO: 39033 - RNA, 1740 nt, Artificial Sequence
  mRNA product Design a-2 (A100) comprising derived and/or modified sequence from LASV(LASV254-NIG-2011;Clade II)__AIT17674__GPCmut11 (opt1)
aggagaguccgcucagccagguugcagaagcggcuuagcguguguccuaaucuucucucugcguguagguaggccugugccgcaaacaagcuuaccaugggccagaucaucaccuucuuccaggaggugccccacgucaucgaggaggugaugaacaucgugcugaucgcccucagccugcuggccauccucaaggggaucuacaacgucgcgaccugcggccuguucgggcugguguccuuccuccugcugugcggccgcagcugcuccacgaccuacaaggggguguacgagcuccagacccuggagcuggacaugaccaaccucaacaugacgaugccgcugagcugcaccaagaacaacucccaccacuacaucauggucggcaacgagaccggccuggagcucacccugacgaacaccagcaucaucaaccacaaguucugcaaccuguccgacgcccacaagaagaaccucuacaaccacgcccugaugagcaucaucuccaccuuccaccugagcauccccaacuucaaccaguacgaggccauguccugcgacuucaacgggggcaagaucagcgugcaguacaaccucucccacagcuacgccguggacgcggccaaccacugcgggaccaucgccaacggcguccugcagacguucaugcggauggccuggggcggguccuacaucgcgcuggacagcggcaaggggaacugggacugcaucaugaccuccuaccaguaccucaucauccagaacaccaccugggaggaccacugccaguucagccgccccucccccaucggcuaccuggggcugcucagccagcggacgcgcgacaucuacaucagccggcgccugcugggcaccuucaccuggacccucuccgacagcgagggcaacgagacgcccgggggcuacugccugacccgguggaugcugaucgaggccgagcucaagugcuucgggaacaccgccguggccaagugcaacgagaagcacgacgaggaguucugcgacaugcugcgccuguucgacuucaacaagcaggccauccggcgccucaagaccgaggcgcaggccaacauccagcugaucaacaaggccgugaacgcccugaucaacgaccagcucaucaugaagaaccaccuccgggacaucaugggcauccccuacugcaacuacuccaaguacugcuaccugaaccacacggucaccgggaagaccagccugccccgcugcugccugguguccaacggcagcuaccugaacgagacccacuucuccgacgacaucgagcagcaggccgacaacaugaucacggagcuccugcagaaggaguacauggaccggcagggcaagaccccgcuggggcucguggaccuguucgucuucagcaccuccuucuaccugaucagcaucuuccugcaccucgugaagaucccgacccaccgccacgugaucggcaagcccugccccaagccccaccggcugaaccacauggggaucugcuccugcggccuguacaagcacccggggguccccgugaaguggaagcgcugaggacuagucccuguucccagagcccacuuuuuuuucuuuuuuugaaauaaaauagccugucuuucagaucuaaaaaaaaaaaaaaaaaaaaaaaaaaaaaaaaaaaaaaaaaaaaaaaaaaaaaaaaaaaaaaaaaaaaaaaaaaaaaaaaaaaaaaaaaaaaaaaaaaaa

SEQ ID NO: 39034 - RNA, 1740 nt, Artificial Sequence
  mRNA product Design a-2 (A100) comprising derived and/or modified sequence from LASV(Nig08-A19;Clade III)__ADU56618__GPCmut11 (opt1)
aggagaguccgcucagccagguugcagaagcggcuuagcguguguccuaaucuucucucugcguguagguaggccugugccgcaaacaagcuuaccaugggccagaucgugaccuucuuccaggaggucccccacgugaucgaggaggugaugaacaucguccugaucgcccucagcauccuggccauccugaaggggcucuacaacaucgcgaccugcggccugaucgggcuggugacguuccuccugcuguccggccgcagcugcuccaugaccuacaaggggguguacgagcuccagacccuggagcugaacaugaacacccucaacaugacgaugccgcugagcugcaccaagaacaacucccaccacuacaucauggucggcaacgagaccggccuggagcucacccugacgaacaccagccugcuccaccacaaguucugcaaccuguccgacgcccacaagaagaaccuguacgaccacacccucaugagcaucaucuccaccuuccaccugagcauccccaacuucaaccaguacgaggccauguccugcgacuucaacgggggcaagaucacggugcaguacaaccugagccacuccuacgccaucgacgccgcgaaccacugcgggaccguggccaacggcguccuccagaccuucaugcggauggccuggggcgggagcuacaucgcccuggacuccggccgcgggaagugggacugcaucaugaccagcuaccaguaccugaucauccagaacacgaccugggaggaccacugccaguucucccggcccagccccaucggcuaccucgggcugcugucccagcgcacccgggacaucuacaucagccgccggcuccugggcaccuucacguggacccugagcgacuccgagggcaacgagacccccgggggcuacugccucacccgcuggaugcugaucgaggcggagcugaagugcuucgggaacacggccguggccaagugcaacgagaagcacgacgaggaguucugcgacaugcuccggcuguucgacuucaacaagcaggccauccgccggcugaaggccgaggcgcagaugagcauccagcucaucaacaaggccgugaacgcccugaucaacgaccagcugaucaugaagaaccaccuccgcgacaucaugggcauccccuacugcaacuacuccaaguacugcuaccugaaccacaccagcaccgggcggaccucccugccccgcugcugccucgucagcaacggcuccuaccugaacgagacgcacuucagcgacgacaucgagcagcaggccgacaacaugaucaccgagaugcugcagaaggaguaccucgaccggcagggcaagaccccgcuggggcugguggaccuguucguguucuccaccagcuucuaccucaucuccaucuuccugcaccuggucaagaucccgacgcaccgccacaucgugggcaagcccugccccaagccccaccggcucaaccacauggggaucugcagcugcggccuguacaagcagccgggggugcccguccgcuggaagcggugaggacuagucccuguucccagagcccacuuuuuuuucuuuuuuugaaauaaaauagccugucuuucagaucuaaaaaaaaaaaaaaaaaaaaaaaaaaaaaaaaaaaaaaaaaaaaaaaaaaaaaaaaaaaaaaaaaaaaaaaaaaaaaaaaaaaaaaaaaaaaaaaaaaaa

SEQ ID NO: 39035 - RNA, 1743 nt, Artificial Sequence
  mRNA product Design a-2 (A100) comprising derived and/or modified sequence from LASV(G1180-SLE-2010;Clade IV)__AIT17168__GPCmut11 (opt1)
aggagaguccgcucagccagguugcagaagcggcuuagcguguguccuaaucuucucucugcguguagguaggccugugccgcaaacaagcuuaccaugggccagaucgugaccuucuuccaggaggucccccacgugaucgaggaggugaugaacaucguccugaucgcccucagcauccuggccgugcugaaggggcucuacaacuucgcgaccugcggccugguggggcugcucaccuuccugcugcucugcggccgcuccugcaccgccagccgguacaagggggucuacgagcugcagacccuggagcucaacauggagacccugaacaugacgaugccgcuguccugcaccaagaacaacagccaccacuacaucauggugggcaacgagaccggccucgagcugacccugacgaacaccuccaucaucaaccacaaguucugcaaccucagcgacgcccacaagaagaaccuguacgaccacgcccugauguccaucaucagcaccuuccaccucuccauccccaacuucaaccaguacgaggccaugagcugcgacuucaacgggggcaagaucuccgugcaguacaaccugagccacuccuacgcgggggacgccgccaaccacugcggcaccgucgccaacggggugcugcagacguucaugcgcauggcguggggcggcagcuacaucgcccucgacuccgggcacggcagcugggacugcaucaugaccuccuaccaguaccugaucauccagaacaccaccugggaggaccacugccaguucagccggcccucccccaucggguaccugggccuccugagccagcgcacgcgggacaucuacaucagccgccggcugcucggcaccuucaccuggacccuguccgacagcgaggggaaggacacgccgggcggguacugccugacccgcuggaugcucaucgaggccgagcugaagugcuucggcaacaccgccguggccaagugcaacgagaagcacgacgaggaguucugcgacaugcugcggcuguucgacuucaacaagcaggcgauccagcgccugaaggccgaggcccagauguccauccagcugaucaacaaggccgucaacgcccucaucaacgaccagcugaucaugaagaaccaccuccgggacaucauggggauccccuacugcaacuacagcaaguacugcuaccucaaccacaccacgaccggcaagaccucccugcccaagugcugccuggugagcaacggcuccuaccucaacgagacccacuucagcgacgacaucgagcagcaggcggacaacaugaucacggagaugcugcagaaggaguacauggagcgccaggggaagacgccccugggccucguggaccuguucgucuucuccaccagcuucuaccugaucuccaucuuccugcaccucgugaagaucccgacccaccggcacaucgugggcaagagcugccccaagccccaccgccugaaccacauggggaucugcuccugcgggcuguacaagcagcccggcgucccggugaaguggaagcggugaggacuagucccuguucccagagcccacuuuuuuuucuuuuuuugaaauaaaauagccugucuuucagaucuaaaaaaaaaaaaaaaaaaaaaaaaaaaaaaaaaaaaaaaaaaaaaaaaaaaaaaaaaaaaaaaaaaaaaaaaaaaaaaaaaaaaaaaaaaaaaaaaaaaa

SEQ ID NO: 39036 - RNA, 1743 nt, Artificial Sequence
  mRNA product Design a-2 (A100) comprising derived and/or modified sequence from LASV(G1442-SLE-2011;Clade IV)__AIT17180__GPCmut11 (opt1)
aggagaguccgcucagccagguugcagaagcggcuuagcguguguccuaaucuucucucugcguguagguaggccugugccgcaaacaagcuuaccaugggccagaucgugaccuucuuccaggaggucccccacgugaucgaggaggugaugaacaucguccugaucgcccucagcauccuggccgugcugaaggggcucuacaacguggcgaccugcggccugaucgggcuggucacguuccuccugcugugcggccgcuccugcaccaccacccucuacaaggggguguacgagcugcagacgcuggagcucaacauggagacccugaacaugaccaugccgcugagcugcaccaagaacaacucccaccacuacauccgggugggcaacgagacgggccucgagcugacccugaccaacaccagcaucaucaaccacaaguucugcaaccucuccgacgcccacaagaagaaccuguacgaccacgcccugaugagcaucaucuccacguuccaccucagcauccccaacuucaaccaguacgaggccauguccugcgacuucaacgggggcaagaucagcguccaguacaaccugucccacagcuacgccggggacgcggccaaccacugcggcaccguggccaacggggugcugcagaccuucaugcgcauggccuggggcggcuccuacaucgcgcucgacagcgggcggggcaacugggacugcaucaugaccuccuaccaguaccugaucauccagaacacgaccugggacgaccacugccaguucagccgccccucccccaucggguaccugggccuccugagccagcggacccgcgacgucuacaucucccggcgccugcucggcaccuucacguggacccugagcgacagcgaggggaaggacaccccgggcggguacugccugacccgguggaugcucaucgaggccgagcugaagugcuucggcaacacggccguggccaagugcaacgagaagcacgacgaggaguucugcgacaugcugcgccucuucgacuucaacaagcaggccauccagcggcugaaggcggaggcccagauguccauccagcugaucaacaaggccgugaacgcccucaucaacgaccagcugaucaugaagaaccaccuccgcgacaucauggggauccccuacugcaacuacagcaaguacugcuaccugaacaacaccgccaccggcaagaccucccugcccaagugcugccugaucagcaacggcuccuaccucaacgagacgcacuucagcgacgacaucgagcaggaggcggacaacaugaucaccgagaugcugcagaaggaguacauggagcggcaggggaagacgccccugggccucgucgaccuguucguguucuccaccagcuucuaccugaucuccaucuuccugcaccucgugaagaucccgacccaccgccacaucgucggcaagagcugccccaagccccaccggcugaaccacauggggaucugcuccugcgggcuguacaagcagcccggcgugccggugcgcuggaagcggugaggacuagucccuguucccagagcccacuuuuuuuucuuuuuuugaaauaaaauagccugucuuucagaucuaaaaaaaaaaaaaaaaaaaaaaaaaaaaaaaaaaaaaaaaaaaaaaaaaaaaaaaaaaaaaaaaaaaaaaaaaaaaaaaaaaaaaaaaaaaaaaaaaaaa

SEQ ID NO: 39037 - RNA, 1743 nt, Artificial Sequence
  mRNA product Design a-2 (A100) comprising derived and/or modified sequence from LASV(G3010-SLE-2013;Clade IV)__AIT17344__GPCmut11 (opt1)
aggagaguccgcucagccagguugcagaagcggcuuagcguguguccuaaucuucucucugcguguagguaggccugugccgcaaacaagcuuaccaugggccagaucgugaccuucuuccaggaggucccccacgugaucgaggaggugaugaacaucguccugaucgcccucagcauccuggccgugcugaaggggcucuacaacuucgcgaccugcggccugguggggcuggucacguuccuccugcugugcggccgcuccugcaccaccagccucuacaaggggguguacgagcugcagacccuggagcucaacauggagacgcugaacaugaccaugccgcuguccugcaccaagaacaacagccaccacuacaucauggugggcaacgagaccggccucgagcugacgcugaccaacaccuccaucaucaaccacaaguucugcaaccucagcgacgcccacaagaagaaccuguacaaccacgcccugauguccaucaucagcaccuuccaccucuccauccccaacuucaaccaguacgaggccaugagcugcgacuucaacgggggcaagaucuccguccaguacaaccugagccacuccuacgccggggacgcggccagccacugcggcacgguggccaacggggugcugcagaccuucaugcggauggccuggggcggcuccuacaucgcgcucgacagcggguacggcaagugggacugcaucaugaccuccuaccaguaccugaucauccagaacaccacgugggaggaccacugccaguucagccgccccucccccaucggguaccugggccuccugagccagcggacccgcgacaucuacaucagccggcgccugcucggcaccuucaccuggacgcuguccgacagcgaggggaaggacaccccgggcggguacugccugacccgguggaugcucaucgaggccgagcugaagugcuucggcaacaccgccgucgccaagugcaacgagaagcacgacgaggaguucugcgacaugcugcgccucuucgacuucaacaagcaggccauccagcggcugaagacggaggcgcagauguccauccagcugaucaacaaggccgugaacgcccucaucaacgaccagcugaucaugaagaaccaccuccgcgacaucauggggauccccuacugcaacuacagcaaguacugcuaccugaaccacaccaccaccggcaagacgucccugcccaagugcugccuggugagcaacggcuccuaccucaacgagacccacuucagcgacgacaucgagcagcaggccgacaacaugaucaccgagaugcugcagaaggaguacauggagcggcaggggaagacgccccugggccucgucgaccuguucguguucuccaccagcuucuaccugaucuccaucuuccugcaccucgugaagaucccgacccaccgccacaucgucggcaagagcugccccaagccccaccggcugaaccacauggggaucugcuccugcgggcuguacaagcagcccggcgugccggugcgcuggaagcggugaggacuagucccuguucccagagcccacuuuuuuuucuuuuuuugaaauaaaauagccugucuuucagaucuaaaaaaaaaaaaaaaaaaaaaaaaaaaaaaaaaaaaaaaaaaaaaaaaaaaaaaaaaaaaaaaaaaaaaaaaaaaaaaaaaaaaaaaaaaaaaaaaaaaa

SEQ ID NO: 39038 - RNA, 1743 nt, Artificial Sequence
  mRNA product Design a-2 (A100) comprising derived and/or modified sequence from LASV(G502-SLE-2009;Clade IV)__AIT17126__GPCmut11 (opt1)
aggagaguccgcucagccagguugcagaagcggcuuagcguguguccuaaucuucucucugcguguagguaggccugugccgcaaacaagcuuaccaugggccagaucgugaccuucuuccaggaggucccccacgugaucgaggaggugaugaacaucguccugaucgcccucagcauccuggccgugcugaaggggcucuacaacuucgcgaccugcggccugguggggcugcucacguuccugcugcucugcggccgcuccugcaccaccgggcuguacaagggcgucuacgagcugcagacccucgagcugaacauggagacgcugaacaugaccaugccgcucagcugcaccaagaacaacucccaccacuacaucauggugggcaacgagaccgggcuggagcugacgcucaccaacaccagcaucaucaaccacaaguucugcaaccuguccgacgcccacaagaagaaccuguacgaccacgcccucaugagcaucaucuccaccuuccaccugagcauccccaacuucaaccaguacgaggccauguccugcgacuucaacggcgggaagaucagcgugcaguacaaccugucccacagcuacgccggcgacgcggccgaccacugcgggacggucgccaacggcgugcuccagaccuucaugcggauggccuggggcggguccuacaucgcgcuggacagcggccgcgggcggugggacugcaucaugaccuccuaccaguaccugaucauccagaacaccacgugggaggaccacugccaguucagccgccccucccccaucggcuaccucggccugcugagccagcggacccgcgacaucuacaucucccggcgccuccuggggaccuucaccuggacgcugagcgacagcgagggcaaggacacccccgggggcuacugccucacccgguggaugcugaucgaggccgagcugaagugcuucgggaacaccgccguggccaagugcaacgagaagcacgacgaggaguucugcgacaugcuccgccuguucgacuucaacaagcaggccauccagcggcugaaggcggaggcccagauguccauccagcucaucaacaaggccgucaacgcccugaucaacgaccagcuggugaugaagaaccaccuccgcgacaucaugggcauccccuacugcaacuacagccgguacugcuaccugaaccacacgaccaccggccgcaccucccugcccaagugcugccucgugagcaacggguccuaccugaacgagacgcacuucagcgacgacaucgagcagcaggccgacaacaugaucaccgagaugcugcagaaggaguacauggagcggcagggcaagaccccgcucgggcuggucgaccuguucguguucuccaccagcuucuaccugaucuccaucuuccuccaccuggugaagaucccgacgcaccgccacaucgucggcaagagcugccccaagccccaccggcugaaccacauggggaucugcuccugcggccucuacaagcagcccggcgugccggugaaguggaagcgcugaggacuagucccuguucccagagcccacuuuuuuuucuuuuuuugaaauaaaauagccugucuuucagaucuaaaaaaaaaaaaaaaaaaaaaaaaaaaaaaaaaaaaaaaaaaaaaaaaaaaaaaaaaaaaaaaaaaaaaaaaaaaaaaaaaaaaaaaaaaaaaaaaaaaa

SEQ ID NO: 39039 - RNA, 1743 nt, Artificial Sequence
  mRNA product Design a-2 (A100) comprising derived and/or modified sequence from LASV(G733-SLE-2010;Clade IV)__AIT17154__GPCmut11 (opt1)
aggagaguccgcucagccagguugcagaagcggcuuagcguguguccuaaucuucucucugcguguagguaggccugugccgcaaacaagcuuaccaugggccagaucgugaccuucuuccaggaggucccccacgugaucgaggaggugaugaacaucguccugaucgcccucagcauccuggccgugcugaaggggcucuacaacuucgcgaccugcggcaucguggggcuggucuccuuccugcuccugugcggccgcagcugcacgaccucccuguacaaggggguguacgagcuccagacccuggagcugaacauggagacccucaacaugacgaugccgcugagcugcaccaagaacaacucccaccacuacaucauggugggcaacgagaccggccuggagcucacccugacgaacaccagcaucaucaaccacaaguucugcaaccuguccgacgcccacaagaagaaccucuacgaccacgcccugaugagcaucaucuccaccuuccaccugagcauccccaacuucaaccaguacgaggccauguccugcgacuucaacgggggcaagaucagcguccaguacaaccucucccacagcuacgccggggacgcggccaaccacugcggcaccaucgccaacggggugcugcagacguucaugcggauggccuggggcggcuccuacaucgcgcuggacagcgggcgcgaccggugggacugcaucaugaccuccuaccaguaccucaucauccagaacaccaccugggaggaccacugccaguucagccgccccucccccaucggcuaccuggggcugcucagccagcggacgcgcgacaucuacaucagccggcgccugcugggcaccuucaccuggacccucuccgacagcgagggcaaggacacgcccgggggcuacugccugacccgguggaugcugaucgaggccgagcucaagugcuucgggaacaccgccguggccaagugcaacgagaagcacgacgaggaguucugcgacaugcugcgccuguucgacuucaacaagcaggccauccagcggcucaaggcggaggcccagauguccauccagcugaucaacaaggccgucaacgcccugaucaacgaccagcucaucaugaagaaccaccuccgcgacaucaugggcauccccuacugcaacuacagcaaguacugcuaccugaaccacaccacgaccgggaagaccucccugcccaagugcugccuggugagcaacggcuccuaccugaacgagacccacuucagcgacgacaucgagcagcaggccgacaacaugaucacggagaugcuccagaaggaguacauggagcggcagggcaagaccccgcuggggcugguggaccucuucgucuucuccaccagcuucuaccugaucuccaucuuccugcaccuggugaagaucccgacccaccgccacguggucggcaagagcugccccaagccccaccggcucaaccacauggggaucugcuccugcggccuguacgggcagcccggcgugccggugaaguggaagcgcugaggacuagucccuguucccagagcccacuuuuuuuucuuuuuuugaaauaaaauagccugucuuucagaucuaaaaaaaaaaaaaaaaaaaaaaaaaaaaaaaaaaaaaaaaaaaaaaaaaaaaaaaaaaaaaaaaaaaaaaaaaaaaaaaaaaaaaaaaaaaaaaaaaaaa

SEQ ID NO: 39040 - RNA, 1743 nt, Artificial Sequence
  mRNA product Design a-2 (A100) comprising derived and/or modified sequence from MOPV/LASV reassortant(IGS-1;Clade IV)__AFY05576__GPCmut11 (opt1)
aggagaguccgcucagccagguugcagaagcggcuuagcguguguccuaaucuucucucugcguguagguaggccugugccgcaaacaagcuuaccaugggccagaucgugaccuucuuccaggaggucccccacgugaucgaggaggugaugaacaucguccugaucgcccucagcgugcuggccgugcugaaggggcucuacaacuucgcgaccugcggccuggucgggcuggugacguuccuccugcugugcggccgcuccugcaccaccagccucuacaaggggguguacgagcugcagacccuggagcucaacauggagacgcugaacaugaccaugccgcuguccugcaccaagaacaacagccaccacuacaucauggucggcaacgagaccggccucgagcugacgcugaccaacaccuccaucaucaaccacaaguucugcaaccucagcgacgcccacaagaagaaccuguacgaccacgcccugauguccaucaucagcaccuuccaccucuccauccccaacuucaaccaguacgaggccaugagcugcgacuucaacgggggcaagaucuccgugcaguacaaccugagccacuccuacgccggggacgcggccaaccacugcggcacgguggccaacgggguccugcagaccuucaugcggauggccuggggcggcagcuacaucgcgcucgacuccgggcgcggcaacugggacugcaucaugaccagcuaccaguaccugaucauccagaacaccacgugggaggaccacugccaguucucccggcccagccccaucggguaccugggccuccugucccagcgcacccgggacaucuacaucagccgccggcugcucggcaccuucaccuggacgcugagcgacuccgagggggaggacaccccgggcggguacugccugacccgcuggaugcucaucgaggccgagcugaagugcuucggcaacaccgccguggccaagugcaacgagaagcacgacgaggaguucugcgacaugcugcggcuguucgacuucaacaagcaggccauccagcgccugaaggcggaggcccagaugagcauccagcugaucaacaaggccgugaacgcccucaucaacgaccagcugaucaugaagaaccaccuccgggacaucauggggauccccuacugcaacuacuccaaguacugcuaccucaaccacacgaccaccggccgcaccagccugcccaagugcugccuggucuccaacggcagcuaccucaacgagacgcacuucuccgacgacaucgagcagcaggccgacaacaugaucaccgagaugcugcagaaggaguacauggagcggcaggggaagacgccccugggccucguggaccuguucguguucagcaccuccuucuaccugaucagcaucuuccugcaccucgucaagaucccgacccaccgccacaucguggggaaguccugccccaagccccaccggcugaaccacaugggcaucugcagcugcgggcuguacaagcagcccggcgugccggucaaguggaagcgcugaggacuagucccuguucccagagcccacuuuuuuuucuuuuuuugaaauaaaauagccugucuuucagaucuaaaaaaaaaaaaaaaaaaaaaaaaaaaaaaaaaaaaaaaaaaaaaaaaaaaaaaaaaaaaaaaaaaaaaaaaaaaaaaaaaaaaaaaaaaaaaaaaaaaa

SEQ ID NO: 39041 - RNA, 1743 nt, Artificial Sequence
  mRNA product Design a-2 (A100) comprising derived and/or modified sequence from LASV(LM765-SLE-2012;Clade IV)__AIT17814__GPCmut11 (opt1)
aggagaguccgcucagccagguugcagaagcggcuuagcguguguccuaaucuucucucugcguguagguaggccugugccgcaaacaagcuuaccaugggccagaucgugaccuucuuccaggaggucccccacgugaucgaggaggugaugaacaucguccugaucgcccucagcauccuggccgugcugaaggggcucuacaacuucgcgaccugcggccugguggggcuggucacguuccuccugcugugcggccgcuccugcaccaccagccucuacaaggggguguacgagcugcagacccuggagcucaacauggagacgcugaacaugaccaugccgcuguccugcaccaagaacaacagccaccacuacaucauggugggcaacgagaccggccucgagcugacgcugaccaacaccuccaucaucgaccacaaguucugcaaccucagcgacgcccaccggaagaaccuguacgaccacgcccugauguccaucaucagcaccuuccaccucuccauccccaacuucaaccaguacgaggccaugagcugcgacuucaacgggggcaagaucuccguccaguacaaccugagccacuccuacgccaaggacgcggccgaccacugcgggacgguggccaacggcgugcugcagaccuucaugcgcauggccuggggcgggagcuacaucgcgcucgacuccggccgggggcgcugggacugcaucaugaccagcuaccaguaccugaucauccagaacaccacgugggaggaccacugccaguucucccggcccagccccaucggcuaccuggggcuccugucccagcgcacccgggacaucuacaucagccgccggcugcucggcaccuucaccuggacgcugagcgacuccgagggcaaggacacccccgggggcuacugccugacccgcuggaugcucaucgaggccgagcugaagugcuucgggaacaccgccgucgccaagugcaacgagaagcacgacgaggaguucugcgacaugcugcggcuguucgacuucaacaagcaggccauccagcgccugaaggcggaggcccagaugagcauccagcugaucaacaaggccgugaacgcccucaucaacgaccagcugaucaugaagaaccaccuccgggacaucaugggcauccccuacugcaacuacuccaaguacugcuaccucaaccacacgaccaccgggaagaccagccugcccaagugcugccugguguccaacggcagcuaccucaacgagacgcacuucuccgacgacaucgagcagcaggccgacaacaugaucaccgagaugcugcagaaggaguacauggagcgccagggcaagaccccgcuggggcucgucgaccuguucguguucagcaccuccuucuaccugaucagcaucuuccugcaccucgugaagaucccgacgcaccggcacaucgucggcaagcccugccccaagccccaccgccugaaccacauggggaucugcuccugcggccuguacaagcagccgggggugcccgugaaguggaagcggugaggacuagucccuguucccagagcccacuuuuuuuucuuuuuuugaaauaaaauagccugucuuucagaucuaaaaaaaaaaaaaaaaaaaaaaaaaaaaaaaaaaaaaaaaaaaaaaaaaaaaaaaaaaaaaaaaaaaaaaaaaaaaaaaaaaaaaaaaaaaaaaaaaaaa

SEQ ID NO: 39042 - RNA, 1743 nt, Artificial Sequence
  mRNA product Design a-2 (A100) comprising derived and/or modified sequence from LASV(LM776-SLE-2012;Clade IV)__AIT17824__GPCmut11 (opt1)
aggagaguccgcucagccagguugcagaagcggcuuagcguguguccuaaucuucucucugcguguagguaggccugugccgcaaacaagcuuaccaugggccagaucgugaccuucuuccaggaggucccccacgugaucgaggaggugaugaacaucguccugaucgcccucagcauccuggccgugcugaaggggcucuacaacuucgcgaccugcggccugguggggcuggucacguuccuccugcugugcggccgcuccugcaccaccagcguguacaaggggguguacgagcuccagacccuggagcugaacauggagacgcucaacaugaccaugccgcuguccugcaccaagaacaacagccaccacuacaucauggucggcaacgagaccggccuggagcucacgcugaccaacaccuccaucaucaaccacaaguucugcaaccugagcgacgcccacaagaagaaccucuacgaccacgcccugauguccaucaucagcaccuuccaccuguccauccccaacuucaaccaguacgaggccaugagcugcgacuucaacgggggcaagaucuccgugcaguacaaccucagccacuccuacgccggggacgcggccaaccacugcggcacgguggccaacgggguccugcagaccuucaugcggauggccuggggcggcagcuacaucgcgcuggacuccgggcacggcaagugggacugcaucaugaccagcuaccaguaccucaucauccagaacaccacgugggaggaccacugccaguucucccgccccagccccaucggguaccugggccugcucucccagcggacccgcgacaucuacaucagccggcgccugcugggcaccuucaccuggacgcucagcgacuccgaggggaaggacaccccgggcggguacugccugacccgguggaugcugaucgaggccgagcucaagugcuucggcaacaccgccguggccaagugcaacgagaagcacgacgaggaguucugcgacaugcugcgccuguucgacuucaacaagcaggccauccagcggcucaaggcggaggcccagaugagcauccagcugaucaacaaggccgugaacgcccugaucaacgaccagcucaucaugaagaaccaccuccgcgacaucauggggauccccuacugcaacuacuccaaguacugcuaccugaaccacacgaccaccggcaagaccagccugcccaagugcugccuggucuccaacggcagcuaccugaacgagacgcacuucuccgacgacaucgagcagcaggccgacaacaugaucaccgagaugcuccagaaggaguacauggagcggcaggggaagacgccccugggccugguggaccucuucguguucagcaccuccuucuaccugaucagcaucuuccugcaccuggucaagaucccgacccaccgccacaucguggggaaguccugccccaagccccaccggcucaaccacaugggcaucugcagcugcgggcuguacaagcagcccggcgugccgguccgcuggaagcggugaggacuagucccuguucccagagcccacuuuuuuuucuuuuuuugaaauaaaauagccugucuuucagaucuaaaaaaaaaaaaaaaaaaaaaaaaaaaaaaaaaaaaaaaaaaaaaaaaaaaaaaaaaaaaaaaaaaaaaaaaaaaaaaaaaaaaaaaaaaaaaaaaaaaa

SEQ ID NO: 39043 - RNA, 1743 nt, Artificial Sequence
  mRNA product Design a-2 (A100) comprising derived and/or modified sequence from LASV(Mad39;Clade IV)__ANH09722__GPCmut11 (opt1)
aggagaguccgcucagccagguugcagaagcggcuuagcguguguccuaaucuucucucugcguguagguaggccugugccgcaaacaagcuuaccaugggccagaucgugaccuucuuccaggaggucccccacgugaucgaggaggugaugaacaucguccugaucgcccucagcauccuggccgugcugaaggggcucuacaacguggcgaccugcggccugaucgggcuggucacguuccuccugcugugcggccgcuccugcaccaccacccucuacaaggggguguacgagcugcaggcccuggagcucaacauggagacgcugaacaugaccaugccgcugagcugcaccaagaacaacucccaccacuacauccgggugggcaacgagaccggccucgagcugacgcugaccaacaccagccucaucaaccacaaguucugcaaccuguccgacgcccacaagaagaaccuguacgaccacgcccucaugagcaucaucuccaccuuccaccugagcauccccaacuucaaccaguacgaggccauguccugcgacuucaacgacgggaagaucagcguccaguacaaccugucccacacguacgcgggcgacaccgccaaccacugcgggaccguggccaacggcgugcuccagaccuucaugcgcauggccuggggcgggagcuacaucgcgcuggacuccggccgcgggggcugggacugcaucaugacgagcuaccaguaccugaucauccagaacaccaccugggaggaccacugccaguucucccggcccagccccaucggguaccucggccugcugucccagcggacccgcgacaucuacaucagccggcgccuccugggcacguucaccuggacccuguccgacagcgaggggaaggacaccccgggcggguacugccucacgcgguggaugcugaucgaggccgagcugaagugcuucggcaacaccgccgucgccaagugcaacgagaagcacgacgaggaguucugcgacaugcuccgccuguucgacuucaacaagcaggccauccagcggcugaaggcggaggcccagaugagcauccagcucaucaacaaggccgugaacgcccugaucaacgaccagcugaucaugaagaaccaccuccgcgacaucauggggauccccuacugcaacuacuccaaguacugcuaccugaaccacaccgugaccggcaagacgagccugcccaagugcugccucgucuccaacggcagcuaccugaacgagacccacuucuccgacgacaucgagcagcaggccgacaacaugaucaccgagaugcugcagaaggaguacauggagcggcaggggaagacgccccucggccugguggaccuguucguguucagcaccuccuucuaccugaucagcaucuuccuccaccuggucaagaucccgacccaccgccacgugguggggaagcccugccccaagccccaccggcugaaccacaugggcaucugcuccugcggguucuacaagcagccgggcguccccgugcgcuggaagcggugaggacuagucccuguucccagagcccacuuuuuuuucuuuuuuugaaauaaaauagccugucuuucagaucuaaaaaaaaaaaaaaaaaaaaaaaaaaaaaaaaaaaaaaaaaaaaaaaaaaaaaaaaaaaaaaaaaaaaaaaaaaaaaaaaaaaaaaaaaaaaaaaaaaaa

SEQ ID NO: 39044 - RNA, 1743 nt, Artificial Sequence
  mRNA product Design a-2 (A100) comprising derived and/or modified sequence from LASV(Z0947-SLE-2011;Clade IV)__AIT17840__GPCmut11 (opt1)
aggagaguccgcucagccagguugcagaagcggcuuagcguguguccuaaucuucucucugcguguagguaggccugugccgcaaacaagcuuaccaugggccagaucgugaccuucuuccaggaggucccccacgugaucgaggaggugaugaacaucguccugaucgcccucagcauccuggccgugcugaaggggcucuacaacuucgcgaccugcggccugguggggcuggucacguuccuccugcugugcggccgcuccugcaccaucagccucuacaaggggguguacgagcugcagacccuggagcucaacauggagacccugaacaugacgaugccgcuguccugcaccaagaacaacagccaccacuacaucauggugggcaacgagaccggccucgagcugacccugacgaacaccuccaucaucaaccacaaguucugcaaccucagcgacgcccacaagaagaaccuguacgaccacgcccugauguccaucaucagcaccuuccaccucuccauccccaacuucaaccaguacgaggccaugagcugcgacuucaacgggggcaagaucuccguccaguacaaccugagccacuccuacgccggggacgcggccaaccacugcggcaccguggccaacggggugcugcagacguucaugcggauggccuggggcggcagcuacaucgcgcucgacuccgggcgcgaccggugggacugcaucaugaccagcuaccaguaccugaucauccagaacaccaccugggaggaccacugccaguucucccgccccagccccaucggcuaccuggggcuccugucccagcggacgcgcgacaucuacaucagccggcgccugcucggcaccuucaccuggacccugagcgacuccgagggcaaggacacgcccgggggcuacugccugacccgguggaugcucaucgaggccgagcugaagugcuucgggaacaccgccgucgccaagugcaacgagaagcacgacgaggaguucugcgacaugcugcgccucuucgacuucaacaagcaggccauccagcggcugaaggcggaggcccagaugagcauccagcugaucaacaaggccgugaacgcccucaucaacgaccagcugaucaugaagaaccaccuccgcgacaucaugggcauccccuacugcaacuacuccaaguacugcuaccugaaccacaccacgaccgggaagaccagccugcccaagugcugccugguguccaacggcagcuaccucaacgagacccacuucuccgacgacaucgagcagcaggccgacaacaugaucacggagaugcugcagaaggaguacauggagcggcagggcaagaccccgcuggggcucgucgaccuguucguguucagcaccuccuucuaccugaucagcaucuuccugcaccucgugaagaucccgacccaccgccacaucgucggcaagcccugccccaagccccaccggcugaaccacauggggaucugcuccugcggccuguacaagcagccgggggugcccgugaaguggaagcgcugaggacuagucccuguucccagagcccacuuuuuuuucuuuuuuugaaauaaaauagccugucuuucagaucuaaaaaaaaaaaaaaaaaaaaaaaaaaaaaaaaaaaaaaaaaaaaaaaaaaaaaaaaaaaaaaaaaaaaaaaaaaaaaaaaaaaaaaaaaaaaaaaaaaaa

SEQ ID NO: 39045 - RNA, 1743 nt, Artificial Sequence
  mRNA product Design a-2 (A100) comprising derived and/or modified sequence from LASV(Josiah;Clade IV)__NP_694870__GPCmut11 (opt1)
aggagaguccgcucagccagguugcagaagcggcuuagcguguguccuaaucuucucucugcguguagguaggccugugccgcaaacaagcuuaccaugggccagaucgugaccuucuuccaggaggucccccacgugaucgaggaggugaugaacaucguccugaucgcccucagcgugcuggccgugcugaaggggcucuacaacuucgcgaccugcggccuggucgggcuggugacguuccuccugcugugcggccgcuccugcaccaccagccucuacaaggggguguacgagcugcagacccuggagcucaacauggagacgcugaacaugaccaugccgcuguccugcaccaagaacaacagccaccacuacaucauggucggcaacgagaccggccucgagcugacgcugaccaacaccuccaucaucaaccacaaguucugcaaccucagcgacgcccacaagaagaaccuguacgaccacgcccugauguccaucaucagcaccuuccaccucuccauccccaacuucaaccaguacgaggccaugagcugcgacuucaacgggggcaagaucuccgugcaguacaaccugagccacuccuacgccggggacgcggccaaccacugcggcacgguggccaacgggguccugcagaccuucaugcggauggccuggggcggcagcuacaucgcgcucgacuccgggcgcggcaacugggacugcaucaugaccagcuaccaguaccugaucauccagaacaccacgugggaggaccacugccaguucucccggcccagccccaucggguaccugggccuccugucccagcgcacccgggacaucuacaucagccgccggcugcucggcaccuucaccuggacgcugagcgacuccgaggggaaggacaccccgggcggguacugccugacccgcuggaugcucaucgaggccgagcugaagugcuucggcaacaccgccguggccaagugcaacgagaagcacgacgaggaguucugcgacaugcugcggcuguucgacuucaacaagcaggccauccagcgccugaaggcggaggcccagaugagcauccagcugaucaacaaggccgugaacgcccucaucaacgaccagcugaucaugaagaaccaccuccgggacaucauggggauccccuacugcaacuacuccaaguacugcuaccucaaccacacgaccaccggccgcaccagccugcccaagugcugccuggucuccaacggcagcuaccucaacgagacgcacuucuccgacgacaucgagcagcaggccgacaacaugaucaccgagaugcugcagaaggaguacauggagcggcaggggaagacgccccugggccugguggaccucuucguguucagcaccuccuucuaccugaucagcaucuuccugcaccucgucaagaucccgacccaccgccacaucguggggaaguccugccccaagccccaccggcugaaccacaugggcaucugcagcugcgggcuguacaagcagcccggcgugccggucaaguggaagcgcugaggacuagucccuguucccagagcccacuuuuuuuucuuuuuuugaaauaaaauagccugucuuucagaucuaaaaaaaaaaaaaaaaaaaaaaaaaaaaaaaaaaaaaaaaaaaaaaaaaaaaaaaaaaaaaaaaaaaaaaaaaaaaaaaaaaaaaaaaaaaaaaaaaaaa

SEQ ID NO: 39046 - RNA, 1740 nt, Artificial Sequence
  mRNA product Design a-2 (A100) comprising derived and/or modified sequence from LASV(LP;Clade I)__AAF86701__GPCmut11 (opt1)
aggagaguccgcucagccagguugcagaagcggcuuagcguguguccuaaucuucucucugcguguagguaggccugugccgcaaacaagcuuaccaugggccagaucaucaccuucuuccaggaggugccccacgucaucgaggaggugaugaacaucgugcugaucgcccucagccugcuggccauccucaaggggcuguacaacaucgcgaccugcggcaucaucgggcuggucgccuuccucuuccugugcggcaaguccugcagccugacgcucaagggcggguacgagcugcagacccuggagcucaacauggagacccugaacaugaccaugccgcuguccugcacgaagaacagcucccaccacuacauccgcgugggcaacgagaccgggcucgagcugacccugaccaacacgagcaucaucaaccacaaguucugcaaccucuccgacgcccacaagaagaaccuguacgaccacgcccugaugagcaucaucuccaccuuccaccucagcauccccaacuucaaccaguacgaggccauguccugcgacuucaacggcgggaagaucagcgugcaguacaaccugucccacagcuacgcgggcgacgccgccgagcacugcgggaccgucgccaacggcgugcugcagaccuucaugcggauggcguggggcgggcgcuacaucgcccucgacuccggcaaggggaacugggacugcaucaugacgagcuaccaguaccugaucauccagaacaccaccugggaggaccacugccaguucucccggcccagccccaucggcuaccugggccuccugucccagcgcacccgggacaucuacaucagccgccggcugcucgggacguucaccuggacccugagcgacuccgagggcaacgagacccccgggggcuacugccugacgcgcuggaugcucaucgaggccgagcugaagugcuucgggaacaccgccguggccaagugcaacgagaagcacgacgaggaguucugcgacaugcugcggcuguucgacuucaacaagcaggcgauccgccggcugaaggccgaggcccagaugagcauccagcugaucaacaaggccgucaacgcccucaucaacgaccagcugaucaugaagaaccaccuccgcgacaucaugggcauccccuacugcaacuacuccaaguacugcuaccucaaccacaccagcuccggccggaccagccugcccaagugcugccugaucuccaacgggagcuaccucaacgagacgcaguucuccgacgacaucgagcagcaggcggacaacaugaucaccgagaugcugcagaaggaguacaucgagcgccagggcaagaccccgcuggggcugguggacaucuucaucuucagcaccuccuucuaccucaucagcaucuuccugcaccugaucaagaucccgacgcaccggcacaucgugggcaagcccugccccaagccccaccgccucaaccacaugggggucugcuccugcggccuguacaagcacccgggcgugcccaccaaguggaagcggugaggacuagucccuguucccagagcccacuuuuuuuucuuuuuuugaaauaaaauagccugucuuucagaucuaaaaaaaaaaaaaaaaaaaaaaaaaaaaaaaaaaaaaaaaaaaaaaaaaaaaaaaaaaaaaaaaaaaaaaaaaaaaaaaaaaaaaaaaaaaaaaaaaaaa

SEQ ID NO: 39047 - RNA, 1740 nt, Artificial Sequence
  mRNA product Design a-2 (A100) comprising derived and/or modified sequence from LASV(803213;Clade II)__AAF86703__GPCmut11 (opt1)
aggagaguccgcucagccagguugcagaagcggcuuagcguguguccuaaucuucucucugcguguagguaggccugugccgcaaacaagcuuaccaugggccagaucaucaccuucuuccaggaggugccccacgucaucgaggaggugaugaacaucgugcugaucgcccucagccugcuggccauccucaaggggaucuacaacgucgcgaccugcggccuguucgggcugaucuccuuccuccugcugugcggccgcagcugcuccgugacguacaaggggguguacgagcuccagacccuggagcugaacauggccaaccucaacaugaccaugccgcugagcugcaccaagaacaacucccaccacuacaucauggucggcaacgagacgggccuggagcucacccugaccaacaccagcaucaucaaccacaaguucugcaaccuguccgacgcccacaagaagaaccucuacgaccacgcccugaugagcaucaucuccacguuccaccugagcauccccaacuucaaccaguacgaggccauguccugcgacuucaacgggggcaagaucagcgugcaguacaaccucucccacagcuucgcgguggacgccgccaaccacugcgggaccaucgccaacggcguccugcagaccuucaugcggauggcguggggcggguccuacaucgcccuggacagcggcaaggggaacugggacugcaucaugaccuccuaccaguaccucaucauccagaacacgaccugggaggaccacugccaguucagccgccccucccccaucggcuaccuggggcugcucagccagcggacccgcgacaucuacaucagccggcgccugcugggcaccuucacguggacccucuccgacagcgagggcaacgaggcccccgggggcuacugccugacccgguggaugcugaucgaggccgagcucaagugcuucgggaacaccgccguggcgaagugcaacgagaagcacgacgaggaguucugcgacaugcugcgccuguucgacuucaacaagcaggccaucaagcggcucaagacggaggcccagauguccauccagcugaucaacaaggccgugaacgcccugaucaacgaccagcucaucaugaagaaccaccuccgcgacaucaugggcauccccuacugcaacuacagccgguacugcuaccugaaccacaccgucaccgggaagaccucccugccccgcugcugccuggugagcaacggcuccuaccugaacgagacgcacuucagcgacgacaucgagcagcaggcggacaacaugaucaccgagaugcuccagaaggaguacauggaccggcagggcaagaccccgcuggggcugguggaccuguucgucuucuccaccagcuucuaccucaucuccaucuuccugcaccuggugaagaucccgacgcaccgccacaucgugggcaagcccugccccaagccccaccggcucaaccacauggggaucugcagcugcggccuguacaagcacccggggguccccgugaaguggaagcgcugaggacuagucccuguucccagagcccacuuuuuuuucuuuuuuugaaauaaaauagccugucuuucagaucuaaaaaaaaaaaaaaaaaaaaaaaaaaaaaaaaaaaaaaaaaaaaaaaaaaaaaaaaaaaaaaaaaaaaaaaaaaaaaaaaaaaaaaaaaaaaaaaaaaaa

SEQ ID NO: 39048 - RNA, 1740 nt, Artificial Sequence
  mRNA product Design a-2 (A100) comprising derived and/or modified sequence from LASV(GA391;Clade III)__CAA36645__GPCmut11 (opt1)
aggagaguccgcucagccagguugcagaagcggcuuagcguguguccuaaucuucucucugcguguagguaggccugugccgcaaacaagcuuaccaugggccagaucgugaccuucuuccaggaggucccccacgugaucgaggaggugaugaacaucguccugaucgcccucagcauccuggccauccugaaggggcucuacaacguggcgaccugcggccugaucgggcuggugacguuccuccugcuguccggccgcagcugcucccucaucuacaaggggaccuacgagcugcagacccuggagcucaacauggagacccugaacaugacgaugccgcugagcugcaccaagaacaacucccaccacuacauccgggucggcaacgagaccggccucgagcugacccugacgaacaccagcauccucaaccacaaguucugcaaccuguccgacgcccacaagcgcaaccuguacgaccacagccucauguccaucaucagcaccuuccaccuguccauccccaacuucaaccaguacgaggccaugagcugcgacuucaacgggggcaagaucaccgugcaguacaaccugucccacagcuucgccguggacgccgcggggcacugcggcacgcucgccaacgggguccugcagaccuucaugcggauggccuggggcggcuccuacaucgcccuggacagcgggcgcggcaacugggacugcaucaugaccuccuaccaguaccucaucauccagaacaccacgugggacgaccacugccaguucagccggcccucccccaucggguaccugggccugcucagccagcgcacccgggacaucuacaucagccgccggcugcugggcaccuucaccuggacgcucuccgacagcgaggggaacgagaccccgggcggguacugccugacccgcuggaugcugaucgaggcggagcucaagugcuucggcaacaccgccguggccaagugcaacgagaagcacgacgaggaguucugcgacaugcugcggcuguucgacuucaacaagcaggccauccgccggcucaagacggaggcccagauguccauccagcugaucaacaaggcggugaacgcccugaucaacgaccagcucaucaugaagaaccaccuccgcgacaucauggggauccccuacugcaacuacagccgguacugcuaccugaaccacaccuccaccggcaagaccagccugccccgcugcugccugaucuccaacggcagcuaccugaacgagacgaaguucuccgacgacaucgagcagcaggccgacaacaugaucaccgagaugcugcagaaggaguacaucgaccggcaggggaagacgccccucggccuggucgaccuguucguguucagcaccuccuucuaccucaucagcaucuuccugcaccuggugaagaucccgacccaccgccacaucgucgggaagcccugccccaagccccaccggcucaaccacaugggcaucugcuccugcgggcuguacaagcagccgggcgugcccgugcgcuggaagcggugaggacuagucccuguucccagagcccacuuuuuuuucuuuuuuugaaauaaaauagccugucuuucagaucuaaaaaaaaaaaaaaaaaaaaaaaaaaaaaaaaaaaaaaaaaaaaaaaaaaaaaaaaaaaaaaaaaaaaaaaaaaaaaaaaaaaaaaaaaaaaaaaaaaaa

SEQ ID NO: 39049 - RNA, 1743 nt, Artificial Sequence
  mRNA product Design a-2 (A100) comprising derived and/or modified sequence from LASV(AV;Clade V)__CCA30314__GPCmut11 (opt1)
aggagaguccgcucagccagguugcagaagcggcuuagcguguguccuaaucuucucucugcguguagguaggccugugccgcaaacaagcuuaccaugggccagaucgugaccuucuuccaggaggucccccacgugaucgaggaggugaugaacaucguccugaucgcccucagcauccuggccgugcugaaggggcucuacaacaucgcgaccugcggccugaucgggcugaucacguuccuccugcugugcggccgcuccugcagcuccaaccucuacaaggggguguacgagcugcagagccuggaccucaacauggagacccugaacaugaccaugccgcuguccugcaccaagaacaacagccaccacuacauccgggucggcaacgacacgggccucgagcugacccugaccaacaccuccauccucaaccacaaguucugcaaccugagcgacgcccacaagaaggaccuguacgaccacgcccucauguccaucaucagcacguuccaccuguccauccccaacuucaaccaguacgaggccaugagcugcgacuucaacgggggcaagaucuccgugcaguacaaccugagccacuccuacgccaucgacgcggccaaccacugcgggaccguggccaacggcauccuccagaccuucaugcgcauggccuggggcgggagcuacaucgcgcuggacuccggccgggggaacugggacugcaucaugaccagcuaccaguaccugaucauccagaacacgaccugggagaaccacugccaguucucccgccccagccccaucggcuaccucgggcugcugagccagcggacccgcgacaucuacaucucccggcgccuccugggcaccuucacguggacccugagcgacuccgagggcaacgccacccccgggggcuacugccucacccgguggaugcugaucgaggccgagcugaagugcuucgggaacacggccgucgccaagugcaacgagaagcacgacgaggaguucugcgacaugcuccgccuguucgacuucaacaagcaggcgaucagccggcugaaguccgaggcccagaugagcauccagcucaucaacaaggccgugaacgcccugaucaacgaccagcugaucaugaagaaccaccuccgcgacaucaugggcauccccuacugcaacuacuccaaguacugcuaccugaaccacaccaucaccgggaagaccagccugcccaagugcugccucguguccaacggcagcuaccugaacgagacgcacuucuccgacgacaucgagcagcaggccgacaacaugaucaccgagaugcugcagaaggaguacauggagcggcagggcaagaccccgcuggggcucgucgaccuguucguguucagcaccuccuucuaccugaucagcaucuuccuccgccuggugaagaucccgacgcaccggcacaucgucggcaagcccugccccaagccccaccgccugaaccacauggggaucugcuccugcggccucuacaagcagccgggggugcccgugcgguggaagcgcugaggacuagucccuguucccagagcccacuuuuuuuucuuuuuuugaaauaaaauagccugucuuucagaucuaaaaaaaaaaaaaaaaaaaaaaaaaaaaaaaaaaaaaaaaaaaaaaaaaaaaaaaaaaaaaaaaaaaaaaaaaaaaaaaaaaaaaaaaaaaaaaaaaaaa

SEQ ID NO: 39050 - RNA, 1740 nt, Artificial Sequence
  mRNA product Design a-2 (A100) comprising derived and/or modified sequence from LASV(Togo/2016/7082;Clade VI)__AMR44577__GPCmut11 (opt1)
aggagaguccgcucagccagguugcagaagcggcuuagcguguguccuaaucuucucucugcguguagguaggccugugccgcaaacaagcuuaccaugggccagaucaucaccuucuuccaggaggugccccacgucaucgaggaggugaugaacaucgugcugaucgcccucagccugcuggccauccucaagggggucuacaacguggcgaccugcggcaucaucgggcuggugacguuccuguuccucugcggccgcuccugcagccugaucuacaagggguccuacgagcugcagacccucgagcugaacauggagacccugaacaugaccaugccgcucagcugcacgaagaacuccagccaccacuacauccgggucggcaacgagaccggccuggagcugacccucaccaacacguccaucaucaaccacaaguucugcaaccugagcgacgcccacaagcgcaaccuguacgaccacgcccucauguccauccugagcaccuuccaccuguccauccccaacuucaaccaguacgaggccaugagcugcgacuucaacgggggcaagaucuccgugcaguacaaccucagccacgccuacgcgguggacgccgccgagcacugcgggaccgucgccaacggcgugcugcagaccuucaugcggauggcguggggcggguccuacaucgcccuggacagcggccgcgggaacugggacugcaucaugacguccuaccaguaccucaucauccagaacaccaccugggaggaccacugccaguucagccggcccucccccaucggcuaccuggggcugcucagccagcgcacccgggacaucuacaucagccgccggcugcugggcacguucaccuggacccucuccgacagcgagggcaacgagacccccgggggcuacugccugacgcgcuggaugcugaucgaggccgagcucaagugcuucgggaacaccgccguggccaagugcaacgagaagcacgacgaggaguucugcgacaugcugcggcuguucgacuucaacaagcaggcgauccagcgccucaaguccgaggcccagaugagcauccagcugaucaacaaggccgucaacgcccugaucaacgaccagcucaucaugaagaaccaccuccgggacaugaugggcauccccuacugcaacuacuccaaguacugcuaccugaaccacaccagcuccgggcgcaccagccugcccaagugcugccugguguccaacggcagcuaccugaacgagacgcacuucuccgacgacaucgagcagcaggccgacaacaugaucaccgagaugcuccagaaggaguacaucgaccggcagggcaagaccccgcuggggcugguggaccuguucgucuucagcaccuccuucuaccucaucagcaucuuccugcaccugaucaagaucccgacgcaccgccacaucgugggcaagcccugccccaagccccaccggcucaaccacauggggaucugcuccugcggccuguacaagcagccgggggugcccacccgcuggaagcggugaggacuagucccuguucccagagcccacuuuuuuuucuuuuuuugaaauaaaauagccugucuuucagaucuaaaaaaaaaaaaaaaaaaaaaaaaaaaaaaaaaaaaaaaaaaaaaaaaaaaaaaaaaaaaaaaaaaaaaaaaaaaaaaaaaaaaaaaaaaaaaaaaaaaa

SEQ ID NO: 39051 - RNA, 1740 nt, Artificial Sequence
  mRNA product Design a-2 (A100) comprising derived and/or modified sequence from LASV(KAK-428;Clade n.d. (VII))__ANH09740__GPCmut11 (opt1)
aggagaguccgcucagccagguugcagaagcggcuuagcguguguccuaaucuucucucugcguguagguaggccugugccgcaaacaagcuuaccaugggccagaucgugaccuucuuccaggaggucccccacgugaucgaggaggugaugaacaucguccugaucgcccucagccugcuggccauccucaaggggcuguacaacuucgcgaccugcggcgugaucgggcugaucacguuccuccugcugugcggccgcuccugcagcgccaccuacaaggggcaguacgagcuccagacccuggagcugaacauggagucccucaacaugaccaugccgcugagcugcacgaagaacaacucccaccacuacauccgggccggcaacaacaccggccuggagcucacccugaccaacacgagcaucaucucccacaaguucugcaaccugagcgacgcccacaagaagaaccucuacgaccacacccugauguccaucaucaccaccuuccaccugagcauccccaacuucaaccaguacgaggccauguccugcgacuucaacgggggcaagaucagcauccaguacaaccucucccacagcuacgcgggggacgccgcccagcacugcggcacgguggccaacgggguccugcagaccuucaugcgcauggcguggggcggcuccuaccuggcccucgacagcgggcggcgcggcugggacugcaucaucuccagcuaccaguaccugaucauccagaacaccaccugggacgaccacugccaguucucccggcccagccccaucggguaccugggcuucgugagccagaagacgcgcgacaucuacaucucccggcgccuccugggcaccuucaccuggacccugagcgacuccgaggggcacgacaugccgggcggguacugccucacgcgguggaugcugaucgaggccgaccugaagugcuucggcaacaccgccguggccaagugcaacgagaagcacgacgaggaguucugcgacauguggcgccucuucgacuucaacaagcaggcgauccagcggcugaaggccgaggcccagaugaacauccagcugaucaacaaggccgucaacgcccucaucaacgaccagcugaugaugaagaaccaccuccgcgacaucauggggauccccuacugcaacuacagcaaguucugcuaccugaacaacaccaccacgggccggaccucccugccccgcugcugccugaucagcaacggcuccuaccucaacgagacccacuucagcgacgacaucgagcagcaggcggacaacaugaucaccgagaugcugcagaaggaguacauggaccggcaggggaagacgccccugggccucguggaccuguucguguucuccaccagcuucuaccugaucaccaucuuccugcaccucgucaagaucccgacccaccgccacaucguggggaagcccugccccaagccccaccggcugaaccacaugggcaucugcuccugcgggcuguacaagcagccgggcgugcccguccgcuggaagcggugaggacuagucccuguucccagagcccacuuuuuuuucuuuuuuugaaauaaaauagccugucuuucagaucuaaaaaaaaaaaaaaaaaaaaaaaaaaaaaaaaaaaaaaaaaaaaaaaaaaaaaaaaaaaaaaaaaaaaaaaaaaaaaaaaaaaaaaaaaaaaaaaaaaaa

SEQ ID NO: 39052 - RNA, 1740 nt, Artificial Sequence; identical to SEQ ID NO: 39046
  mRNA product Design a-2 (A100) comprising derived and/or modified sequence from LASV(Pinneo-NIG-1969;Clade I)__AIT17836__GPCmut11 (opt1)

SEQ ID NO: 39053 - RNA, 1740 nt, Artificial Sequence
  mRNA product Design a-2 (A100) comprising derived and/or modified sequence from LASV(ISTH0009-NIG-2011;Clade II)__AIT17404__GPCmut11 (opt1)
aggagaguccgcucagccagguugcagaagcggcuuagcguguguccuaaucuucucucugcguguagguaggccugugccgcaaacaagcuuaccaugggccagaucaucaccuucuuccaggaggugccccacgucaucgaggaggugaugaacaucgugcugaucgcccucagccugcuggccauccucaaggggaucuacaacgucgcgaccugcggccuguucgggcugguguccuuccuccugcugugcggccgcagcugcuccacgaccuacaaggggguguacgagcuccagacccuggagcuggacauggccagccucaacaugaccaugccgcuguccugcacgaagaacaacagccaccacuacaucauggucggcaacgagaccggccuggagcucacccugaccaacacguccaucaucaaccacaaguucugcaaccugagcgacgcccacaagaagaaccucuacgaccacgcccugauguccaucaucagcaccuuccaccuguccauccccaacuucaaccaguacgaggccaugagcugcgacuucaacgggggcaagaucuccgugcaguacaaccucagccacgcguacgccguggacgccgccaaccacugcgggaccaucgcgaacggcguccugcagaccuucaugcggauggccuggggcggguccuacaucgcccuggacagcggcaagggguccugggacugcaucaugacgagcuaccaguaccucaucauccagaacaccaccugggaggaccacugccaguucucccgccccagccccaucggcuaccuggggcugcucagccagcggacccgcgacaucuacaucucccggcgccugcugggcacguucaccuggacccucagcgacuccgagggcaacgagacccccgggggcuacugccugacgcgguggaugcugaucgaggccgagcucaagugcuucgggaacaccgccguggcgaagugcaacgagaagcacgacgaggaguucugcgacaugcugcgccuguucgacuucaacaagcaggccauccggcgccucaagaccgaggcccagaugagcauccagcugaucaacaaggccgugaacgcccugaucaacgaccagcucaucaugaagaaccaccuccgggacaucaugggcaucccguacugcaacuacuccaaguacugcuaccugaaccacaccgucacggggaagaccagccugccccgcugcugccugguguccaacggcagcuaccugaacgagacccacuucuccgacgacaucgagcagcaggcggacaacaugaucaccgagcuccugcagaaggaguacauggaccggcagggcaagacgccccuggggcugguggaccucuucgucuucagcaccuccuucuaccugaucagcaucuuccugcaccucaucaagaucccgacccaccgccacaucaccggcaagcccugccccaagccccaccggcugaaccacauggggaucugcuccugcggccuguacaagcacccgggggugcccgugaaguggaagcgcugaggacuagucccuguucccagagcccacuuuuuuuucuuuuuuugaaauaaaauagccugucuuucagaucuaaaaaaaaaaaaaaaaaaaaaaaaaaaaaaaaaaaaaaaaaaaaaaaaaaaaaaaaaaaaaaaaaaaaaaaaaaaaaaaaaaaaaaaaaaaaaaaaaaaa

SEQ ID NO: 39054 - RNA, 1740 nt, Artificial Sequence
  mRNA product Design a-2 (A100) comprising derived and/or modified sequence from LASV(ISTH2010-NIG-2012;Clade II)__AIT17482__GPCmut11 (opt1)
aggagaguccgcucagccagguugcagaagcggcuuagcguguguccuaaucuucucucugcguguagguaggccugugccgcaaacaagcuuaccaugggccagaucaucaccuucuuccaggaggugccccacgucaucgaggaggugaugaacaucgugcugaucgcccucagccugcuggccauccucaaggggaucuacaacgucgcgaccugcggccuguucgggcugguguccuuccuccugcugugcggccgcagcugcuccacgaccuacaaggggguguacgagcuccagacccuggagcuggacauggccagccucaacaugaccaugccgcuguccugcacgaagaacaacagccaccacuacaucauggucggcaacgagaccggccuggagcucacccugaccaacacguccaucaucaaccacaaguucugcaaccugagcgacgcccacaagaagaaccucuacgaccacgcccugauguccaucaucagcaccuuccaccuguccauccccaacuucaaccaguacgaggccaugagcugcgacuucaacgggggcaagaucuccgugcaguacaaccucagccacgcguacgccguggacgccgccaaccacugcgggaccaucgcgaacggcguccugcagaccuucaugcggauggccuggggcggguccuacaucgcccuggacagcggcaagggguccugggacugcaucaugacgagcuaccaguaccucaucauccagaacaucaccugggaggaccacugccaguucucccgccccagccccaucggcuaccuggggcugcucagccagcggacccgcgacaucuacaucucccggcgccugcugggcaccuucacguggacccucagcgacuccgagggcaacgagacccccgggggcuacugccugacccgguggaugcugaucgaggccgagcucaagugcuucgggaacacggccguggcgaagugcaacgagaagcacgacgaggaguucugcgacaugcugcgccuguucgacuucaacaagcaggccauccggcgccucaagaccgaggcccagaugagcauccagcugaucaacaaggccgugaacgcccugaucaacgaccagcucaucaugaagaaccaccuccgggacaucaugggcauccccuacugcaacuacuccaaguacugcuaccugaaccacaccgucaccgggaagacgagccugccccgcugcugccugguguccaacggcagcuaccugaacgagacccacuucuccgacgacaucgagcagcaggcggacaacaugaucaccgagcuccugcagaaggaguacaucgaccggcagggcaagaccccgcuggggcugguggaccucuucgucuucagcacguccuucuaccugaucagcaucuuccugcaccucgugaagaucccgacccaccgccacguggucggcaagcccugccccaagccccaccggcugaaccacauggggaucugcuccugcggccuguacaagcacccgggggugcccgugaaguggaagcgcugaggacuagucccuguucccagagcccacuuuuuuuucuuuuuuugaaauaaaauagccugucuuucagaucuaaaaaaaaaaaaaaaaaaaaaaaaaaaaaaaaaaaaaaaaaaaaaaaaaaaaaaaaaaaaaaaaaaaaaaaaaaaaaaaaaaaaaaaaaaaaaaaaaaaa

SEQ ID NO: 39055 - RNA, 1740 nt, Artificial Sequence
  mRNA product Design a-2 (A100) comprising derived and/or modified sequence from LASV(Lassa virus/H.sapiens-wt/NGA/2015/ISTH_0543;Clade II)__AVO03639__GPCmut11 (opt1)
aggagaguccgcucagccagguugcagaagcggcuuagcguguguccuaaucuucucucugcguguagguaggccugugccgcaaacaagcuuaccaugggccagaucaucaccuucuuccaggaggugccccacgucaucgaggaggugaugaacaucgugcugaucgcccucagccugcuggccauccucaaggggaucuacaacgucgcgaccugcggccuguucgggcugguguccuuccuccugcugugcggccgcagcugcuccacgaccuacaaggggguguacgagcuccagacccuggagcuggacauggccaaccucaacaugaccaugccgcugagcugcacgaagaacaacucccaccacuacaucauggucggcaacgagaccggccuggagcucacccugaccaacacgagcaucaucaaccacaaguucugcaaccuguccgacgcccacaagaagaaccucuacgaccacgcccugaugagcaucaucuccaccuuccaccugagcauccccaacuucaaccaguacgaggccauguccugcgacuucaacgggggcaagaucagcgugcaguacaaccucucccacaccuacgcgguggacgccgccaaccacugcgggaccaucgccaacggcguccugcagacguucaugcggauggcguggggcgggagcuacaucgcccuggacuccggcaaggggagcugggacugcaucaugaccuccuaccaguaccucgugauccagaacaccaccugggaggaccacugccaguucagccgccccucccccaucggcuaccuggggcugcucagccagcggacgcgcgacaucuacaucagccggcgccugcugggcaccuucaccuggacccucuccgacagcgagggcaacgagacgcccgggggcuacugccugacccgguggaugcugaucgaggccgagcucaagugcuucgggaacaccgccguggccaagugcaacgagaagcacgacgaggaguucugcgacaugcugcgccuguucgacuucaacaagcaggcgauccggcgccucaagaccgaggcccagauguccauccagcugaucaacaaggccgucaacgcccugaucaacgaccagcucaucaugaagaaccaccuccgggacaucaugggcauccccuacugcaacuacagcaaguacugcuaccugaaccacacggugaccgggaagaccucccugccccgcugcugccuggugagcaacggcuccuaccugaacgagacccacuucagcgacgacaucgagcagcaggccgacaacaugaucacggagcuccugcagaaggaguacaucgaccggcagggcaagaccccgcuggggcuggucgaccucuucguguucuccaccagcuucuaccugaucuccaucuuccugcaccucgugaagaucccgacccaccgccacaucacgggcaagcccugccccaagccccaccggcugaaccacauggggaucugcagcugcggccuguacaagcacccggggguccccgugaaguggaagcgcugaggacuagucccuguucccagagcccacuuuuuuuucuuuuuuugaaauaaaauagccugucuuucagaucuaaaaaaaaaaaaaaaaaaaaaaaaaaaaaaaaaaaaaaaaaaaaaaaaaaaaaaaaaaaaaaaaaaaaaaaaaaaaaaaaaaaaaaaaaaaaaaaaaaaa

SEQ ID NO: 39056 - RNA, 1740 nt, Artificial Sequence
  mRNA product Design a-2 (A100) comprising derived and/or modified sequence from LASV(Lassa virus/H.sapiens-wt/NGA/2016/ISTH_0009;Clade II)__AVO03571__GPCmut11 (opt1)
aggagaguccgcucagccagguugcagaagcggcuuagcguguguccuaaucuucucucugcguguagguaggccugugccgcaaacaagcuuaccaugggccagaucaucaccuucuuccaggaggugccccacgucaucgaggaggugaugaacaucgugcugaucgcccucagccugcuggccauccucaaggggaucuacaacgucgcgaccugcggccugcuggggcucguguccuuccugcugcucugcggccgcagcugcuccacgaccuacaaggggguguacgagcugcagacccuggagcucgacauggccagccugaacaugaccaugccgcuguccugcacgaagaacaacagccaccacuacaucauggucggcaacgagaccggccucgagcugacccugaccaacacguccaucaucaaccacaaguucugcaaccucagcgacgcccacaagaagaaccuguacgaccacgcccugauguccaucaucagcaccuuccaccucuccauccccaacuucaaccaguacgaggccaugagcugcgacuucaacgggggccggaucuccgugcaguacaaccugagccacuccuacgcgguggacgccgccaaccacugcgggaccaucgccaacggcguccugcagaccuucaugcgcauggcguggggcgggagcuacaucgcccucgacuccggcaaggggagcugggacugcaucaugacguccuaccaguaccugaucauccagaacaccaccugggaggaccacugccaguucagccggcccagccccaucggcuaccuggggcuccugucccagcgcacccgggacaucuacaucagccgccggcugcucggcacguucaccuggacccuguccgacagcgagggcaacgagacccccgggggcuacugccugacgcgcuggaugcucaucgaggccgagcugaagugcuucgggaacaccgccguggccaagugcaacgagaagcacgacgaggaguucugcgacaugcugcggcuguucgacuucaacaagcaggcgauccgccggcugaagaccgaggcccagauguccauccagcugaucaacaaggccgugaacgcccucaucaacgaccagcugaucaugaagaaccaccuccgcgacaucaugggcaucccguacugcaacuacagcaaguacugcuaccucaaccacaccgucacggggaagaccucccugccccggugcugccuggugagcaacggcuccuaccucaacgagacccacuucagcgacgacaucgagcagcaggccgacaacaugaucaccgagcugcugcagaaggaguacaucgaccgccagggcaagacgccccuggggcucguggaccuguucgucuucuccaccagcuucuaccugaucuccaucuuccuccaccuggugaagaucccgacccaccggcacaucaccggcaagcccugccccaagccccaccgccugaaccacauggggaucugcagcugcggccucuacaaccacccgggggugcccgucaaguggaagcggugaggacuagucccuguucccagagcccacuuuuuuuucuuuuuuugaaauaaaauagccugucuuucagaucuaaaaaaaaaaaaaaaaaaaaaaaaaaaaaaaaaaaaaaaaaaaaaaaaaaaaaaaaaaaaaaaaaaaaaaaaaaaaaaaaaaaaaaaaaaaaaaaaaaaa

SEQ ID NO: 39057 - RNA, 1740 nt, Artificial Sequence
  mRNA product Design a-2 (A100) comprising derived and/or modified sequence from LASV(Lassa virus/H.sapiens-wt/NGA/2016/ISTH_0017;Clade II)__AVO03567__GPCmut11 (opt1)
aggagaguccgcucagccagguugcagaagcggcuuagcguguguccuaaucuucucucugcguguagguaggccugugccgcaaacaagcuuaccaugggccagaucaucaccuucuuccaggaggugccccacgucaucgaggaggugaugaacaucgugcugaucgcccucagccugcuggccauccucaaggggaucuacaacgucgcgaccugcggccuguucgggcugguguccuuccuccugcugugcggccgcagcugcuccacgaccuacaaggggguguacgagcuccagacccuggagcuggacauggccagccucaacaugaccaugccgcuguccugcacgaagaacaacagccaccacuacaucauggucggcaacgagaccggccuggagcucacccugaccaacacguccaucaucaaccacaaguucugcaaccugagcgacgcccacaagaagaaccucuacgaccacgcccugauguccaucaucagcaccuuccaccuguccauccccaacuucaaccaguacgaggccaugagcugcgacuucaacgggggcaagaucuccgugcaguacaaccucagccacaccuacgcgaucgacgccgccaaccacugcgggaccaucgccaacggcgugcugcagacguucaugcggauggcguggggcggguccuacaucgcccuggacagcggcaagggguccugggacugcaucaugaccagcuaccaguaccucaucauccagaacaccaccugggaggaccacugccaguucucccgccccagccccaucggcuaccuggggcugcucagccagcggacgcgcgacaucuacaucucccggcgccugcugggcaccuucaccuggacccucagcgacuccgagggcaacgagacgcccgggggcuacugccugacccgguggaugcugaucgaggccgagcucaagugcuucgggaacaccgccgucgccaagugcaacgagaagcacgacgaggaguucugcgacaugcugcgccuguucgacuucaacaagcaggcgauccggcgccucaagaccgaggcccagaugagcauccagcugaucaacaaggccgugaacgcccugaucaacgaccagcucaucaugaagaaccaccuccgggacaucaugggcauccccuacugcaacuacuccaaguacugcuaccugaaccacacggugaccgggaagaccagccugccccgcugcugccuggucuccaacggcagcuaccugaacgagacccacuucuccgacgacaucgagcagcaggccgacaacaugaucacggagcuccugcagaaggaguacauggaccggcagggcaagaccccgcuggggcugguggaccucuucguguucagcaccuccuucuaccugaucagcaucuuccugcaccucguccgcaucccgacccaccggcacgugaucggcaagcccugccccaagccccaccgccugaaccacauggggaucugcuccugcggccuguacaagcacccgggggugcccgucaaguggaagcggugaggacuagucccuguucccagagcccacuuuuuuuucuuuuuuugaaauaaaauagccugucuuucagaucuaaaaaaaaaaaaaaaaaaaaaaaaaaaaaaaaaaaaaaaaaaaaaaaaaaaaaaaaaaaaaaaaaaaaaaaaaaaaaaaaaaaaaaaaaaaaaaaaaaaa

SEQ ID NO: 39058 - RNA, 1740 nt, Artificial Sequence
  mRNA product Design a-2 (A100) comprising derived and/or modified sequence from LASV(Lassa virus/H.sapiens-wt/NGA/2018/ISTH_0959;Clade II)__AVV65099__GPCmut11 (opt1)
aggagaguccgcucagccagguugcagaagcggcuuagcguguguccuaaucuucucucugcguguagguaggccugugccgcaaacaagcuuaccaugggccagaucaucaccuucuuccaggaggugccccacgucaucgaggaggugaugaacaucgugcugaucgcccucagccugcuggccauccucaaggggaucuacaacgucgugaccugcggccuguucgggcugguguccuuccuccugcugugcggccgcagcugcuccacgaccuacaagggggucuacgagcuccagacccuggagcuggacauggcgagccucaacaugaccaugccgcuguccugcacgaagaacaacagccaccacuacaucauggugggcaacgagaccggccuggagcucacccugaccaacacguccaucaucaaccacaaguucugcaaccugagcgacgcccacaagaagaaccucuacgaccacgcccugauguccaucaucagcaccuuccaccuguccauccccaacuucaaccaguacgaggccaugagcugcgacuucaacgggggcaagaucuccgugcaguacaaccucagccacgccuacgcgaucgacgccgccaaccacugcgggaccaucgccaacggcguccugcagaccuucaugcggauggcguggggcggguccuacaucgcccuggacagcggcaagggguccugggacugcaucaugacgagcuaccaguaccucaucauccagaacaccaccugggaggaccacugccaguucucccgccccagccccaucggcuaccuggggcugcucagccagcggacccgcgacaucuacaucucccggcgccugcugggcacguucaccuggacccucagcgacuccgagggcaacgagacccccgggggcuacugccugacgcgguggaugcugaucgaggccgagcucaagugcuucgggaacaccgccguggccaagugcaacgagaagcacgacgaggaguucugcgacaugcugcgccuguucgacuucaacaagcaggcgauccggcgccucaagaccgaggcccagaugagcauccagcugaucaacaaggccgugaacgcccugaucaacgaccagcucaucaugaagaaccaccuccgggacaucaugggcaucccguacugcaacuacuccaaguacugcuaccugaaccacaccgucacggggaagaccagccugccccgcugcugccugguguccaacggcagcuaccugaacgagacccacuucuccgacgacaucgagcagcaggccgacaacaugaucaccgagcuccugcagaaggaguacaucgaccggcagggcaagacgccccuggggcugguggaccucuucgucuucagcaccuccuucuaccugaucagcaucuuccugcaccucgugaagaucccgacccaccgccacgugaucggcaagcccugccccaagccccaccggcugaaccacauggggaucugcuccugcggccuguacaagcacccggggguccccgugaaguggaagcgcugaggacuagucccuguucccagagcccacuuuuuuuucuuuuuuugaaauaaaauagccugucuuucagaucuaaaaaaaaaaaaaaaaaaaaaaaaaaaaaaaaaaaaaaaaaaaaaaaaaaaaaaaaaaaaaaaaaaaaaaaaaaaaaaaaaaaaaaaaaaaaaaaaaaaa

SEQ ID NO: 39059 - RNA, 1740 nt, Artificial Sequence
  mRNA product Design a-2 (A100) comprising derived and/or modified sequence from LASV(LASV003-NIG-2008;Clade II)__AIT17580__GPCmut11 (opt1)
aggagaguccgcucagccagguugcagaagcggcuuagcguguguccuaaucuucucucugcguguagguaggccugugccgcaaacaagcuuaccaugggccagaucaucaccuucuuccaggaggugccccacgucaucgaggaggugaugaacaucgugcugaucgcccucagccugcuggccauccucaaggggaucuacaacgucgcgaccugcggccuguucgggcugguguccuuccuccugcugugcggccgcagcugcuccacgaccuacaaggggguguacgagcuccagacccuggagcuggacauggccagccucaacaugaccaugccgcuguccugcacgaagaacaacagccaccacuacaucauggucggcaacgagaccggccuggagcucacccugaccaacacguccaucaucaaccacaaguucugcaaccugagcgacgcccacaagaagaaccucuacgaccacgcccugauguccaucaucagcaccuuccaccuguccauccccaacuucaaccaguacgaggccaugagcugcgacuucaacgggggcaagaucuccgugcaguacaaccucagccacaccuacgcgguggacgccgccaaccacugcgggaccaucgccaacggcguccugcagacguucaugcggauggcguggggcggguccuacaucgcccuggacagcggcaagggguccugggacugcaucaugaccagcuaccaguaccucaucauccagaacaccaccugggaggaccacugccaguucucccgccccagccccaucggcuaccuggggcugcucagccagcggacgcgcgacaucuacaucucccggcgccugcugggcaccuucaccuggacccucagcgacuccgagagcaacgagacgccgggcggguacugccugacccgguggaugcugaucgaggccgagcucaagugcuucggcaacaccgccguggccaagugcaacgagaagcacgacgaggaguucugcgacaugcugcgccuguucgacuucaacaagcaggcgauccggcgccucaaggccgaggcccagauguccauccagcugaucaacaaggccgugaacgcccugaucaacgaccagcucaucaugaagaaccaccuccgggacaucauggggauccccuacugcaacuacagcaaguacugcuaccugaaccacaccgucacgggccgcaccucccugccccggugcugccuggugagcaacggguccuaccugaacgagacccacuucagcgacgacaucgagcagcaggcggacaacaugaucaccgagcuccugcagaaggaguacauggaccgccagggcaagacgccccugggccugguggaccucuucgucuucuccaccagcuucuaccugaucuccaucuuccugcaccucgugaagaucccgacccaccggcacgugaucgggaagcccugccccaagccccaccgccugaaccacaugggcaucugcagcugcgggcuguacaagcacccgggcguccccgugaaguggaagcggugaggacuagucccuguucccagagcccacuuuuuuuucuuuuuuugaaauaaaauagccugucuuucagaucuaaaaaaaaaaaaaaaaaaaaaaaaaaaaaaaaaaaaaaaaaaaaaaaaaaaaaaaaaaaaaaaaaaaaaaaaaaaaaaaaaaaaaaaaaaaaaaaaaaaa

SEQ ID NO: 39060 - RNA, 1740 nt, Artificial Sequence
  mRNA product Design a-2 (A100) comprising derived and/or modified sequence from LASV(LASV035-NIG-2009;Clade II)__AIT17588__GPCmut11 (opt1)
aggagaguccgcucagccagguugcagaagcggcuuagcguguguccuaaucuucucucugcguguagguaggccugugccgcaaacaagcuuaccaugggccagaucaucaccuucuuccaggaggugccccacgucaucgaggaggugaugaacaucgugcugaucgcccucagccugcuggccauccucaaggggaucuacaacgucgcgaccugcggccuguucgggcugguguccuuccuccugcugugcggccgcagcugcuccacgaccuacaaggggguguacgagcuccagacccuggagcuggacauggccagccucaacaugaccaugccgcuguccugcacgaagaacaacagccaccacuacaucauggucggcaacgagaccggccuggagcucacccugaccaacacguccaucaucaaccacaaguucugcaaccugagcgacgcccacaagaagaaccucuacgaccacgcccugauguccaucaucagcaccuuccaccuguccauccccaacuucaaccaguacgaggccaugagcugcgacuucaacgggggcaagaucuccgugcaguacaaccucagccacgcguacgccguggacgccgccaaccacugcgggaccaucgcgaacggcguccugcagaccuucaugcggauggccuggggcggguccuacaucgcccuggacagcggcaagggguccugggacugcaucaugacgagcuaccaguaccucaucauccagaacaccaccugggaggaccacugccaguucucccgccccagccccaucggcuaccuggggcugcucagccagcggacccgcgacaucuacaucucccggcgccugcugggcacguucaccuggacccucagcgacuccgagggcaacgagacccccgggggcuacugccugacgcgguggaugcugaucgaggccgagcucaagugcuucgggaacaccgccguggcgaagugcaacgagaagcacgacgaggaguucugcgacaugcugcgccuguucgacuucaacaagcaggccauccggcgccucaaggccgaggcccagaugagcauccagcugaucaacaaggccgugaacgcgcugaucaacgaccagcucaucaugaagaaccaccuccgggacaucaugggcauccccuacugcaacuacuccaaguacugcuaccugaaccacaccgucaccgggaagacgagccugccccgcugcugccugguguccaacggcagcuaccugaacgagacccacuucuccgacgacaucgagcagcaggccgacaacaugaucaccgagcuccugcagaaggaguacaucgaccggcagggcaagaccccgcuggggcugguggaccucuucgucuucagcacguccuucuaccugaucagcaucuuccugcaccucgugaagaucccgacccaccgccacgugaucggcaagcccugccccaagccccaccggcugaaccacauggggaucugcuccugcggccuguacaagcacccggggguccccgugaaguggaagcgcugaggacuagucccuguucccagagcccacuuuuuuuucuuuuuuugaaauaaaauagccugucuuucagaucuaaaaaaaaaaaaaaaaaaaaaaaaaaaaaaaaaaaaaaaaaaaaaaaaaaaaaaaaaaaaaaaaaaaaaaaaaaaaaaaaaaaaaaaaaaaaaaaaaaaa

SEQ ID NO: 39061 - RNA, 1740 nt, Artificial Sequence
  mRNA product Design a-2 (A100) comprising derived and/or modified sequence from LASV(LASV1000-NIG-2009;Clade II)__AIT17782__GPCmut11 (opt1)
aggagaguccgcucagccagguugcagaagcggcuuagcguguguccuaaucuucucucugcguguagguaggccugugccgcaaacaagcuuaccaugggccagaucaucaccuucuuccaggaggugccccacgucaucgaggaggugaugaacaucgugcugaucgcccucagccugcuggccauccucaaggggaucuacaacgucgcgaccugcggccuguucgggcugguguccuuccuccugcugugcggccgcagcugcuccacgaccuacaaggggguguacgagcuccagacccuggagcuggacauggccagccucaacaugaccaugccgcuguccugcacgaagaacaacagccaccacuacaucauggucggcaacgagaccggccuggagcucacccugaccaacacguccaucaucaaccacaaguucugcaaccugagcgacgcccacaagaagaaccucuacgaccacgcccugauguccaucaucagcaccuuccaccuguccauccccaacuucaaccaguacgaggccaugagcugcgacuucaacgggggcaagaucuccgugcaguacaaccucagccacaccuacgcgguggacgccgccaaccacugcgggaccaucgccaacggcguccugcagacguucaugcggauggcguggggcggguccuacaucgcccuggacagcggcaagggguccugggacugcaucaugaccagcuaccaguaccucaucauccagaacaccaccugggaggaccacugccaguucucccgccccagccccaucggcuaccuggggcugcucagccagcggacgcgcgacaucuacaucucccggcgccugcugggcaccuucaccuggacccucagcgacuccgagggcaacgagacgcccgggggcuacugccugacccgguggaugcugaucgaggccgagcucaagugcuucgggaacaccgccguggccaagugcaacgagaagcacgacgaggaguucugcgacaugcugcgccuguucgacuucaacaagcaggcgaucaagcggcucaagaccgaggcccagaugagcauccagcugaucaacaaggccgugaacgcccugaucaacgaccagcucaucaugaagaaccaccuccgcgacaucaugggcauccccuacugcaacuacuccaaguacugcuaccugaaccacacggucaccgggaagaccagccugccccggugcugccugguguccaacggcagcuaccugaacgagacccacuucuccgacgacaucgagcagcaggccgacaacaugaucacggagcuccugcagaaggaguacaucgaccgccagggcaagaccccgcuggggcugguggaccucuucgucuucagcaccuccuucuaccugaucagcaucuuccugcaccucgugaagaucccgacccaccggcacguggucggcaagcccugccccaagccccaccgccugaaccacauggggaucugcuccugcggccuguacaagcacccgggggugcccgugaaguggaagcggugaggacuagucccuguucccagagcccacuuuuuuuucuuuuuuugaaauaaaauagccugucuuucagaucuaaaaaaaaaaaaaaaaaaaaaaaaaaaaaaaaaaaaaaaaaaaaaaaaaaaaaaaaaaaaaaaaaaaaaaaaaaaaaaaaaaaaaaaaaaaaaaaaaaaa

SEQ ID NO: 39062 - RNA, 1740 nt, Artificial Sequence
  mRNA product Design a-2 (A100) comprising derived and/or modified sequence from LASV(LASV221-NIG-2010;Clade II)__AIT17624__GPCmut11 (opt1)
aggagaguccgcucagccagguugcagaagcggcuuagcguguguccuaaucuucucucugcguguagguaggccugugccgcaaacaagcuuaccaugggccagaucaucaccuucuuccaggaggugccccacgucaucgaggaggugaugaacaucgugcugaucgcccucagccugcuggccauccucaaggggaucuacaacgucgcgaccugcggccuguucgggcugguguccuuccuccugcugugcggccgcagcugcuccacgaccuacaaggggguguacgagcuccagacccuggagcuggacauggccagccucaacaugaccaugccgcuguccugcacgaagaacaacagccaccacuacaucauggucggcaacgagaccggccuggagcucacccugaccaacacguccaucaucaaccacaaguucugcaaccugagcgacgcccacaagaagaaccucuacgaccacgcccugauguccaucaucagcaccuuccaccuguccauccccaacuucaaccaguacgaggccaugagcugcgacuucaacgggggcaagaucuccgugcaguacaaccucagccacaccuacgcgaucgacgccgccaaccacugcgggaccaucgccaacggcgugcugcagacguucaugcggauggcguggggcggguccuacaucgcccuggacagcggcaagggguccugggacugcaucaugaccagcuaccaguaccucaucauccagaacaccaccugggaggaccacugccaguucucccgccccagccccaucggcuaccuggggcugcucagccagcggacgcgcgacaucuacaucucccggcgccugcugggcaccuucaccuggacccucagcgacuccgagggcaacgagacgcccgggggcuacugccugacccgguggaugcugaucgaggccgagcucaagugcuucgggaacaccgccgucgccaagugcaacgagaagcacgacgaggaguucugcgacaugcugcgccuguucgacuucaacaagcaggcgauccggcgccucaagaccgaggcccagaugagcauccagcugaucaacaaggccgugaacgcccugaucaacgaccagcucaucaugaagaaccaccuccgggacaucaugggcauccccuacugcaacuacuccaaguacugcuaccugaaccacacggugaccgggaagaccagccugccccgcugcugccuggucuccaacggcagcuaccugaacgagacccacuucuccgacgacaucgagcagcaggccgacaacaugaucacggagaugcuccagaaggaguacauggaccggcagggcaagaccccgcuggggcugguggaccuguucguguucagcaccuccuucuaccucaucagcaucuuccugcaccuggucaagaucccgacccaccgccacgugaucggcaagcccugccccaagccccaccggcucaaccacauggggaucugcuccugcggccuguacaagcacccgggggugcccgucaaguggaagcgcugaggacuagucccuguucccagagcccacuuuuuuuucuuuuuuugaaauaaaauagccugucuuucagaucuaaaaaaaaaaaaaaaaaaaaaaaaaaaaaaaaaaaaaaaaaaaaaaaaaaaaaaaaaaaaaaaaaaaaaaaaaaaaaaaaaaaaaaaaaaaaaaaaaaaa

SEQ ID NO: 39063 - RNA, 1740 nt, Artificial Sequence
  mRNA product Design a-2 (A100) comprising derived and/or modified sequence from LASV(LASV237-NIG-2010;Clade II)__AIT17638__GPCmut11 (opt1)
aggagaguccgcucagccagguugcagaagcggcuuagcguguguccuaaucuucucucugcguguagguaggccugugccgcaaacaagcuuaccaugggccagaucaucaccuucuuccaggaggugccccacgucaucgaggaggugaugaacaucgugcugaucgcccucagccugcuggccauccucaaggggaucuacaacgucgcgaccugcggccuguucgggcugguguccuuccuccugcugugcggccgcagcugcuccacgaccuacaaggggguguacgagcuccagacccuggagcuggacauggccagccucaacaugaccaugccgcuguccugcacgaagaacaacagccaccacuacaucauggucggcaacgagaccggccuggagcucacccugaccaacacguccaucaucaaccacaaguucugcaaccugagcgacgcccacaagaaggaccucuacgaccacgcccugauguccaucaucagcaccuuccaccuguccauccccaacuucaaccaguacgaggccaugagcugcgacuucaacgggggcaagaucuccgugcaguacaaccucagccacaccuacgcgguggacgccgccaaccacugcgggaccaucgccaacggcguccugcagacguucaugcggauggcguggggcggguccuacaucgcccuggacagcggcaagggguccugggacugcaucaugaccagcuaccaguaccucaucauccagaacaccaccugggaggaccacugccaguucucccgccccagccccaucggcuaccuggggcugcucagccagcggacgcgcgacaucuacaucucccggcgccugcugggcaccuucaccuggacccucagcgacuccgagggcaacgagacgcccgggggcuacugccugacccgguggaugcugaucgaggccgagcucaagugcuucgggaacaccgccguggccaagugcaacgagaagcacgacgaggaguucugcgacaugcugcgccuguucgacuucaacaagcaggcgauccggcgccucaagaccgaggcccagaugagcauccagcugaucaacaaggccgugaacgcccugaucaacgaccagcucaucaugaagaaccaccuccgggacaucaugggcauccccuacugcaacuacuccaaguacugcuaccugaaccacacggucaccgggaagaccagccugccccgcugcugccugguguccaacggcagcuaccugaacgagacccacuucuccgacgacaucgagcagcaggccgacaacaugaucacggagcuccugcagaaggaguacauggaccggcagggcaagaccccgcuggggcugguggaccucuucgucuucagcaccuccuucuaccugaucagcaucuuccugcaccucaucaagaucccgacccaccgccacaucacgggcaagcccugccccaagccccaccggcugaaccacauggggaucugcuccugcggccuguacaagcacccgggggugcccgugaaguggaagcgcugaggacuagucccuguucccagagcccacuuuuuuuucuuuuuuugaaauaaaauagccugucuuucagaucuaaaaaaaaaaaaaaaaaaaaaaaaaaaaaaaaaaaaaaaaaaaaaaaaaaaaaaaaaaaaaaaaaaaaaaaaaaaaaaaaaaaaaaaaaaaaaaaaaaaa

SEQ ID NO: 39064 - RNA, 1740 nt, Artificial Sequence
  mRNA product Design a-2 (A100) comprising derived and/or modified sequence from LASV(LASV253-NIG-2011;Clade II)__AIT17670__GPCmut11 (opt1)
aggagaguccgcucagccagguugcagaagcggcuuagcguguguccuaaucuucucucugcguguagguaggccugugccgcaaacaagcuuaccaugggccagaucaucaccuucuuccaggaggugccccacgucaucgaggaggugaugaacaucgugcugaucgcccucagccugcuggccauccucaaggggaucuacaacgucgcgaccugcggccuguucgggcugguguccuuccuccugcugugcggccgcagcugcuccacgaccuacaaggggguguacgagcuccagacccuggagcuggacauggccagccucaacaugaccaugccgcuguccugcacgaagaacaacagccaccacuacaucauggucggcaacgagaccggccuggagcucacccugaccaacacguccaucaucaaccacaaguucugcaaccugagcgacgcccacaagaagaaccucuacgaccacgcccugauguccaucaucagcaccuuccaccuguccauccccaacuucaaccaguacgaggccaugagcugcgacuucaacgggggcaagaucuccgugcaguacaaccucagccacaccuacgcgguggacgccgccaaccacugcgggaccaucgccaacggcguccugcagacguucaugcggauggcguggggcggguccuacaucgcccuggacagcggcaagggguccugggacugcaucaugaccagcuaccaguaccucaucauccagaacaccaccugggaggaccacugccaguucucccgccccagccccaucggcuaccuggggcugcucagccagcggacgcgcgacaucuacaucucccggcgccugcugggcaccuucaccuggacccucagcgacuccgagggcaacgagacgcccgggggcuacugccugacccgguggaugcugaucgaggccgagcucaagugcuucgggaacaccgccguggccaagugcaacgagaagcacgacgaggaguucugcgacaugcugcgccuguucgacuucaacaagcaggcgauccggcgccucaaggccgaggcccagaugagcauccagcugaucaacaaggccgugaacgcccugaucaacgaccagcucaucaugaagaaccaccuccgggacaucaugggcaucccguacugcaacuacuccaaguacugcuaccugaaccacaccgucacggggcgcaccagccugccccggugcugccugguguccaacggcagcuaccugaacgagacccacuucuccgacgacaucgagcagcaggcggacaacaugaucaccgagcuccugcagaaggaguacaucgaccgccagggcaagacgccccuggggcugguggaccucuucgucuucagcaccuccuucuaccugaucagcaucuuccugcaccucgugaagaucccgacccaccggcacaucaucggcaagcccugccccaagccccaccgccugaaccacauggggaucugcuccugcggccuguacaagcacccgggggugcccgucaaguggaagcggugaggacuagucccuguucccagagcccacuuuuuuuucuuuuuuugaaauaaaauagccugucuuucagaucuaaaaaaaaaaaaaaaaaaaaaaaaaaaaaaaaaaaaaaaaaaaaaaaaaaaaaaaaaaaaaaaaaaaaaaaaaaaaaaaaaaaaaaaaaaaaaaaaaaaa

SEQ ID NO: 39065 - RNA, 1740 nt, Artificial Sequence
  mRNA product Design a-2 (A100) comprising derived and/or modified sequence from LASV(LASV254-NIG-2011;Clade II)__AIT17674__GPCmut11 (opt1)
aggagaguccgcucagccagguugcagaagcggcuuagcguguguccuaaucuucucucugcguguagguaggccugugccgcaaacaagcuuaccaugggccagaucaucaccuucuuccaggaggugccccacgucaucgaggaggugaugaacaucgugcugaucgcccucagccugcuggccauccucaaggggaucuacaacgucgcgaccugcggccuguucgggcugguguccuuccuccugcugugcggccgcagcugcuccacgaccuacaaggggguguacgagcuccagacccuggagcuggacaugaccaaccucaacaugacgaugccgcugagcugcaccaagaacaacucccaccacuacaucauggucggcaacgagaccggccuggagcucacccugacgaacaccagcaucaucaaccacaaguucugcaaccuguccgacgcccacaagaagaaccucuacaaccacgcccugaugagcaucaucuccaccuuccaccugagcauccccaacuucaaccaguacgaggccauguccugcgacuucaacgggggcaagaucagcgugcaguacaaccucucccacagcuacgccguggacgcggccaaccacugcgggaccaucgccaacggcguccugcagacguucaugcggauggccuggggcggguccuacaucgcgcuggacagcggcaaggggaacugggacugcaucaugaccuccuaccaguaccucaucauccagaacaccaccugggaggaccacugccaguucagccgccccucccccaucggcuaccuggggcugcucagccagcggacgcgcgacaucuacaucagccggcgccugcugggcaccuucaccuggacccucuccgacagcgagggcaacgagacgcccgggggcuacugccugacccgguggaugcugaucgaggccgagcucaagugcuucgggaacaccgccguggccaagugcaacgagaagcacgacgaggaguucugcgacaugcugcgccuguucgacuucaacaagcaggccauccggcgccucaagaccgaggcgcaggccaacauccagcugaucaacaaggccgugaacgcccugaucaacgaccagcucaucaugaagaaccaccuccgggacaucaugggcauccccuacugcaacuacuccaaguacugcuaccugaaccacacggucaccgggaagaccagccugccccgcugcugccugguguccaacggcagcuaccugaacgagacccacuucuccgacgacaucgagcagcaggccgacaacaugaucacggagcuccugcagaaggaguacauggaccggcagggcaagaccccgcuggggcugguggaccucuucgucuucagcaccuccuucuaccugaucagcaucuuccugcaccucgugaagaucccgacccaccgccacgugaucggcaagcccugccccaagccccaccggcugaaccacauggggaucugcuccugcggccuguacaagcacccggggguccccgugaaguggaagcgcugaggacuagucccuguucccagagcccacuuuuuuuucuuuuuuugaaauaaaauagccugucuuucagaucuaaaaaaaaaaaaaaaaaaaaaaaaaaaaaaaaaaaaaaaaaaaaaaaaaaaaaaaaaaaaaaaaaaaaaaaaaaaaaaaaaaaaaaaaaaaaaaaaaaaa

SEQ ID NO: 39066 - RNA, 1740 nt, Artificial Sequence
  mRNA product Design a-2 (A100) comprising derived and/or modified sequence from LASV(Nig08-A19;Clade III)__ADU56618__GPCmut11 (opt1)
aggagaguccgcucagccagguugcagaagcggcuuagcguguguccuaaucuucucucugcguguagguaggccugugccgcaaacaagcuuaccaugggccagaucgugaccuucuuccaggaggucccccacgugaucgaggaggugaugaacaucguccugaucgcccucagcauccuggccauccugaaggggcucuacaacaucgcgaccugcggccugaucgggcuggugacguuccuccugcuguccggccgcagcugcuccaugaccuacaaggggguguacgagcuccagacccuggagcugaacaugaacacccucaacaugacgaugccgcugagcugcaccaagaacaacucccaccacuacaucauggucggcaacgagaccggccuggagcucacccugacgaacaccagccugcuccaccacaaguucugcaaccuguccgacgcccacaagaagaaccuguacgaccacacccucaugagcaucaucuccaccuuccaccugagcauccccaacuucaaccaguacgaggccauguccugcgacuucaacgggggcaagaucacggugcaguacaaccugagccacuccuacgccaucgacgccgcgaaccacugcgggaccguggccaacggcguccuccagaccuucaugcggauggccuggggcgggagcuacaucgcccuggacuccggccgcgggaagugggacugcaucaugaccagcuaccaguaccugaucauccagaacacgaccugggaggaccacugccaguucucccggcccagccccaucggcuaccucgggcugcugucccagcgcacccgggacaucuacaucagccgccggcuccugggcaccuucacguggacccugagcgacuccgagggcaacgagacccccgggggcuacugccucacccgcuggaugcugaucgaggcggagcugaagugcuucgggaacacggccguggccaagugcaacgagaagcacgacgaggaguucugcgacaugcuccggcuguucgacuucaacaagcaggccauccgccggcugaaggccgaggcgcagaugagcauccagcucaucaacaaggccgugaacgcccugaucaacgaccagcugaucaugaagaaccaccuccgcgacaucaugggcauccccuacugcaacuacuccaaguacugcuaccugaaccacaccagcaccgggcggaccucccugccccgcugcugccucgucagcaacggcuccuaccugaacgagacgcacuucagcgacgacaucgagcagcaggccgacaacaugaucaccgagaugcugcagaaggaguaccuggaccggcagggcaagaccccgcucgggcugguggaccuguucguguucuccaccagcuucuaccucaucuccaucuuccugcaccuggucaagaucccgacgcaccgccacaucgugggcaagcccugccccaagccccaccggcucaaccacauggggaucugcagcugcggccuguacaagcagccgggggugcccguccgcuggaagcggugaggacuagucccuguucccagagcccacuuuuuuuucuuuuuuugaaauaaaauagccugucuuucagaucuaaaaaaaaaaaaaaaaaaaaaaaaaaaaaaaaaaaaaaaaaaaaaaaaaaaaaaaaaaaaaaaaaaaaaaaaaaaaaaaaaaaaaaaaaaaaaaaaaaaa

SEQ ID NO: 39067 - RNA, 1743 nt, Artificial Sequence
  mRNA product Design a-2 (A100) comprising derived and/or modified sequence from LASV(G1180-SLE-2010;Clade IV)__AIT17168__GPCmut11 (opt1)
aggagaguccgcucagccagguugcagaagcggcuuagcguguguccuaaucuucucucugcguguagguaggccugugccgcaaacaagcuuaccaugggccagaucgugaccuucuuccaggaggucccccacgugaucgaggaggugaugaacaucguccugaucgcccucagcauccuggccgugcugaaggggcucuacaacuucgcgaccugcggccugguggggcugcucaccuuccugcugcucugcggccgcuccugcaccgccagccgguacaagggggucuacgagcugcagacccuggagcucaacauggagacccugaacaugacgaugccgcuguccugcaccaagaacaacagccaccacuacaucauggugggcaacgagaccggccucgagcugacccugacgaacaccuccaucaucaaccacaaguucugcaaccucagcgacgcccacaagaagaaccuguacgaccacgcccugauguccaucaucagcaccuuccaccucuccauccccaacuucaaccaguacgaggccaugagcugcgacuucaacgggggcaagaucuccgugcaguacaaccugagccacuccuacgcgggggacgccgccaaccacugcggcaccgucgccaacggggugcugcagacguucaugcgcauggcguggggcggcagcuacaucgcccucgacuccgggcacggcagcugggacugcaucaugaccuccuaccaguaccugaucauccagaacaccaccugggaggaccacugccaguucagccggcccucccccaucggguaccugggccuccugagccagcgcacgcgggacaucuacaucagccgccggcugcucggcaccuucaccuggacccuguccgacagcgaggggaaggacacgccgggcggguacugccugacccgcuggaugcucaucgaggccgagcugaagugcuucggcaacaccgccguggccaagugcaacgagaagcacgacgaggaguucugcgacaugcugcggcuguucgacuucaacaagcaggcgauccagcgccugaaggccgaggcccagauguccauccagcugaucaacaaggccgucaacgcccucaucaacgaccagcugaucaugaagaaccaccuccgggacaucauggggauccccuacugcaacuacagcaaguacugcuaccucaaccacaccacgaccggcaagaccucccugcccaagugcugccuggugagcaacggcuccuaccucaacgagacccacuucagcgacgacaucgagcagcaggcggacaacaugaucacggagaugcugcagaaggaguacauggagcgccaggggaagacgccccugggccugguggaccucuucgucuucuccaccagcuucuaccugaucuccaucuuccugcaccucgugaagaucccgacccaccggcacaucgugggcaagagcugccccaagccccaccgccugaaccacauggggaucugcuccugcgggcuguacaagcagcccggcgucccggugaaguggaagcggugaggacuagucccuguucccagagcccacuuuuuuuucuuuuuuugaaauaaaauagccugucuuucagaucuaaaaaaaaaaaaaaaaaaaaaaaaaaaaaaaaaaaaaaaaaaaaaaaaaaaaaaaaaaaaaaaaaaaaaaaaaaaaaaaaaaaaaaaaaaaaaaaaaaaa

SEQ ID NO: 39068 - RNA, 1743 nt, Artificial Sequence
  mRNA product Design a-2 (A100) comprising derived and/or modified sequence from LASV(G1442-SLE-2011;Clade IV)__AIT17180__GPCmut11 (opt1)
aggagaguccgcucagccagguugcagaagcggcuuagcguguguccuaaucuucucucugcguguagguaggccugugccgcaaacaagcuuaccaugggccagaucgugaccuucuuccaggaggucccccacgugaucgaggaggugaugaacaucguccugaucgcccucagcauccuggccgugcugaaggggcucuacaacguggcgaccugcggccugaucgggcuggucacguuccuccugcugugcggccgcuccugcaccaccacccucuacaaggggguguacgagcugcagacgcuggagcucaacauggagacccugaacaugaccaugccgcugagcugcaccaagaacaacucccaccacuacauccgggugggcaacgagacgggccucgagcugacccugaccaacaccagcaucaucaaccacaaguucugcaaccucuccgacgcccacaagaagaaccuguacgaccacgcccugaugagcaucaucuccacguuccaccucagcauccccaacuucaaccaguacgaggccauguccugcgacuucaacgggggcaagaucagcguccaguacaaccugucccacagcuacgccggggacgcggccaaccacugcggcaccguggccaacggggugcugcagaccuucaugcgcauggccuggggcggcuccuacaucgcgcucgacagcgggcggggcaacugggacugcaucaugaccuccuaccaguaccugaucauccagaacacgaccugggacgaccacugccaguucagccgccccucccccaucggguaccugggccuccugagccagcggacccgcgacgucuacaucucccggcgccugcucggcaccuucacguggacccugagcgacagcgaggggaaggacaccccgggcggguacugccugacccgguggaugcucaucgaggccgagcugaagugcuucggcaacacggccguggccaagugcaacgagaagcacgacgaggaguucugcgacaugcugcgccucuucgacuucaacaagcaggccauccagcggcugaaggcggaggcccagauguccauccagcugaucaacaaggccgugaacgcccucaucaacgaccagcugaucaugaagaaccaccuccgcgacaucauggggauccccuacugcaacuacagcaaguacugcuaccugaacaacaccgccaccggcaagaccucccugcccaagugcugccugaucagcaacggcuccuaccucaacgagacgcacuucagcgacgacaucgagcaggaggcggacaacaugaucaccgagaugcugcagaaggaguacauggagcggcaggggaagacgccccugggccuggucgaccucuucguguucuccaccagcuucuaccugaucuccaucuuccugcaccucgugaagaucccgacccaccgccacaucgucggcaagagcugccccaagccccaccggcugaaccacauggggaucugcuccugcgggcuguacaagcagcccggcgugccggugcgcuggaagcggugaggacuagucccuguucccagagcccacuuuuuuuucuuuuuuugaaauaaaauagccugucuuucagaucuaaaaaaaaaaaaaaaaaaaaaaaaaaaaaaaaaaaaaaaaaaaaaaaaaaaaaaaaaaaaaaaaaaaaaaaaaaaaaaaaaaaaaaaaaaaaaaaaaaaa

SEQ ID NO: 39069 - RNA, 1743 nt, Artificial Sequence
  mRNA product Design a-2 (A100) comprising derived and/or modified sequence from LASV(G3010-SLE-2013;Clade IV)__AIT17344__GPCmut11 (opt1)
aggagaguccgcucagccagguugcagaagcggcuuagcguguguccuaaucuucucucugcguguagguaggccugugccgcaaacaagcuuaccaugggccagaucgugaccuucuuccaggaggucccccacgugaucgaggaggugaugaacaucguccugaucgcccucagcauccuggccgugcugaaggggcucuacaacuucgcgaccugcggccugguggggcuggucacguuccuccugcugugcggccgcuccugcaccaccagccucuacaaggggguguacgagcugcagacccuggagcucaacauggagacgcugaacaugaccaugccgcuguccugcaccaagaacaacagccaccacuacaucauggugggcaacgagaccggccucgagcugacgcugaccaacaccuccaucaucaaccacaaguucugcaaccucagcgacgcccacaagaagaaccuguacaaccacgcccugauguccaucaucagcaccuuccaccucuccauccccaacuucaaccaguacgaggccaugagcugcgacuucaacgggggcaagaucuccguccaguacaaccugagccacuccuacgccggggacgcggccagccacugcggcacgguggccaacggggugcugcagaccuucaugcggauggccuggggcggcuccuacaucgcgcucgacagcggguacggcaagugggacugcaucaugaccuccuaccaguaccugaucauccagaacaccacgugggaggaccacugccaguucagccgccccucccccaucggguaccugggccuccugagccagcggacccgcgacaucuacaucagccggcgccugcucggcaccuucaccuggacgcuguccgacagcgaggggaaggacaccccgggcggguacugccugacccgguggaugcucaucgaggccgagcugaagugcuucggcaacaccgccgucgccaagugcaacgagaagcacgacgaggaguucugcgacaugcugcgccucuucgacuucaacaagcaggccauccagcggcugaagacggaggcgcagauguccauccagcugaucaacaaggccgugaacgcccucaucaacgaccagcugaucaugaagaaccaccuccgcgacaucauggggauccccuacugcaacuacagcaaguacugcuaccugaaccacaccaccaccggcaagacgucccugcccaagugcugccuggugagcaacggcuccuaccucaacgagacccacuucagcgacgacaucgagcagcaggccgacaacaugaucaccgagaugcugcagaaggaguacauggagcggcaggggaagacgccccugggccuggucgaccucuucguguucuccaccagcuucuaccugaucuccaucuuccugcaccucgugaagaucccgacccaccgccacaucgucggcaagagcugccccaagccccaccggcugaaccacauggggaucugcuccugcgggcuguacaagcagcccggcgugccggugcgcuggaagcggugaggacuagucccuguucccagagcccacuuuuuuuucuuuuuuugaaauaaaauagccugucuuucagaucuaaaaaaaaaaaaaaaaaaaaaaaaaaaaaaaaaaaaaaaaaaaaaaaaaaaaaaaaaaaaaaaaaaaaaaaaaaaaaaaaaaaaaaaaaaaaaaaaaaaa

SEQ ID NO: 39070 - RNA, 1743 nt, Artificial Sequence
  mRNA product Design a-2 (A100) comprising derived and/or modified sequence from LASV(G502-SLE-2009;Clade IV)__AIT17126__GPCmut11 (opt1)
aggagaguccgcucagccagguugcagaagcggcuuagcguguguccuaaucuucucucugcguguagguaggccugugccgcaaacaagcuuaccaugggccagaucgugaccuucuuccaggaggucccccacgugaucgaggaggugaugaacaucguccugaucgcccucagcauccuggccgugcugaaggggcucuacaacuucgcgaccugcggccugguggggcugcucacguuccugcugcucugcggccgcuccugcaccaccgggcuguacaagggcgucuacgagcugcagacccucgagcugaacauggagacgcugaacaugaccaugccgcucagcugcaccaagaacaacucccaccacuacaucauggugggcaacgagaccgggcuggagcugacgcucaccaacaccagcaucaucaaccacaaguucugcaaccuguccgacgcccacaagaagaaccuguacgaccacgcccucaugagcaucaucuccaccuuccaccugagcauccccaacuucaaccaguacgaggccauguccugcgacuucaacggcgggaagaucagcgugcaguacaaccugucccacagcuacgccggcgacgcggccgaccacugcgggacggucgccaacggcgugcuccagaccuucaugcggauggccuggggcggguccuacaucgcgcuggacagcggccgcgggcggugggacugcaucaugaccuccuaccaguaccugaucauccagaacaccacgugggaggaccacugccaguucagccgccccucccccaucggcuaccucggccugcugagccagcggacccgcgacaucuacaucucccggcgccuccuggggaccuucaccuggacgcugagcgacagcgagggcaaggacacccccgggggcuacugccucacccgguggaugcugaucgaggccgagcugaagugcuucgggaacaccgccguggccaagugcaacgagaagcacgacgaggaguucugcgacaugcuccgccuguucgacuucaacaagcaggccauccagcggcugaaggcggaggcccagauguccauccagcucaucaacaaggccgucaacgcccugaucaacgaccagcuggugaugaagaaccaccuccgcgacaucaugggcauccccuacugcaacuacagccgguacugcuaccugaaccacacgaccaccggccgcaccucccugcccaagugcugccucgugagcaacggguccuaccugaacgagacgcacuucagcgacgacaucgagcagcaggccgacaacaugaucaccgagaugcugcagaaggaguacauggagcggcagggcaagaccccgcuggggcucgucgaccuguucguguucuccaccagcuucuaccugaucuccaucuuccuccaccuggugaagaucccgacgcaccgccacaucgucggcaagagcugccccaagccccaccggcugaaccacauggggaucugcuccugcggccucuacaagcagcccggcgugccggugaaguggaagcgcugaggacuagucccuguucccagagcccacuuuuuuuucuuuuuuugaaauaaaauagccugucuuucagaucuaaaaaaaaaaaaaaaaaaaaaaaaaaaaaaaaaaaaaaaaaaaaaaaaaaaaaaaaaaaaaaaaaaaaaaaaaaaaaaaaaaaaaaaaaaaaaaaaaaaa

SEQ ID NO: 39071 - RNA, 1743 nt, Artificial Sequence
  mRNA product Design a-2 (A100) comprising derived and/or modified sequence from LASV(G733-SLE-2010;Clade IV)__AIT17154__GPCmut11 (opt1)
aggagaguccgcucagccagguugcagaagcggcuuagcguguguccuaaucuucucucugcguguagguaggccugugccgcaaacaagcuuaccaugggccagaucgugaccuucuuccaggaggucccccacgugaucgaggaggugaugaacaucguccugaucgcccucagcauccuggccgugcugaaggggcucuacaacuucgcgaccugcggcaucguggggcuggucuccuuccugcuccugugcggccgcagcugcacgaccucccuguacaaggggguguacgagcuccagacccuggagcugaacauggagacccucaacaugacgaugccgcugagcugcaccaagaacaacucccaccacuacaucauggugggcaacgagaccggccuggagcucacccugacgaacaccagcaucaucaaccacaaguucugcaaccuguccgacgcccacaagaagaaccucuacgaccacgcccugaugagcaucaucuccaccuuccaccugagcauccccaacuucaaccaguacgaggccauguccugcgacuucaacgggggcaagaucagcguccaguacaaccucucccacagcuacgccggggacgcggccaaccacugcggcaccaucgccaacggggugcugcagacguucaugcggauggccuggggcggcuccuacaucgcgcuggacagcgggcgcgaccggugggacugcaucaugaccuccuaccaguaccucaucauccagaacaccaccugggaggaccacugccaguucagccgccccucccccaucggcuaccuggggcugcucagccagcggacgcgcgacaucuacaucagccggcgccugcugggcaccuucaccuggacccucuccgacagcgagggcaaggacacgcccgggggcuacugccugacccgguggaugcugaucgaggccgagcucaagugcuucgggaacaccgccguggccaagugcaacgagaagcacgacgaggaguucugcgacaugcugcgccuguucgacuucaacaagcaggccauccagcggcucaaggcggaggcccagauguccauccagcugaucaacaaggccgucaacgcccugaucaacgaccagcucaucaugaagaaccaccuccgcgacaucaugggcauccccuacugcaacuacagcaaguacugcuaccugaaccacaccacgaccgggaagaccucccugcccaagugcugccuggugagcaacggcuccuaccugaacgagacccacuucagcgacgacaucgagcagcaggccgacaacaugaucacggagaugcuccagaaggaguacauggagcggcagggcaagaccccgcuggggcugguggaccuguucgucuucuccaccagcuucuaccucaucuccaucuuccugcaccuggugaagaucccgacccaccgccacguggucggcaagagcugccccaagccccaccggcucaaccacauggggaucugcuccugcggccuguacgggcagcccggcgugccggugaaguggaagcgcugaggacuagucccuguucccagagcccacuuuuuuuucuuuuuuugaaauaaaauagccugucuuucagaucuaaaaaaaaaaaaaaaaaaaaaaaaaaaaaaaaaaaaaaaaaaaaaaaaaaaaaaaaaaaaaaaaaaaaaaaaaaaaaaaaaaaaaaaaaaaaaaaaaaaa

SEQ ID NO: 39072 - RNA, 1743 nt, Artificial Sequence
  mRNA product Design a-2 (A100) comprising derived and/or modified sequence from MOPV/LASV reassortant(IGS-1;Clade IV)__AFY05576__GPCmut11 (opt1)
aggagaguccgcucagccagguugcagaagcggcuuagcguguguccuaaucuucucucugcguguagguaggccugugccgcaaacaagcuuaccaugggccagaucgugaccuucuuccaggaggucccccacgugaucgaggaggugaugaacaucguccugaucgcccucagcgugcuggccgugcugaaggggcucuacaacuucgcgaccugcggccuggucgggcuggugacguuccuccugcugugcggccgcuccugcaccaccagccucuacaaggggguguacgagcugcagacccuggagcucaacauggagacgcugaacaugaccaugccgcuguccugcaccaagaacaacagccaccacuacaucauggucggcaacgagaccggccucgagcugacgcugaccaacaccuccaucaucaaccacaaguucugcaaccucagcgacgcccacaagaagaaccuguacgaccacgcccugauguccaucaucagcaccuuccaccucuccauccccaacuucaaccaguacgaggccaugagcugcgacuucaacgggggcaagaucuccgugcaguacaaccugagccacuccuacgccggggacgcggccaaccacugcggcacgguggccaacgggguccugcagaccuucaugcggauggccuggggcggcagcuacaucgcgcucgacuccgggcgcggcaacugggacugcaucaugaccagcuaccaguaccugaucauccagaacaccacgugggaggaccacugccaguucucccggcccagccccaucggguaccugggccuccugucccagcgcacccgggacaucuacaucagccgccggcugcucggcaccuucaccuggacgcugagcgacuccgagggggaggacaccccgggcggguacugccugacccgcuggaugcucaucgaggccgagcugaagugcuucggcaacaccgccguggccaagugcaacgagaagcacgacgaggaguucugcgacaugcugcggcuguucgacuucaacaagcaggccauccagcgccugaaggcggaggcccagaugagcauccagcugaucaacaaggccgugaacgcccucaucaacgaccagcugaucaugaagaaccaccuccgggacaucauggggauccccuacugcaacuacuccaaguacugcuaccucaaccacacgaccaccggccgcaccagccugcccaagugcugccuggucuccaacggcagcuaccucaacgagacgcacuucuccgacgacaucgagcagcaggccgacaacaugaucaccgagaugcugcagaaggaguacauggagcggcaggggaagacgccccugggccugguggaccucuucguguucagcaccuccuucuaccugaucagcaucuuccugcaccucgucaagaucccgacccaccgccacaucguggggaaguccugccccaagccccaccggcugaaccacaugggcaucugcagcugcgggcuguacaagcagcccggcgugccggucaaguggaagcgcugaggacuagucccuguucccagagcccacuuuuuuuucuuuuuuugaaauaaaauagccugucuuucagaucuaaaaaaaaaaaaaaaaaaaaaaaaaaaaaaaaaaaaaaaaaaaaaaaaaaaaaaaaaaaaaaaaaaaaaaaaaaaaaaaaaaaaaaaaaaaaaaaaaaaa

SEQ ID NO: 39073 - RNA, 1743 nt, Artificial Sequence
  mRNA product Design a-2 (A100) comprising derived and/or modified sequence from LASV(LM765-SLE-2012;Clade IV)__AIT17814__GPCmut11 (opt1)
aggagaguccgcucagccagguugcagaagcggcuuagcguguguccuaaucuucucucugcguguagguaggccugugccgcaaacaagcuuaccaugggccagaucgugaccuucuuccaggaggucccccacgugaucgaggaggugaugaacaucguccugaucgcccucagcauccuggccgugcugaaggggcucuacaacuucgcgaccugcggccugguggggcuggucacguuccuccugcugugcggccgcuccugcaccaccagccucuacaaggggguguacgagcugcagacccuggagcucaacauggagacgcugaacaugaccaugccgcuguccugcaccaagaacaacagccaccacuacaucauggugggcaacgagaccggccucgagcugacgcugaccaacaccuccaucaucgaccacaaguucugcaaccucagcgacgcccaccggaagaaccuguacgaccacgcccugauguccaucaucagcaccuuccaccucuccauccccaacuucaaccaguacgaggccaugagcugcgacuucaacgggggcaagaucuccguccaguacaaccugagccacuccuacgccaaggacgcggccgaccacugcgggacgguggccaacggcgugcugcagaccuucaugcgcauggccuggggcgggagcuacaucgcgcucgacuccggccgggggcgcugggacugcaucaugaccagcuaccaguaccugaucauccagaacaccacgugggaggaccacugccaguucucccggcccagccccaucggcuaccuggggcuccugucccagcgcacccgggacaucuacaucagccgccggcugcucggcaccuucaccuggacgcugagcgacuccgagggcaaggacacccccgggggcuacugccugacccgcuggaugcucaucgaggccgagcugaagugcuucgggaacaccgccgucgccaagugcaacgagaagcacgacgaggaguucugcgacaugcugcggcuguucgacuucaacaagcaggccauccagcgccugaaggcggaggcccagaugagcauccagcugaucaacaaggccgugaacgcccucaucaacgaccagcugaucaugaagaaccaccuccgggacaucaugggcauccccuacugcaacuacuccaaguacugcuaccucaaccacacgaccaccgggaagaccagccugcccaagugcugccugguguccaacggcagcuaccucaacgagacgcacuucuccgacgacaucgagcagcaggccgacaacaugaucaccgagaugcugcagaaggaguacauggagcgccagggcaagaccccgcuggggcuggucgaccucuucguguucagcaccuccuucuaccugaucagcaucuuccugcaccucgugaagaucccgacgcaccggcacaucgucggcaagcccugccccaagccccaccgccugaaccacauggggaucugcuccugcggccuguacaagcagccgggggugcccgugaaguggaagcggugaggacuagucccuguucccagagcccacuuuuuuuucuuuuuuugaaauaaaauagccugucuuucagaucuaaaaaaaaaaaaaaaaaaaaaaaaaaaaaaaaaaaaaaaaaaaaaaaaaaaaaaaaaaaaaaaaaaaaaaaaaaaaaaaaaaaaaaaaaaaaaaaaaaaa

SEQ ID NO: 39074 - RNA, 1743 nt, Artificial Sequence
  mRNA product Design a-2 (A100) comprising derived and/or modified sequence from LASV(LM776-SLE-2012;Clade IV)__AIT17824__GPCmut11 (opt1)
aggagaguccgcucagccagguugcagaagcggcuuagcguguguccuaaucuucucucugcguguagguaggccugugccgcaaacaagcuuaccaugggccagaucgugaccuucuuccaggaggucccccacgugaucgaggaggugaugaacaucguccugaucgcccucagcauccuggccgugcugaaggggcucuacaacuucgcgaccugcggccugguggggcuggucacguuccuccugcugugcggccgcuccugcaccaccagcguguacaaggggguguacgagcuccagacccuggagcugaacauggagacgcucaacaugaccaugccgcuguccugcaccaagaacaacagccaccacuacaucauggucggcaacgagaccggccuggagcucacgcugaccaacaccuccaucaucaaccacaaguucugcaaccugagcgacgcccacaagaagaaccucuacgaccacgcccugauguccaucaucagcaccuuccaccuguccauccccaacuucaaccaguacgaggccaugagcugcgacuucaacgggggcaagaucuccgugcaguacaaccucagccacuccuacgccggggacgcggccaaccacugcggcacgguggccaacgggguccugcagaccuucaugcggauggccuggggcggcagcuacaucgcgcuggacuccgggcacggcaagugggacugcaucaugaccagcuaccaguaccucaucauccagaacaccacgugggaggaccacugccaguucucccgccccagccccaucggguaccugggccugcucucccagcggacccgcgacaucuacaucagccggcgccugcugggcaccuucaccuggacgcucagcgacuccgaggggaaggacaccccgggcggguacugccugacccgguggaugcugaucgaggccgagcucaagugcuucggcaacaccgccguggccaagugcaacgagaagcacgacgaggaguucugcgacaugcugcgccuguucgacuucaacaagcaggccauccagcggcucaaggcggaggcccagaugagcauccagcugaucaacaaggccgugaacgcccugaucaacgaccagcucaucaugaagaaccaccuccgcgacaucauggggauccccuacugcaacuacuccaaguacugcuaccugaaccacacgaccaccggcaagaccagccugcccaagugcugccuggucuccaacggcagcuaccugaacgagacgcacuucuccgacgacaucgagcagcaggccgacaacaugaucaccgagaugcuccagaaggaguacauggagcggcaggggaagacgccccugggccugguggaccuguucguguucagcaccuccuucuaccucaucagcaucuuccugcaccuggucaagaucccgacccaccgccacaucguggggaaguccugccccaagccccaccggcucaaccacaugggcaucugcagcugcgggcuguacaagcagcccggcgugccgguccgcuggaagcggugaggacuagucccuguucccagagcccacuuuuuuuucuuuuuuugaaauaaaauagccugucuuucagaucuaaaaaaaaaaaaaaaaaaaaaaaaaaaaaaaaaaaaaaaaaaaaaaaaaaaaaaaaaaaaaaaaaaaaaaaaaaaaaaaaaaaaaaaaaaaaaaaaaaaa

SEQ ID NO: 39075 - RNA, 1743 nt, Artificial Sequence
  mRNA product Design a-2 (A100) comprising derived and/or modified sequence from LASV(Mad39;Clade IV)__ANH09722__GPCmut11 (opt1)
aggagaguccgcucagccagguugcagaagcggcuuagcguguguccuaaucuucucucugcguguagguaggccugugccgcaaacaagcuuaccaugggccagaucgugaccuucuuccaggaggucccccacgugaucgaggaggugaugaacaucguccugaucgcccucagcauccuggccgugcugaaggggcucuacaacguggcgaccugcggccugaucgggcuggucacguuccuccugcugugcggccgcuccugcaccaccacccucuacaaggggguguacgagcugcaggcccuggagcucaacauggagacgcugaacaugaccaugccgcugagcugcaccaagaacaacucccaccacuacauccgggugggcaacgagaccggccucgagcugacgcugaccaacaccagccucaucaaccacaaguucugcaaccuguccgacgcccacaagaagaaccuguacgaccacgcccucaugagcaucaucuccaccuuccaccugagcauccccaacuucaaccaguacgaggccauguccugcgacuucaacgacgggaagaucagcguccaguacaaccugucccacacguacgcgggcgacaccgccaaccacugcgggaccguggccaacggcgugcuccagaccuucaugcgcauggccuggggcgggagcuacaucgcgcuggacuccggccgcgggggcugggacugcaucaugacgagcuaccaguaccugaucauccagaacaccaccugggaggaccacugccaguucucccggcccagccccaucggguaccucggccugcugucccagcggacccgcgacaucuacaucagccggcgccuccugggcacguucaccuggacccuguccgacagcgaggggaaggacaccccgggcggguacugccucacgcgguggaugcugaucgaggccgagcugaagugcuucggcaacaccgccgucgccaagugcaacgagaagcacgacgaggaguucugcgacaugcuccgccuguucgacuucaacaagcaggccauccagcggcugaaggcggaggcccagaugagcauccagcucaucaacaaggccgugaacgcccugaucaacgaccagcugaucaugaagaaccaccuccgcgacaucauggggauccccuacugcaacuacuccaaguacugcuaccugaaccacaccgugaccggcaagacgagccugcccaagugcugccucgucuccaacggcagcuaccugaacgagacccacuucuccgacgacaucgagcagcaggccgacaacaugaucaccgagaugcugcagaaggaguacauggagcggcaggggaagacgccccugggccucguggaccuguucguguucagcaccuccuucuaccugaucagcaucuuccuccaccuggucaagaucccgacccaccgccacgugguggggaagcccugccccaagccccaccggcugaaccacaugggcaucugcuccugcggguucuacaagcagccgggcguccccgugcgcuggaagcggugaggacuagucccuguucccagagcccacuuuuuuuucuuuuuuugaaauaaaauagccugucuuucagaucuaaaaaaaaaaaaaaaaaaaaaaaaaaaaaaaaaaaaaaaaaaaaaaaaaaaaaaaaaaaaaaaaaaaaaaaaaaaaaaaaaaaaaaaaaaaaaaaaaaaa

SEQ ID NO: 39076 - RNA, 1743 nt, Artificial Sequence
  mRNA product Design a-2 (A100) comprising derived and/or modified sequence from LASV(Z0947-SLE-2011;Clade IV)__AIT17840__GPCmut11 (opt1)
aggagaguccgcucagccagguugcagaagcggcuuagcguguguccuaaucuucucucugcguguagguaggccugugccgcaaacaagcuuaccaugggccagaucgugaccuucuuccaggaggucccccacgugaucgaggaggugaugaacaucguccugaucgcccucagcauccuggccgugcugaaggggcucuacaacuucgcgaccugcggccugguggggcuggucacguuccuccugcugugcggccgcuccugcaccaucagccucuacaaggggguguacgagcugcagacccuggagcucaacauggagacccugaacaugacgaugccgcuguccugcaccaagaacaacagccaccacuacaucauggugggcaacgagaccggccucgagcugacccugacgaacaccuccaucaucaaccacaaguucugcaaccucagcgacgcccacaagaagaaccuguacgaccacgcccugauguccaucaucagcaccuuccaccucuccauccccaacuucaaccaguacgaggccaugagcugcgacuucaacgggggcaagaucuccguccaguacaaccugagccacuccuacgccggggacgcggccaaccacugcggcaccguggccaacggggugcugcagacguucaugcggauggccuggggcggcagcuacaucgcgcucgacuccgggcgcgaccggugggacugcaucaugaccagcuaccaguaccugaucauccagaacaccaccugggaggaccacugccaguucucccgccccagccccaucggcuaccuggggcuccugucccagcggacgcgcgacaucuacaucagccggcgccugcucggcaccuucaccuggacccugagcgacuccgagggcaaggacacgcccgggggcuacugccugacccgguggaugcucaucgaggccgagcugaagugcuucgggaacaccgccgucgccaagugcaacgagaagcacgacgaggaguucugcgacaugcugcgccucuucgacuucaacaagcaggccauccagcggcugaaggcggaggcccagaugagcauccagcugaucaacaaggccgugaacgcccucaucaacgaccagcugaucaugaagaaccaccuccgcgacaucaugggcauccccuacugcaacuacuccaaguacugcuaccugaaccacaccacgaccgggaagaccagccugcccaagugcugccugguguccaacggcagcuaccucaacgagacccacuucuccgacgacaucgagcagcaggccgacaacaugaucacggagaugcugcagaaggaguacauggagcggcagggcaagaccccgcuggggcuggucgaccucuucguguucagcaccuccuucuaccugaucagcaucuuccugcaccucgugaagaucccgacccaccgccacaucgucggcaagcccugccccaagccccaccggcugaaccacauggggaucugcuccugcggccuguacaagcagccgggggugcccgugaaguggaagcgcugaggacuagucccuguucccagagcccacuuuuuuuucuuuuuuugaaauaaaauagccugucuuucagaucuaaaaaaaaaaaaaaaaaaaaaaaaaaaaaaaaaaaaaaaaaaaaaaaaaaaaaaaaaaaaaaaaaaaaaaaaaaaaaaaaaaaaaaaaaaaaaaaaaaaa

SEQ ID NO: 39077 - RNA, 1743 nt, Artificial Sequence
  mRNA product Design a-2 (A100) comprising derived and/or modified sequence from LASV(Josiah;Clade IV)__NP_694870__GPCmut11 (opt4)
aggagaguccgcucagccagguugcagaagcggcuuagcguguguccuaaucuucucucugcguguagguaggccugugccgcaaacaagcuuaccaugggccagaucgugaccuucuuccaggaggugccccacgugaucgaggaggugaugaacaucgugcugaucgcccugagcgugcuggccgugcugaagggccuguacaacuucgccaccugcggccuggugggccuggugaccuuccugcugcugugcggcagaagcugcaccaccagccuguacaagggcguguacgagcugcagacccuggagcugaacauggagacccugaacaugaccaugccccugagcugcaccaagaacaacagccaccacuacaucauggugggcaacgagaccggccuggagcugacccugaccaacaccagcaucaucaaccacaaguucugcaaccugagcgacgcccacaagaagaaccuguacgaccacgcccugaugagcaucaucagcaccuuccaccugagcauccccaacuucaaccaguacgaggccaugagcugcgacuucaacggcggcaagaucagcgugcaguacaaccugagccacagcuacgccggcgacgccgccaaccacugcggcaccguggccaacggcgugcugcagaccuucaugagaauggccuggggcggcagcuacaucgcccuggacagcggcagaggcaacugggacugcaucaugaccagcuaccaguaccugaucauccagaacaccaccugggaggaccacugccaguucagcagacccagccccaucggcuaccugggccugcugagccagagaaccagagacaucuacaucagcagaagacugcugggcaccuucaccuggacccugagcgacagcgagggcaaggacacccccggcggcuacugccugaccagauggaugcugaucgaggccgagcugaagugcuucggcaacaccgccguggccaagugcaacgagaagcacgacgaggaguucugcgacaugcugagacuguucgacuucaacaagcaggccauccagagacugaaggccgaggcccagaugagcauccagcugaucaacaaggccgugaacgcccugaucaacgaccagcugaucaugaagaaccaccugagagacaucaugggcauccccuacugcaacuacagcaaguacugcuaccugaaccacaccaccaccggcagaaccagccugcccaagugcugccuggugagcaacggcagcuaccugaacgagacccacuucagcgacgacaucgagcagcaggccgacaacaugaucaccgagaugcugcagaaggaguacauggagagacagggcaagaccccccugggccugguggaccuguucguguucagcaccagcuucuaccugaucagcaucuuccugcaccuggugaagauccccacccacagacacaucgugggcaagagcugccccaagccccacagacugaaccacaugggcaucugcagcugcggccuguacaagcagcccggcgugcccgugaaguggaagagaugaggacuagucccuguucccagagcccacuuuuuuuucuuuuuuugaaauaaaauagccugucuuucagaucuaaaaaaaaaaaaaaaaaaaaaaaaaaaaaaaaaaaaaaaaaaaaaaaaaaaaaaaaaaaaaaaaaaaaaaaaaaaaaaaaaaaaaaaaaaaaaaaaaaaa

SEQ ID NO: 39078 - RNA, 1740 nt, Artificial Sequence
  mRNA product Design a-2 (A100) comprising derived and/or modified sequence from LASV(LP;Clade I)__AAF86701__GPCmut11 (opt4)
aggagaguccgcucagccagguugcagaagcggcuuagcguguguccuaaucuucucucugcguguagguaggccugugccgcaaacaagcuuaccaugggccagaucaucaccuucuuccaggaggugccccacgugaucgaggaggugaugaacaucgugcugaucgcccugagccugcuggccauccugaagggccuguacaacaucgccaccugcggcaucaucggccugguggccuuccuguuccugugcggcaagagcugcagccugacccugaagggcggcuacgagcugcagacccuggagcugaacauggagacccugaacaugaccaugccccugagcugcaccaagaacagcagccaccacuacaucagagugggcaacgagaccggccuggagcugacccugaccaacaccagcaucaucaaccacaaguucugcaaccugagcgacgcccacaagaagaaccuguacgaccacgcccugaugagcaucaucagcaccuuccaccugagcauccccaacuucaaccaguacgaggccaugagcugcgacuucaacggcggcaagaucagcgugcaguacaaccugagccacagcuacgccggcgacgccgccgagcacugcggcaccguggccaacggcgugcugcagaccuucaugagaauggccuggggcggcagauacaucgcccuggacagcggcaagggcaacugggacugcaucaugaccagcuaccaguaccugaucauccagaacaccaccugggaggaccacugccaguucagcagacccagccccaucggcuaccugggccugcugagccagagaaccagagacaucuacaucagcagaagacugcugggcaccuucaccuggacccugagcgacagcgagggcaacgagacccccggcggcuacugccugaccagauggaugcugaucgaggccgagcugaagugcuucggcaacaccgccguggccaagugcaacgagaagcacgacgaggaguucugcgacaugcugagacuguucgacuucaacaagcaggccaucagaagacugaaggccgaggcccagaugagcauccagcugaucaacaaggccgugaacgcccugaucaacgaccagcugaucaugaagaaccaccugagagacaucaugggcauccccuacugcaacuacagcaaguacugcuaccugaaccacaccagcagcggcagaaccagccugcccaagugcugccugaucagcaacggcagcuaccugaacgagacccaguucagcgacgacaucgagcagcaggccgacaacaugaucaccgagaugcugcagaaggaguacaucgagagacagggcaagaccccccugggccugguggacaucuucaucuucagcaccagcuucuaccugaucagcaucuuccugcaccugaucaagauccccacccacagacacaucgugggcaagcccugccccaagccccacagacugaaccacaugggcgugugcagcugcggccuguacaagcaccccggcgugcccaccaaguggaagagaugaggacuagucccuguucccagagcccacuuuuuuuucuuuuuuugaaauaaaauagccugucuuucagaucuaaaaaaaaaaaaaaaaaaaaaaaaaaaaaaaaaaaaaaaaaaaaaaaaaaaaaaaaaaaaaaaaaaaaaaaaaaaaaaaaaaaaaaaaaaaaaaaaaaaa

SEQ ID NO: 39079 - RNA, 1740 nt, Artificial Sequence
  mRNA product Design a-2 (A100) comprising derived and/or modified sequence from LASV(803213;Clade II)__AAF86703__GPCmut11 (opt4)
aggagaguccgcucagccagguugcagaagcggcuuagcguguguccuaaucuucucucugcguguagguaggccugugccgcaaacaagcuuaccaugggccagaucaucaccuucuuccaggaggugccccacgugaucgaggaggugaugaacaucgugcugaucgcccugagccugcuggccauccugaagggcaucuacaacguggccaccugcggccuguucggccugaucagcuuccugcugcugugcggcagaagcugcagcgugaccuacaagggcguguacgagcugcagacccuggagcugaacauggccaaccugaacaugaccaugccccugagcugcaccaagaacaacagccaccacuacaucauggugggcaacgagaccggccuggagcugacccugaccaacaccagcaucaucaaccacaaguucugcaaccugagcgacgcccacaagaagaaccuguacgaccacgcccugaugagcaucaucagcaccuuccaccugagcauccccaacuucaaccaguacgaggccaugagcugcgacuucaacggcggcaagaucagcgugcaguacaaccugagccacagcuucgccguggacgccgccaaccacugcggcaccaucgccaacggcgugcugcagaccuucaugagaauggccuggggcggcagcuacaucgcccuggacagcggcaagggcaacugggacugcaucaugaccagcuaccaguaccugaucauccagaacaccaccugggaggaccacugccaguucagcagacccagccccaucggcuaccugggccugcugagccagagaaccagagacaucuacaucagcagaagacugcugggcaccuucaccuggacccugagcgacagcgagggcaacgaggcccccggcggcuacugccugaccagauggaugcugaucgaggccgagcugaagugcuucggcaacaccgccguggccaagugcaacgagaagcacgacgaggaguucugcgacaugcugagacuguucgacuucaacaagcaggccaucaagagacugaagaccgaggcccagaugagcauccagcugaucaacaaggccgugaacgcccugaucaacgaccagcugaucaugaagaaccaccugagagacaucaugggcauccccuacugcaacuacagcagauacugcuaccugaaccacaccgugaccggcaagaccagccugcccagaugcugccuggugagcaacggcagcuaccugaacgagacccacuucagcgacgacaucgagcagcaggccgacaacaugaucaccgagaugcugcagaaggaguacauggacagacagggcaagaccccccugggccugguggaccuguucguguucagcaccagcuucuaccugaucagcaucuuccugcaccuggugaagauccccacccacagacacaucgugggcaagcccugccccaagccccacagacugaaccacaugggcaucugcagcugcggccuguacaagcaccccggcgugcccgugaaguggaagagaugaggacuagucccuguucccagagcccacuuuuuuuucuuuuuuugaaauaaaauagccugucuuucagaucuaaaaaaaaaaaaaaaaaaaaaaaaaaaaaaaaaaaaaaaaaaaaaaaaaaaaaaaaaaaaaaaaaaaaaaaaaaaaaaaaaaaaaaaaaaaaaaaaaaaa

SEQ ID NO: 39080 - RNA, 1740 nt, Artificial Sequence
  mRNA product Design a-2 (A100) comprising derived and/or modified sequence from LASV(GA391;Clade III)__CAA36645__GPCmut11 (opt4)
aggagaguccgcucagccagguugcagaagcggcuuagcguguguccuaaucuucucucugcguguagguaggccugugccgcaaacaagcuuaccaugggccagaucgugaccuucuuccaggaggugccccacgugaucgaggaggugaugaacaucgugcugaucgcccugagcauccuggccauccugaagggccuguacaacguggccaccugcggccugaucggccuggugaccuuccugcugcugagcggcagaagcugcagccugaucuacaagggcaccuacgagcugcagacccuggagcugaacauggagacccugaacaugaccaugccccugagcugcaccaagaacaacagccaccacuacaucagagugggcaacgagaccggccuggagcugacccugaccaacaccagcauccugaaccacaaguucugcaaccugagcgacgcccacaagagaaaccuguacgaccacagccugaugagcaucaucagcaccuuccaccugagcauccccaacuucaaccaguacgaggccaugagcugcgacuucaacggcggcaagaucaccgugcaguacaaccugagccacagcuucgccguggacgccgccggccacugcggcacccuggccaacggcgugcugcagaccuucaugagaauggccuggggcggcagcuacaucgcccuggacagcggcagaggcaacugggacugcaucaugaccagcuaccaguaccugaucauccagaacaccaccugggacgaccacugccaguucagcagacccagccccaucggcuaccugggccugcugagccagagaaccagagacaucuacaucagcagaagacugcugggcaccuucaccuggacccugagcgacagcgagggcaacgagacccccggcggcuacugccugaccagauggaugcugaucgaggccgagcugaagugcuucggcaacaccgccguggccaagugcaacgagaagcacgacgaggaguucugcgacaugcugagacuguucgacuucaacaagcaggccaucagaagacugaagaccgaggcccagaugagcauccagcugaucaacaaggccgugaacgcccugaucaacgaccagcugaucaugaagaaccaccugagagacaucaugggcauccccuacugcaacuacagcagauacugcuaccugaaccacaccagcaccggcaagaccagccugcccagaugcugccugaucagcaacggcagcuaccugaacgagaccaaguucagcgacgacaucgagcagcaggccgacaacaugaucaccgagaugcugcagaaggaguacaucgacagacagggcaagaccccccugggccugguggaccuguucguguucagcaccagcuucuaccugaucagcaucuuccugcaccuggugaagauccccacccacagacacaucgugggcaagcccugccccaagccccacagacugaaccacaugggcaucugcagcugcggccuguacaagcagcccggcgugcccgugagauggaagagaugaggacuagucccuguucccagagcccacuuuuuuuucuuuuuuugaaauaaaauagccugucuuucagaucuaaaaaaaaaaaaaaaaaaaaaaaaaaaaaaaaaaaaaaaaaaaaaaaaaaaaaaaaaaaaaaaaaaaaaaaaaaaaaaaaaaaaaaaaaaaaaaaaaaaa

SEQ ID NO: 39081 - RNA, 1743 nt, Artificial Sequence
  mRNA product Design a-2 (A100) comprising derived and/or modified sequence from LASV(AV;Clade V)__CCA30314__GPCmut11 (opt4)
aggagaguccgcucagccagguugcagaagcggcuuagcguguguccuaaucuucucucugcguguagguaggccugugccgcaaacaagcuuaccaugggccagaucgugaccuucuuccaggaggugccccacgugaucgaggaggugaugaacaucgugcugaucgcccugagcauccuggccgugcugaagggccuguacaacaucgccaccugcggccugaucggccugaucaccuuccugcugcugugcggcagaagcugcagcagcaaccuguacaagggcguguacgagcugcagagccuggaccugaacauggagacccugaacaugaccaugccccugagcugcaccaagaacaacagccaccacuacaucagagugggcaacgacaccggccuggagcugacccugaccaacaccagcauccugaaccacaaguucugcaaccugagcgacgcccacaagaaggaccuguacgaccacgcccugaugagcaucaucagcaccuuccaccugagcauccccaacuucaaccaguacgaggccaugagcugcgacuucaacggcggcaagaucagcgugcaguacaaccugagccacagcuacgccaucgacgccgccaaccacugcggcaccguggccaacggcauccugcagaccuucaugagaauggccuggggcggcagcuacaucgcccuggacagcggcagaggcaacugggacugcaucaugaccagcuaccaguaccugaucauccagaacaccaccugggagaaccacugccaguucagcagacccagccccaucggcuaccugggccugcugagccagagaaccagagacaucuacaucagcagaagacugcugggcaccuucaccuggacccugagcgacagcgagggcaacgccacccccggcggcuacugccugaccagauggaugcugaucgaggccgagcugaagugcuucggcaacaccgccguggccaagugcaacgagaagcacgacgaggaguucugcgacaugcugagacuguucgacuucaacaagcaggccaucagcagacugaagagcgaggcccagaugagcauccagcugaucaacaaggccgugaacgcccugaucaacgaccagcugaucaugaagaaccaccugagagacaucaugggcauccccuacugcaacuacagcaaguacugcuaccugaaccacaccaucaccggcaagaccagccugcccaagugcugccuggugagcaacggcagcuaccugaacgagacccacuucagcgacgacaucgagcagcaggccgacaacaugaucaccgagaugcugcagaaggaguacauggagagacagggcaagaccccccugggccugguggaccuguucguguucagcaccagcuucuaccugaucagcaucuuccugagacuggugaagauccccacccacagacacaucgugggcaagcccugccccaagccccacagacugaaccacaugggcaucugcagcugcggccuguacaagcagcccggcgugcccgugagauggaagagaugaggacuagucccuguucccagagcccacuuuuuuuucuuuuuuugaaauaaaauagccugucuuucagaucuaaaaaaaaaaaaaaaaaaaaaaaaaaaaaaaaaaaaaaaaaaaaaaaaaaaaaaaaaaaaaaaaaaaaaaaaaaaaaaaaaaaaaaaaaaaaaaaaaaaa

SEQ ID NO: 39082 - RNA, 1740 nt, Artificial Sequence
  mRNA product Design a-2 (A100) comprising derived and/or modified sequence from LASV(Togo/2016/7082;Clade VI)__AMR44577__GPCmut11 (opt4)
aggagaguccgcucagccagguugcagaagcggcuuagcguguguccuaaucuucucucugcguguagguaggccugugccgcaaacaagcuuaccaugggccagaucaucaccuucuuccaggaggugccccacgugaucgaggaggugaugaacaucgugcugaucgcccugagccugcuggccauccugaagggcguguacaacguggccaccugcggcaucaucggccuggugaccuuccuguuccugugcggcagaagcugcagccugaucuacaagggcagcuacgagcugcagacccuggagcugaacauggagacccugaacaugaccaugccccugagcugcaccaagaacagcagccaccacuacaucagagugggcaacgagaccggccuggagcugacccugaccaacaccagcaucaucaaccacaaguucugcaaccugagcgacgcccacaagagaaaccuguacgaccacgcccugaugagcauccugagcaccuuccaccugagcauccccaacuucaaccaguacgaggccaugagcugcgacuucaacggcggcaagaucagcgugcaguacaaccugagccacgccuacgccguggacgccgccgagcacugcggcaccguggccaacggcgugcugcagaccuucaugagaauggccuggggcggcagcuacaucgcccuggacagcggcagaggcaacugggacugcaucaugaccagcuaccaguaccugaucauccagaacaccaccugggaggaccacugccaguucagcagacccagccccaucggcuaccugggccugcugagccagagaaccagagacaucuacaucagcagaagacugcugggcaccuucaccuggacccugagcgacagcgagggcaacgagacccccggcggcuacugccugaccagauggaugcugaucgaggccgagcugaagugcuucggcaacaccgccguggccaagugcaacgagaagcacgacgaggaguucugcgacaugcugagacuguucgacuucaacaagcaggccauccagagacugaagagcgaggcccagaugagcauccagcugaucaacaaggccgugaacgcccugaucaacgaccagcugaucaugaagaaccaccugagagacaugaugggcauccccuacugcaacuacagcaaguacugcuaccugaaccacaccagcagcggcagaaccagccugcccaagugcugccuggugagcaacggcagcuaccugaacgagacccacuucagcgacgacaucgagcagcaggccgacaacaugaucaccgagaugcugcagaaggaguacaucgacagacagggcaagaccccccugggccugguggaccuguucguguucagcaccagcuucuaccugaucagcaucuuccugcaccugaucaagauccccacccacagacacaucgugggcaagcccugccccaagccccacagacugaaccacaugggcaucugcagcugcggccuguacaagcagcccggcgugcccaccagauggaagagaugaggacuagucccuguucccagagcccacuuuuuuuucuuuuuuugaaauaaaauagccugucuuucagaucuaaaaaaaaaaaaaaaaaaaaaaaaaaaaaaaaaaaaaaaaaaaaaaaaaaaaaaaaaaaaaaaaaaaaaaaaaaaaaaaaaaaaaaaaaaaaaaaaaaaa

SEQ ID NO: 39083 - RNA, 1740 nt, Artificial Sequence
  mRNA product Design a-2 (A100) comprising derived and/or modified sequence from LASV(KAK-428;Clade n.d. (VII))__ANH09740__GPCmut11 (opt4)
aggagaguccgcucagccagguugcagaagcggcuuagcguguguccuaaucuucucucugcguguagguaggccugugccgcaaacaagcuuaccaugggccagaucgugaccuucuuccaggaggugccccacgugaucgaggaggugaugaacaucgugcugaucgcccugagccugcuggccauccugaagggccuguacaacuucgccaccugcggcgugaucggccugaucaccuuccugcugcugugcggcagaagcugcagcgccaccuacaagggccaguacgagcugcagacccuggagcugaacauggagagccugaacaugaccaugccccugagcugcaccaagaacaacagccaccacuacaucagagccggcaacaacaccggccuggagcugacccugaccaacaccagcaucaucagccacaaguucugcaaccugagcgacgcccacaagaagaaccuguacgaccacacccugaugagcaucaucaccaccuuccaccugagcauccccaacuucaaccaguacgaggccaugagcugcgacuucaacggcggcaagaucagcauccaguacaaccugagccacagcuacgccggcgacgccgcccagcacugcggcaccguggccaacggcgugcugcagaccuucaugagaauggccuggggcggcagcuaccuggcccuggacagcggcagaagaggcugggacugcaucaucagcagcuaccaguaccugaucauccagaacaccaccugggacgaccacugccaguucagcagacccagccccaucggcuaccugggcuucgugagccagaagaccagagacaucuacaucagcagaagacugcugggcaccuucaccuggacccugagcgacagcgagggccacgacaugcccggcggcuacugccugaccagauggaugcugaucgaggccgaccugaagugcuucggcaacaccgccguggccaagugcaacgagaagcacgacgaggaguucugcgacauguggagacuguucgacuucaacaagcaggccauccagagacugaaggccgaggcccagaugaacauccagcugaucaacaaggccgugaacgcccugaucaacgaccagcugaugaugaagaaccaccugagagacaucaugggcauccccuacugcaacuacagcaaguucugcuaccugaacaacaccaccaccggcagaaccagccugcccagaugcugccugaucagcaacggcagcuaccugaacgagacccacuucagcgacgacaucgagcagcaggccgacaacaugaucaccgagaugcugcagaaggaguacauggacagacagggcaagaccccccugggccugguggaccuguucguguucagcaccagcuucuaccugaucaccaucuuccugcaccuggugaagauccccacccacagacacaucgugggcaagcccugccccaagccccacagacugaaccacaugggcaucugcagcugcggccuguacaagcagcccggcgugcccgugagauggaagagaugaggacuagucccuguucccagagcccacuuuuuuuucuuuuuuugaaauaaaauagccugucuuucagaucuaaaaaaaaaaaaaaaaaaaaaaaaaaaaaaaaaaaaaaaaaaaaaaaaaaaaaaaaaaaaaaaaaaaaaaaaaaaaaaaaaaaaaaaaaaaaaaaaaaaa

SEQ ID NO: 39084 - RNA, 1740 nt, Artificial Sequence; identical to SEQ ID NO: 39078
  mRNA product Design a-2 (A100) comprising derived and/or modified sequence from LASV(Pinneo-NIG-1969;Clade I)__AIT17836__GPCmut11 (opt4)

SEQ ID NO: 39085 - RNA, 1740 nt, Artificial Sequence
  mRNA product Design a-2 (A100) comprising derived and/or modified sequence from LASV(ISTH0009-NIG-2011;Clade II)__AIT17404__GPCmut11 (opt4)
aggagaguccgcucagccagguugcagaagcggcuuagcguguguccuaaucuucucucugcguguagguaggccugugccgcaaacaagcuuaccaugggccagaucaucaccuucuuccaggaggugccccacgugaucgaggaggugaugaacaucgugcugaucgcccugagccugcuggccauccugaagggcaucuacaacguggccaccugcggccuguucggccuggugagcuuccugcugcugugcggcagaagcugcagcaccaccuacaagggcguguacgagcugcagacccuggagcuggacauggccagccugaacaugaccaugccccugagcugcaccaagaacaacagccaccacuacaucauggugggcaacgagaccggccuggagcugacccugaccaacaccagcaucaucaaccacaaguucugcaaccugagcgacgcccacaagaagaaccuguacgaccacgcccugaugagcaucaucagcaccuuccaccugagcauccccaacuucaaccaguacgaggccaugagcugcgacuucaacggcggcaagaucagcgugcaguacaaccugagccacgccuacgccguggacgccgccaaccacugcggcaccaucgccaacggcgugcugcagaccuucaugagaauggccuggggcggcagcuacaucgcccuggacagcggcaagggcagcugggacugcaucaugaccagcuaccaguaccugaucauccagaacaccaccugggaggaccacugccaguucagcagacccagccccaucggcuaccugggccugcugagccagagaaccagagacaucuacaucagcagaagacugcugggcaccuucaccuggacccugagcgacagcgagggcaacgagacccccggcggcuacugccugaccagauggaugcugaucgaggccgagcugaagugcuucggcaacaccgccguggccaagugcaacgagaagcacgacgaggaguucugcgacaugcugagacuguucgacuucaacaagcaggccaucagaagacugaagaccgaggcccagaugagcauccagcugaucaacaaggccgugaacgcccugaucaacgaccagcugaucaugaagaaccaccugagagacaucaugggcauccccuacugcaacuacagcaaguacugcuaccugaaccacaccgugaccggcaagaccagccugcccagaugcugccuggugagcaacggcagcuaccugaacgagacccacuucagcgacgacaucgagcagcaggccgacaacaugaucaccgagcugcugcagaaggaguacauggacagacagggcaagaccccccugggccugguggaccuguucguguucagcaccagcuucuaccugaucagcaucuuccugcaccugaucaagauccccacccacagacacaucaccggcaagcccugccccaagccccacagacugaaccacaugggcaucugcagcugcggccuguacaagcaccccggcgugcccgugaaguggaagagaugaggacuagucccuguucccagagcccacuuuuuuuucuuuuuuugaaauaaaauagccugucuuucagaucuaaaaaaaaaaaaaaaaaaaaaaaaaaaaaaaaaaaaaaaaaaaaaaaaaaaaaaaaaaaaaaaaaaaaaaaaaaaaaaaaaaaaaaaaaaaaaaaaaaaa

SEQ ID NO: 39086 - RNA, 1740 nt, Artificial Sequence
  mRNA product Design a-2 (A100) comprising derived and/or modified sequence from LASV(ISTH2010-NIG-2012;Clade II)__AIT17482__GPCmut11 (opt4)
aggagaguccgcucagccagguugcagaagcggcuuagcguguguccuaaucuucucucugcguguagguaggccugugccgcaaacaagcuuaccaugggccagaucaucaccuucuuccaggaggugccccacgugaucgaggaggugaugaacaucgugcugaucgcccugagccugcuggccauccugaagggcaucuacaacguggccaccugcggccuguucggccuggugagcuuccugcugcugugcggcagaagcugcagcaccaccuacaagggcguguacgagcugcagacccuggagcuggacauggccagccugaacaugaccaugccccugagcugcaccaagaacaacagccaccacuacaucauggugggcaacgagaccggccuggagcugacccugaccaacaccagcaucaucaaccacaaguucugcaaccugagcgacgcccacaagaagaaccuguacgaccacgcccugaugagcaucaucagcaccuuccaccugagcauccccaacuucaaccaguacgaggccaugagcugcgacuucaacggcggcaagaucagcgugcaguacaaccugagccacgccuacgccguggacgccgccaaccacugcggcaccaucgccaacggcgugcugcagaccuucaugagaauggccuggggcggcagcuacaucgcccuggacagcggcaagggcagcugggacugcaucaugaccagcuaccaguaccugaucauccagaacaucaccugggaggaccacugccaguucagcagacccagccccaucggcuaccugggccugcugagccagagaaccagagacaucuacaucagcagaagacugcugggcaccuucaccuggacccugagcgacagcgagggcaacgagacccccggcggcuacugccugaccagauggaugcugaucgaggccgagcugaagugcuucggcaacaccgccguggccaagugcaacgagaagcacgacgaggaguucugcgacaugcugagacuguucgacuucaacaagcaggccaucagaagacugaagaccgaggcccagaugagcauccagcugaucaacaaggccgugaacgcccugaucaacgaccagcugaucaugaagaaccaccugagagacaucaugggcauccccuacugcaacuacagcaaguacugcuaccugaaccacaccgugaccggcaagaccagccugcccagaugcugccuggugagcaacggcagcuaccugaacgagacccacuucagcgacgacaucgagcagcaggccgacaacaugaucaccgagcugcugcagaaggaguacaucgacagacagggcaagaccccccugggccugguggaccuguucguguucagcaccagcuucuaccugaucagcaucuuccugcaccuggugaagauccccacccacagacacguggugggcaagcccugccccaagccccacagacugaaccacaugggcaucugcagcugcggccuguacaagcaccccggcgugcccgugaaguggaagagaugaggacuagucccuguucccagagcccacuuuuuuuucuuuuuuugaaauaaaauagccugucuuucagaucuaaaaaaaaaaaaaaaaaaaaaaaaaaaaaaaaaaaaaaaaaaaaaaaaaaaaaaaaaaaaaaaaaaaaaaaaaaaaaaaaaaaaaaaaaaaaaaaaaaaa

SEQ ID NO: 39087 - RNA, 1740 nt, Artificial Sequence
  mRNA product Design a-2 (A100) comprising derived and/or modified sequence from LASV(Lassa virus/H.sapiens-wt/NGA/2015/ISTH_0543;Clade II)__AVO03639__GPCmut11 (opt4)
aggagaguccgcucagccagguugcagaagcggcuuagcguguguccuaaucuucucucugcguguagguaggccugugccgcaaacaagcuuaccaugggccagaucaucaccuucuuccaggaggugccccacgugaucgaggaggugaugaacaucgugcugaucgcccugagccugcuggccauccugaagggcaucuacaacguggccaccugcggccuguucggccuggugagcuuccugcugcugugcggcagaagcugcagcaccaccuacaagggcguguacgagcugcagacccuggagcuggacauggccaaccugaacaugaccaugccccugagcugcaccaagaacaacagccaccacuacaucauggugggcaacgagaccggccuggagcugacccugaccaacaccagcaucaucaaccacaaguucugcaaccugagcgacgcccacaagaagaaccuguacgaccacgcccugaugagcaucaucagcaccuuccaccugagcauccccaacuucaaccaguacgaggccaugagcugcgacuucaacggcggcaagaucagcgugcaguacaaccugagccacaccuacgccguggacgccgccaaccacugcggcaccaucgccaacggcgugcugcagaccuucaugagaauggccuggggcggcagcuacaucgcccuggacagcggcaagggcagcugggacugcaucaugaccagcuaccaguaccuggugauccagaacaccaccugggaggaccacugccaguucagcagacccagccccaucggcuaccugggccugcugagccagagaaccagagacaucuacaucagcagaagacugcugggcaccuucaccuggacccugagcgacagcgagggcaacgagacccccggcggcuacugccugaccagauggaugcugaucgaggccgagcugaagugcuucggcaacaccgccguggccaagugcaacgagaagcacgacgaggaguucugcgacaugcugagacuguucgacuucaacaagcaggccaucagaagacugaagaccgaggcccagaugagcauccagcugaucaacaaggccgugaacgcccugaucaacgaccagcugaucaugaagaaccaccugagagacaucaugggcauccccuacugcaacuacagcaaguacugcuaccugaaccacaccgugaccggcaagaccagccugcccagaugcugccuggugagcaacggcagcuaccugaacgagacccacuucagcgacgacaucgagcagcaggccgacaacaugaucaccgagcugcugcagaaggaguacaucgacagacagggcaagaccccccugggccugguggaccuguucguguucagcaccagcuucuaccugaucagcaucuuccugcaccuggugaagauccccacccacagacacaucaccggcaagcccugccccaagccccacagacugaaccacaugggcaucugcagcugcggccuguacaagcaccccggcgugcccgugaaguggaagagaugaggacuagucccuguucccagagcccacuuuuuuuucuuuuuuugaaauaaaauagccugucuuucagaucuaaaaaaaaaaaaaaaaaaaaaaaaaaaaaaaaaaaaaaaaaaaaaaaaaaaaaaaaaaaaaaaaaaaaaaaaaaaaaaaaaaaaaaaaaaaaaaaaaaaa

SEQ ID NO: 39088 - RNA, 1740 nt, Artificial Sequence
  mRNA product Design a-2 (A100) comprising derived and/or modified sequence from LASV(Lassa virus/H.sapiens-wt/NGA/2016/ISTH_0009;Clade II)__AVO03571__GPCmut11 (opt4)
aggagaguccgcucagccagguugcagaagcggcuuagcguguguccuaaucuucucucugcguguagguaggccugugccgcaaacaagcuuaccaugggccagaucaucaccuucuuccaggaggugccccacgugaucgaggaggugaugaacaucgugcugaucgcccugagccugcuggccauccugaagggcaucuacaacguggccaccugcggccugcugggccuggugagcuuccugcugcugugcggcagaagcugcagcaccaccuacaagggcguguacgagcugcagacccuggagcuggacauggccagccugaacaugaccaugccccugagcugcaccaagaacaacagccaccacuacaucauggugggcaacgagaccggccuggagcugacccugaccaacaccagcaucaucaaccacaaguucugcaaccugagcgacgcccacaagaagaaccuguacgaccacgcccugaugagcaucaucagcaccuuccaccugagcauccccaacuucaaccaguacgaggccaugagcugcgacuucaacggcggcagaaucagcgugcaguacaaccugagccacagcuacgccguggacgccgccaaccacugcggcaccaucgccaacggcgugcugcagaccuucaugagaauggccuggggcggcagcuacaucgcccuggacagcggcaagggcagcugggacugcaucaugaccagcuaccaguaccugaucauccagaacaccaccugggaggaccacugccaguucagcagacccagccccaucggcuaccugggccugcugagccagagaaccagagacaucuacaucagcagaagacugcugggcaccuucaccuggacccugagcgacagcgagggcaacgagacccccggcggcuacugccugaccagauggaugcugaucgaggccgagcugaagugcuucggcaacaccgccguggccaagugcaacgagaagcacgacgaggaguucugcgacaugcugagacuguucgacuucaacaagcaggccaucagaagacugaagaccgaggcccagaugagcauccagcugaucaacaaggccgugaacgcccugaucaacgaccagcugaucaugaagaaccaccugagagacaucaugggcauccccuacugcaacuacagcaaguacugcuaccugaaccacaccgugaccggcaagaccagccugcccagaugcugccuggugagcaacggcagcuaccugaacgagacccacuucagcgacgacaucgagcagcaggccgacaacaugaucaccgagcugcugcagaaggaguacaucgacagacagggcaagaccccccugggccugguggaccuguucguguucagcaccagcuucuaccugaucagcaucuuccugcaccuggugaagauccccacccacagacacaucaccggcaagcccugccccaagccccacagacugaaccacaugggcaucugcagcugcggccuguacaaccaccccggcgugcccgugaaguggaagagaugaggacuagucccuguucccagagcccacuuuuuuuucuuuuuuugaaauaaaauagccugucuuucagaucuaaaaaaaaaaaaaaaaaaaaaaaaaaaaaaaaaaaaaaaaaaaaaaaaaaaaaaaaaaaaaaaaaaaaaaaaaaaaaaaaaaaaaaaaaaaaaaaaaaaa

SEQ ID NO: 39089 - RNA, 1740 nt, Artificial Sequence
  mRNA product Design a-2 (A100) comprising derived and/or modified sequence from LASV(Lassa virus/H.sapiens-wt/NGA/2016/ISTH_0017;Clade II)__AVO03567__GPCmut11 (opt4)
aggagaguccgcucagccagguugcagaagcggcuuagcguguguccuaaucuucucucugcguguagguaggccugugccgcaaacaagcuuaccaugggccagaucaucaccuucuuccaggaggugccccacgugaucgaggaggugaugaacaucgugcugaucgcccugagccugcuggccauccugaagggcaucuacaacguggccaccugcggccuguucggccuggugagcuuccugcugcugugcggcagaagcugcagcaccaccuacaagggcguguacgagcugcagacccuggagcuggacauggccagccugaacaugaccaugccccugagcugcaccaagaacaacagccaccacuacaucauggugggcaacgagaccggccuggagcugacccugaccaacaccagcaucaucaaccacaaguucugcaaccugagcgacgcccacaagaagaaccuguacgaccacgcccugaugagcaucaucagcaccuuccaccugagcauccccaacuucaaccaguacgaggccaugagcugcgacuucaacggcggcaagaucagcgugcaguacaaccugagccacaccuacgccaucgacgccgccaaccacugcggcaccaucgccaacggcgugcugcagaccuucaugagaauggccuggggcggcagcuacaucgcccuggacagcggcaagggcagcugggacugcaucaugaccagcuaccaguaccugaucauccagaacaccaccugggaggaccacugccaguucagcagacccagccccaucggcuaccugggccugcugagccagagaaccagagacaucuacaucagcagaagacugcugggcaccuucaccuggacccugagcgacagcgagggcaacgagacccccggcggcuacugccugaccagauggaugcugaucgaggccgagcugaagugcuucggcaacaccgccguggccaagugcaacgagaagcacgacgaggaguucugcgacaugcugagacuguucgacuucaacaagcaggccaucagaagacugaagaccgaggcccagaugagcauccagcugaucaacaaggccgugaacgcccugaucaacgaccagcugaucaugaagaaccaccugagagacaucaugggcauccccuacugcaacuacagcaaguacugcuaccugaaccacaccgugaccggcaagaccagccugcccagaugcugccuggugagcaacggcagcuaccugaacgagacccacuucagcgacgacaucgagcagcaggccgacaacaugaucaccgagcugcugcagaaggaguacauggacagacagggcaagaccccccugggccugguggaccuguucguguucagcaccagcuucuaccugaucagcaucuuccugcaccuggugagaauccccacccacagacacgugaucggcaagcccugccccaagccccacagacugaaccacaugggcaucugcagcugcggccuguacaagcaccccggcgugcccgugaaguggaagagaugaggacuagucccuguucccagagcccacuuuuuuuucuuuuuuugaaauaaaauagccugucuuucagaucuaaaaaaaaaaaaaaaaaaaaaaaaaaaaaaaaaaaaaaaaaaaaaaaaaaaaaaaaaaaaaaaaaaaaaaaaaaaaaaaaaaaaaaaaaaaaaaaaaaaa

SEQ ID NO: 39090 - RNA, 1740 nt, Artificial Sequence
  mRNA product Design a-2 (A100) comprising derived and/or modified sequence from LASV(Lassa virus/H.sapiens-wt/NGA/2018/ISTH_0959;Clade II)__AVV65099__GPCmut11 (opt4)
aggagaguccgcucagccagguugcagaagcggcuuagcguguguccuaaucuucucucugcguguagguaggccugugccgcaaacaagcuuaccaugggccagaucaucaccuucuuccaggaggugccccacgugaucgaggaggugaugaacaucgugcugaucgcccugagccugcuggccauccugaagggcaucuacaacguggugaccugcggccuguucggccuggugagcuuccugcugcugugcggcagaagcugcagcaccaccuacaagggcguguacgagcugcagacccuggagcuggacauggccagccugaacaugaccaugccccugagcugcaccaagaacaacagccaccacuacaucauggugggcaacgagaccggccuggagcugacccugaccaacaccagcaucaucaaccacaaguucugcaaccugagcgacgcccacaagaagaaccuguacgaccacgcccugaugagcaucaucagcaccuuccaccugagcauccccaacuucaaccaguacgaggccaugagcugcgacuucaacggcggcaagaucagcgugcaguacaaccugagccacgccuacgccaucgacgccgccaaccacugcggcaccaucgccaacggcgugcugcagaccuucaugagaauggccuggggcggcagcuacaucgcccuggacagcggcaagggcagcugggacugcaucaugaccagcuaccaguaccugaucauccagaacaccaccugggaggaccacugccaguucagcagacccagccccaucggcuaccugggccugcugagccagagaaccagagacaucuacaucagcagaagacugcugggcaccuucaccuggacccugagcgacagcgagggcaacgagacccccggcggcuacugccugaccagauggaugcugaucgaggccgagcugaagugcuucggcaacaccgccguggccaagugcaacgagaagcacgacgaggaguucugcgacaugcugagacuguucgacuucaacaagcaggccaucagaagacugaagaccgaggcccagaugagcauccagcugaucaacaaggccgugaacgcccugaucaacgaccagcugaucaugaagaaccaccugagagacaucaugggcauccccuacugcaacuacagcaaguacugcuaccugaaccacaccgugaccggcaagaccagccugcccagaugcugccuggugagcaacggcagcuaccugaacgagacccacuucagcgacgacaucgagcagcaggccgacaacaugaucaccgagcugcugcagaaggaguacaucgacagacagggcaagaccccccugggccugguggaccuguucguguucagcaccagcuucuaccugaucagcaucuuccugcaccuggugaagauccccacccacagacacgugaucggcaagcccugccccaagccccacagacugaaccacaugggcaucugcagcugcggccuguacaagcaccccggcgugcccgugaaguggaagagaugaggacuagucccuguucccagagcccacuuuuuuuucuuuuuuugaaauaaaauagccugucuuucagaucuaaaaaaaaaaaaaaaaaaaaaaaaaaaaaaaaaaaaaaaaaaaaaaaaaaaaaaaaaaaaaaaaaaaaaaaaaaaaaaaaaaaaaaaaaaaaaaaaaaaa

SEQ ID NO: 39091 - RNA, 1740 nt, Artificial Sequence
  mRNA product Design a-2 (A100) comprising derived and/or modified sequence from LASV(LASV003-NIG-2008;Clade II)__AIT17580__GPCmut11 (opt4)
aggagaguccgcucagccagguugcagaagcggcuuagcguguguccuaaucuucucucugcguguagguaggccugugccgcaaacaagcuuaccaugggccagaucaucaccuucuuccaggaggugccccacgugaucgaggaggugaugaacaucgugcugaucgcccugagccugcuggccauccugaagggcaucuacaacguggccaccugcggccuguucggccuggugagcuuccugcugcugugcggcagaagcugcagcaccaccuacaagggcguguacgagcugcagacccuggagcuggacauggccagccugaacaugaccaugccccugagcugcaccaagaacaacagccaccacuacaucauggugggcaacgagaccggccuggagcugacccugaccaacaccagcaucaucaaccacaaguucugcaaccugagcgacgcccacaagaagaaccuguacgaccacgcccugaugagcaucaucagcaccuuccaccugagcauccccaacuucaaccaguacgaggccaugagcugcgacuucaacggcggcaagaucagcgugcaguacaaccugagccacaccuacgccguggacgccgccaaccacugcggcaccaucgccaacggcgugcugcagaccuucaugagaauggccuggggcggcagcuacaucgcccuggacagcggcaagggcagcugggacugcaucaugaccagcuaccaguaccugaucauccagaacaccaccugggaggaccacugccaguucagcagacccagccccaucggcuaccugggccugcugagccagagaaccagagacaucuacaucagcagaagacugcugggcaccuucaccuggacccugagcgacagcgagagcaacgagacccccggcggcuacugccugaccagauggaugcugaucgaggccgagcugaagugcuucggcaacaccgccguggccaagugcaacgagaagcacgacgaggaguucugcgacaugcugagacuguucgacuucaacaagcaggccaucagaagacugaaggccgaggcccagaugagcauccagcugaucaacaaggccgugaacgcccugaucaacgaccagcugaucaugaagaaccaccugagagacaucaugggcauccccuacugcaacuacagcaaguacugcuaccugaaccacaccgugaccggcagaaccagccugcccagaugcugccuggugagcaacggcagcuaccugaacgagacccacuucagcgacgacaucgagcagcaggccgacaacaugaucaccgagcugcugcagaaggaguacauggacagacagggcaagaccccccugggccugguggaccuguucguguucagcaccagcuucuaccugaucagcaucuuccugcaccuggugaagauccccacccacagacacgugaucggcaagcccugccccaagccccacagacugaaccacaugggcaucugcagcugcggccuguacaagcaccccggcgugcccgugaaguggaagagaugaggacuagucccuguucccagagcccacuuuuuuuucuuuuuuugaaauaaaauagccugucuuucagaucuaaaaaaaaaaaaaaaaaaaaaaaaaaaaaaaaaaaaaaaaaaaaaaaaaaaaaaaaaaaaaaaaaaaaaaaaaaaaaaaaaaaaaaaaaaaaaaaaaaaa

SEQ ID NO: 39092 - RNA, 1740 nt, Artificial Sequence
  mRNA product Design a-2 (A100) comprising derived and/or modified sequence from LASV(LASV035-NIG-2009;Clade II)__AIT17588__GPCmut11 (opt4)
aggagaguccgcucagccagguugcagaagcggcuuagcguguguccuaaucuucucucugcguguagguaggccugugccgcaaacaagcuuaccaugggccagaucaucaccuucuuccaggaggugccccacgugaucgaggaggugaugaacaucgugcugaucgcccugagccugcuggccauccugaagggcaucuacaacguggccaccugcggccuguucggccuggugagcuuccugcugcugugcggcagaagcugcagcaccaccuacaagggcguguacgagcugcagacccuggagcuggacauggccagccugaacaugaccaugccccugagcugcaccaagaacaacagccaccacuacaucauggugggcaacgagaccggccuggagcugacccugaccaacaccagcaucaucaaccacaaguucugcaaccugagcgacgcccacaagaagaaccuguacgaccacgcccugaugagcaucaucagcaccuuccaccugagcauccccaacuucaaccaguacgaggccaugagcugcgacuucaacggcggcaagaucagcgugcaguacaaccugagccacgccuacgccguggacgccgccaaccacugcggcaccaucgccaacggcgugcugcagaccuucaugagaauggccuggggcggcagcuacaucgcccuggacagcggcaagggcagcugggacugcaucaugaccagcuaccaguaccugaucauccagaacaccaccugggaggaccacugccaguucagcagacccagccccaucggcuaccugggccugcugagccagagaaccagagacaucuacaucagcagaagacugcugggcaccuucaccuggacccugagcgacagcgagggcaacgagacccccggcggcuacugccugaccagauggaugcugaucgaggccgagcugaagugcuucggcaacaccgccguggccaagugcaacgagaagcacgacgaggaguucugcgacaugcugagacuguucgacuucaacaagcaggccaucagaagacugaaggccgaggcccagaugagcauccagcugaucaacaaggccgugaacgcccugaucaacgaccagcugaucaugaagaaccaccugagagacaucaugggcauccccuacugcaacuacagcaaguacugcuaccugaaccacaccgugaccggcaagaccagccugcccagaugcugccuggugagcaacggcagcuaccugaacgagacccacuucagcgacgacaucgagcagcaggccgacaacaugaucaccgagcugcugcagaaggaguacaucgacagacagggcaagaccccccugggccugguggaccuguucguguucagcaccagcuucuaccugaucagcaucuuccugcaccuggugaagauccccacccacagacacgugaucggcaagcccugccccaagccccacagacugaaccacaugggcaucugcagcugcggccuguacaagcaccccggcgugcccgugaaguggaagagaugaggacuagucccuguucccagagcccacuuuuuuuucuuuuuuugaaauaaaauagccugucuuucagaucuaaaaaaaaaaaaaaaaaaaaaaaaaaaaaaaaaaaaaaaaaaaaaaaaaaaaaaaaaaaaaaaaaaaaaaaaaaaaaaaaaaaaaaaaaaaaaaaaaaaa

SEQ ID NO: 39093 - RNA, 1740 nt, Artificial Sequence
  mRNA product Design a-2 (A100) comprising derived and/or modified sequence from LASV(LASV1000-NIG-2009;Clade II)__AIT17782__GPCmut11 (opt4)
aggagaguccgcucagccagguugcagaagcggcuuagcguguguccuaaucuucucucugcguguagguaggccugugccgcaaacaagcuuaccaugggccagaucaucaccuucuuccaggaggugccccacgugaucgaggaggugaugaacaucgugcugaucgcccugagccugcuggccauccugaagggcaucuacaacguggccaccugcggccuguucggccuggugagcuuccugcugcugugcggcagaagcugcagcaccaccuacaagggcguguacgagcugcagacccuggagcuggacauggccagccugaacaugaccaugccccugagcugcaccaagaacaacagccaccacuacaucauggugggcaacgagaccggccuggagcugacccugaccaacaccagcaucaucaaccacaaguucugcaaccugagcgacgcccacaagaagaaccuguacgaccacgcccugaugagcaucaucagcaccuuccaccugagcauccccaacuucaaccaguacgaggccaugagcugcgacuucaacggcggcaagaucagcgugcaguacaaccugagccacaccuacgccguggacgccgccaaccacugcggcaccaucgccaacggcgugcugcagaccuucaugagaauggccuggggcggcagcuacaucgcccuggacagcggcaagggcagcugggacugcaucaugaccagcuaccaguaccugaucauccagaacaccaccugggaggaccacugccaguucagcagacccagccccaucggcuaccugggccugcugagccagagaaccagagacaucuacaucagcagaagacugcugggcaccuucaccuggacccugagcgacagcgagggcaacgagacccccggcggcuacugccugaccagauggaugcugaucgaggccgagcugaagugcuucggcaacaccgccguggccaagugcaacgagaagcacgacgaggaguucugcgacaugcugagacuguucgacuucaacaagcaggccaucaagagacugaagaccgaggcccagaugagcauccagcugaucaacaaggccgugaacgcccugaucaacgaccagcugaucaugaagaaccaccugagagacaucaugggcauccccuacugcaacuacagcaaguacugcuaccugaaccacaccgugaccggcaagaccagccugcccagaugcugccuggugagcaacggcagcuaccugaacgagacccacuucagcgacgacaucgagcagcaggccgacaacaugaucaccgagcugcugcagaaggaguacaucgacagacagggcaagaccccccugggccugguggaccuguucguguucagcaccagcuucuaccugaucagcaucuuccugcaccuggugaagauccccacccacagacacguggugggcaagcccugccccaagccccacagacugaaccacaugggcaucugcagcugcggccuguacaagcaccccggcgugcccgugaaguggaagagaugaggacuagucccuguucccagagcccacuuuuuuuucuuuuuuugaaauaaaauagccugucuuucagaucuaaaaaaaaaaaaaaaaaaaaaaaaaaaaaaaaaaaaaaaaaaaaaaaaaaaaaaaaaaaaaaaaaaaaaaaaaaaaaaaaaaaaaaaaaaaaaaaaaaaa

SEQ ID NO: 39094 - RNA, 1740 nt, Artificial Sequence
  mRNA product Design a-2 (A100) comprising derived and/or modified sequence from LASV(LASV221-NIG-2010;Clade II)__AIT17624__GPCmut11 (opt4)
aggagaguccgcucagccagguugcagaagcggcuuagcguguguccuaaucuucucucugcguguagguaggccugugccgcaaacaagcuuaccaugggccagaucaucaccuucuuccaggaggugccccacgugaucgaggaggugaugaacaucgugcugaucgcccugagccugcuggccauccugaagggcaucuacaacguggccaccugcggccuguucggccuggugagcuuccugcugcugugcggcagaagcugcagcaccaccuacaagggcguguacgagcugcagacccuggagcuggacauggccagccugaacaugaccaugccccugagcugcaccaagaacaacagccaccacuacaucauggugggcaacgagaccggccuggagcugacccugaccaacaccagcaucaucaaccacaaguucugcaaccugagcgacgcccacaagaagaaccuguacgaccacgcccugaugagcaucaucagcaccuuccaccugagcauccccaacuucaaccaguacgaggccaugagcugcgacuucaacggcggcaagaucagcgugcaguacaaccugagccacaccuacgccaucgacgccgccaaccacugcggcaccaucgccaacggcgugcugcagaccuucaugagaauggccuggggcggcagcuacaucgcccuggacagcggcaagggcagcugggacugcaucaugaccagcuaccaguaccugaucauccagaacaccaccugggaggaccacugccaguucagcagacccagccccaucggcuaccugggccugcugagccagagaaccagagacaucuacaucagcagaagacugcugggcaccuucaccuggacccugagcgacagcgagggcaacgagacccccggcggcuacugccugaccagauggaugcugaucgaggccgagcugaagugcuucggcaacaccgccguggccaagugcaacgagaagcacgacgaggaguucugcgacaugcugagacuguucgacuucaacaagcaggccaucagaagacugaagaccgaggcccagaugagcauccagcugaucaacaaggccgugaacgcccugaucaacgaccagcugaucaugaagaaccaccugagagacaucaugggcauccccuacugcaacuacagcaaguacugcuaccugaaccacaccgugaccggcaagaccagccugcccagaugcugccuggugagcaacggcagcuaccugaacgagacccacuucagcgacgacaucgagcagcaggccgacaacaugaucaccgagaugcugcagaaggaguacauggacagacagggcaagaccccccugggccugguggaccuguucguguucagcaccagcuucuaccugaucagcaucuuccugcaccuggugaagauccccacccacagacacgugaucggcaagcccugccccaagccccacagacugaaccacaugggcaucugcagcugcggccuguacaagcaccccggcgugcccgugaaguggaagagaugaggacuagucccuguucccagagcccacuuuuuuuucuuuuuuugaaauaaaauagccugucuuucagaucuaaaaaaaaaaaaaaaaaaaaaaaaaaaaaaaaaaaaaaaaaaaaaaaaaaaaaaaaaaaaaaaaaaaaaaaaaaaaaaaaaaaaaaaaaaaaaaaaaaaa

SEQ ID NO: 39095 - RNA, 1740 nt, Artificial Sequence
  mRNA product Design a-2 (A100) comprising derived and/or modified sequence from LASV(LASV237-NIG-2010;Clade II)__AIT17638__GPCmut11 (opt4)
aggagaguccgcucagccagguugcagaagcggcuuagcguguguccuaaucuucucucugcguguagguaggccugugccgcaaacaagcuuaccaugggccagaucaucaccuucuuccaggaggugccccacgugaucgaggaggugaugaacaucgugcugaucgcccugagccugcuggccauccugaagggcaucuacaacguggccaccugcggccuguucggccuggugagcuuccugcugcugugcggcagaagcugcagcaccaccuacaagggcguguacgagcugcagacccuggagcuggacauggccagccugaacaugaccaugccccugagcugcaccaagaacaacagccaccacuacaucauggugggcaacgagaccggccuggagcugacccugaccaacaccagcaucaucaaccacaaguucugcaaccugagcgacgcccacaagaaggaccuguacgaccacgcccugaugagcaucaucagcaccuuccaccugagcauccccaacuucaaccaguacgaggccaugagcugcgacuucaacggcggcaagaucagcgugcaguacaaccugagccacaccuacgccguggacgccgccaaccacugcggcaccaucgccaacggcgugcugcagaccuucaugagaauggccuggggcggcagcuacaucgcccuggacagcggcaagggcagcugggacugcaucaugaccagcuaccaguaccugaucauccagaacaccaccugggaggaccacugccaguucagcagacccagccccaucggcuaccugggccugcugagccagagaaccagagacaucuacaucagcagaagacugcugggcaccuucaccuggacccugagcgacagcgagggcaacgagacccccggcggcuacugccugaccagauggaugcugaucgaggccgagcugaagugcuucggcaacaccgccguggccaagugcaacgagaagcacgacgaggaguucugcgacaugcugagacuguucgacuucaacaagcaggccaucagaagacugaagaccgaggcccagaugagcauccagcugaucaacaaggccgugaacgcccugaucaacgaccagcugaucaugaagaaccaccugagagacaucaugggcauccccuacugcaacuacagcaaguacugcuaccugaaccacaccgugaccggcaagaccagccugcccagaugcugccuggugagcaacggcagcuaccugaacgagacccacuucagcgacgacaucgagcagcaggccgacaacaugaucaccgagcugcugcagaaggaguacauggacagacagggcaagaccccccugggccugguggaccuguucguguucagcaccagcuucuaccugaucagcaucuuccugcaccugaucaagauccccacccacagacacaucaccggcaagcccugccccaagccccacagacugaaccacaugggcaucugcagcugcggccuguacaagcaccccggcgugcccgugaaguggaagagaugaggacuagucccuguucccagagcccacuuuuuuuucuuuuuuugaaauaaaauagccugucuuucagaucuaaaaaaaaaaaaaaaaaaaaaaaaaaaaaaaaaaaaaaaaaaaaaaaaaaaaaaaaaaaaaaaaaaaaaaaaaaaaaaaaaaaaaaaaaaaaaaaaaaaa

SEQ ID NO: 39096 - RNA, 1740 nt, Artificial Sequence
  mRNA product Design a-2 (A100) comprising derived and/or modified sequence from LASV(LASV253-NIG-2011;Clade II)__AIT17670__GPCmut11 (opt4)
aggagaguccgcucagccagguugcagaagcggcuuagcguguguccuaaucuucucucugcguguagguaggccugugccgcaaacaagcuuaccaugggccagaucaucaccuucuuccaggaggugccccacgugaucgaggaggugaugaacaucgugcugaucgcccugagccugcuggccauccugaagggcaucuacaacguggccaccugcggccuguucggccuggugagcuuccugcugcugugcggcagaagcugcagcaccaccuacaagggcguguacgagcugcagacccuggagcuggacauggccagccugaacaugaccaugccccugagcugcaccaagaacaacagccaccacuacaucauggugggcaacgagaccggccuggagcugacccugaccaacaccagcaucaucaaccacaaguucugcaaccugagcgacgcccacaagaagaaccuguacgaccacgcccugaugagcaucaucagcaccuuccaccugagcauccccaacuucaaccaguacgaggccaugagcugcgacuucaacggcggcaagaucagcgugcaguacaaccugagccacaccuacgccguggacgccgccaaccacugcggcaccaucgccaacggcgugcugcagaccuucaugagaauggccuggggcggcagcuacaucgcccuggacagcggcaagggcagcugggacugcaucaugaccagcuaccaguaccugaucauccagaacaccaccugggaggaccacugccaguucagcagacccagccccaucggcuaccugggccugcugagccagagaaccagagacaucuacaucagcagaagacugcugggcaccuucaccuggacccugagcgacagcgagggcaacgagacccccggcggcuacugccugaccagauggaugcugaucgaggccgagcugaagugcuucggcaacaccgccguggccaagugcaacgagaagcacgacgaggaguucugcgacaugcugagacuguucgacuucaacaagcaggccaucagaagacugaaggccgaggcccagaugagcauccagcugaucaacaaggccgugaacgcccugaucaacgaccagcugaucaugaagaaccaccugagagacaucaugggcauccccuacugcaacuacagcaaguacugcuaccugaaccacaccgugaccggcagaaccagccugcccagaugcugccuggugagcaacggcagcuaccugaacgagacccacuucagcgacgacaucgagcagcaggccgacaacaugaucaccgagcugcugcagaaggaguacaucgacagacagggcaagaccccccugggccugguggaccuguucguguucagcaccagcuucuaccugaucagcaucuuccugcaccuggugaagauccccacccacagacacaucaucggcaagcccugccccaagccccacagacugaaccacaugggcaucugcagcugcggccuguacaagcaccccggcgugcccgugaaguggaagagaugaggacuagucccuguucccagagcccacuuuuuuuucuuuuuuugaaauaaaauagccugucuuucagaucuaaaaaaaaaaaaaaaaaaaaaaaaaaaaaaaaaaaaaaaaaaaaaaaaaaaaaaaaaaaaaaaaaaaaaaaaaaaaaaaaaaaaaaaaaaaaaaaaaaaa

SEQ ID NO: 39097 - RNA, 1740 nt, Artificial Sequence
  mRNA product Design a-2 (A100) comprising derived and/or modified sequence from LASV(LASV254-NIG-2011;Clade II)__AIT17674__GPCmut11 (opt4)
aggagaguccgcucagccagguugcagaagcggcuuagcguguguccuaaucuucucucugcguguagguaggccugugccgcaaacaagcuuaccaugggccagaucaucaccuucuuccaggaggugccccacgugaucgaggaggugaugaacaucgugcugaucgcccugagccugcuggccauccugaagggcaucuacaacguggccaccugcggccuguucggccuggugagcuuccugcugcugugcggcagaagcugcagcaccaccuacaagggcguguacgagcugcagacccuggagcuggacaugaccaaccugaacaugaccaugccccugagcugcaccaagaacaacagccaccacuacaucauggugggcaacgagaccggccuggagcugacccugaccaacaccagcaucaucaaccacaaguucugcaaccugagcgacgcccacaagaagaaccuguacaaccacgcccugaugagcaucaucagcaccuuccaccugagcauccccaacuucaaccaguacgaggccaugagcugcgacuucaacggcggcaagaucagcgugcaguacaaccugagccacagcuacgccguggacgccgccaaccacugcggcaccaucgccaacggcgugcugcagaccuucaugagaauggccuggggcggcagcuacaucgcccuggacagcggcaagggcaacugggacugcaucaugaccagcuaccaguaccugaucauccagaacaccaccugggaggaccacugccaguucagcagacccagccccaucggcuaccugggccugcugagccagagaaccagagacaucuacaucagcagaagacugcugggcaccuucaccuggacccugagcgacagcgagggcaacgagacccccggcggcuacugccugaccagauggaugcugaucgaggccgagcugaagugcuucggcaacaccgccguggccaagugcaacgagaagcacgacgaggaguucugcgacaugcugagacuguucgacuucaacaagcaggccaucagaagacugaagaccgaggcccaggccaacauccagcugaucaacaaggccgugaacgcccugaucaacgaccagcugaucaugaagaaccaccugagagacaucaugggcauccccuacugcaacuacagcaaguacugcuaccugaaccacaccgugaccggcaagaccagccugcccagaugcugccuggugagcaacggcagcuaccugaacgagacccacuucagcgacgacaucgagcagcaggccgacaacaugaucaccgagcugcugcagaaggaguacauggacagacagggcaagaccccccugggccugguggaccuguucguguucagcaccagcuucuaccugaucagcaucuuccugcaccuggugaagauccccacccacagacacgugaucggcaagcccugccccaagccccacagacugaaccacaugggcaucugcagcugcggccuguacaagcaccccggcgugcccgugaaguggaagagaugaggacuagucccuguucccagagcccacuuuuuuuucuuuuuuugaaauaaaauagccugucuuucagaucuaaaaaaaaaaaaaaaaaaaaaaaaaaaaaaaaaaaaaaaaaaaaaaaaaaaaaaaaaaaaaaaaaaaaaaaaaaaaaaaaaaaaaaaaaaaaaaaaaaaa

SEQ ID NO: 39098 - RNA, 1740 nt, Artificial Sequence
  mRNA product Design a-2 (A100) comprising derived and/or modified sequence from LASV(Nig08-A19;Clade III)__ADU56618__GPCmut11 (opt4)
aggagaguccgcucagccagguugcagaagcggcuuagcguguguccuaaucuucucucugcguguagguaggccugugccgcaaacaagcuuaccaugggccagaucgugaccuucuuccaggaggugccccacgugaucgaggaggugaugaacaucgugcugaucgcccugagcauccuggccauccugaagggccuguacaacaucgccaccugcggccugaucggccuggugaccuuccugcugcugagcggcagaagcugcagcaugaccuacaagggcguguacgagcugcagacccuggagcugaacaugaacacccugaacaugaccaugccccugagcugcaccaagaacaacagccaccacuacaucauggugggcaacgagaccggccuggagcugacccugaccaacaccagccugcugcaccacaaguucugcaaccugagcgacgcccacaagaagaaccuguacgaccacacccugaugagcaucaucagcaccuuccaccugagcauccccaacuucaaccaguacgaggccaugagcugcgacuucaacggcggcaagaucaccgugcaguacaaccugagccacagcuacgccaucgacgccgccaaccacugcggcaccguggccaacggcgugcugcagaccuucaugagaauggccuggggcggcagcuacaucgcccuggacagcggcagaggcaagugggacugcaucaugaccagcuaccaguaccugaucauccagaacaccaccugggaggaccacugccaguucagcagacccagccccaucggcuaccugggccugcugagccagagaaccagagacaucuacaucagcagaagacugcugggcaccuucaccuggacccugagcgacagcgagggcaacgagacccccggcggcuacugccugaccagauggaugcugaucgaggccgagcugaagugcuucggcaacaccgccguggccaagugcaacgagaagcacgacgaggaguucugcgacaugcugagacuguucgacuucaacaagcaggccaucagaagacugaaggccgaggcccagaugagcauccagcugaucaacaaggccgugaacgcccugaucaacgaccagcugaucaugaagaaccaccugagagacaucaugggcauccccuacugcaacuacagcaaguacugcuaccugaaccacaccagcaccggcagaaccagccugcccagaugcugccuggugagcaacggcagcuaccugaacgagacccacuucagcgacgacaucgagcagcaggccgacaacaugaucaccgagaugcugcagaaggaguaccuggacagacagggcaagaccccccugggccugguggaccuguucguguucagcaccagcuucuaccugaucagcaucuuccugcaccuggugaagauccccacccacagacacaucgugggcaagcccugccccaagccccacagacugaaccacaugggcaucugcagcugcggccuguacaagcagcccggcgugcccgugagauggaagagaugaggacuagucccuguucccagagcccacuuuuuuuucuuuuuuugaaauaaaauagccugucuuucagaucuaaaaaaaaaaaaaaaaaaaaaaaaaaaaaaaaaaaaaaaaaaaaaaaaaaaaaaaaaaaaaaaaaaaaaaaaaaaaaaaaaaaaaaaaaaaaaaaaaaaa

SEQ ID NO: 39099 - RNA, 1743 nt, Artificial Sequence
  mRNA product Design a-2 (A100) comprising derived and/or modified sequence from LASV(G1180-SLE-2010;Clade IV)__AIT17168__GPCmut11 (opt4)
aggagaguccgcucagccagguugcagaagcggcuuagcguguguccuaaucuucucucugcguguagguaggccugugccgcaaacaagcuuaccaugggccagaucgugaccuucuuccaggaggugccccacgugaucgaggaggugaugaacaucgugcugaucgcccugagcauccuggccgugcugaagggccuguacaacuucgccaccugcggccuggugggccugcugaccuuccugcugcugugcggcagaagcugcaccgccagcagauacaagggcguguacgagcugcagacccuggagcugaacauggagacccugaacaugaccaugccccugagcugcaccaagaacaacagccaccacuacaucauggugggcaacgagaccggccuggagcugacccugaccaacaccagcaucaucaaccacaaguucugcaaccugagcgacgcccacaagaagaaccuguacgaccacgcccugaugagcaucaucagcaccuuccaccugagcauccccaacuucaaccaguacgaggccaugagcugcgacuucaacggcggcaagaucagcgugcaguacaaccugagccacagcuacgccggcgacgccgccaaccacugcggcaccguggccaacggcgugcugcagaccuucaugagaauggccuggggcggcagcuacaucgcccuggacagcggccacggcagcugggacugcaucaugaccagcuaccaguaccugaucauccagaacaccaccugggaggaccacugccaguucagcagacccagccccaucggcuaccugggccugcugagccagagaaccagagacaucuacaucagcagaagacugcugggcaccuucaccuggacccugagcgacagcgagggcaaggacacccccggcggcuacugccugaccagauggaugcugaucgaggccgagcugaagugcuucggcaacaccgccguggccaagugcaacgagaagcacgacgaggaguucugcgacaugcugagacuguucgacuucaacaagcaggccauccagagacugaaggccgaggcccagaugagcauccagcugaucaacaaggccgugaacgcccugaucaacgaccagcugaucaugaagaaccaccugagagacaucaugggcauccccuacugcaacuacagcaaguacugcuaccugaaccacaccaccaccggcaagaccagccugcccaagugcugccuggugagcaacggcagcuaccugaacgagacccacuucagcgacgacaucgagcagcaggccgacaacaugaucaccgagaugcugcagaaggaguacauggagagacagggcaagaccccccugggccugguggaccuguucguguucagcaccagcuucuaccugaucagcaucuuccugcaccuggugaagauccccacccacagacacaucgugggcaagagcugccccaagccccacagacugaaccacaugggcaucugcagcugcggccuguacaagcagcccggcgugcccgugaaguggaagagaugaggacuagucccuguucccagagcccacuuuuuuuucuuuuuuugaaauaaaauagccugucuuucagaucuaaaaaaaaaaaaaaaaaaaaaaaaaaaaaaaaaaaaaaaaaaaaaaaaaaaaaaaaaaaaaaaaaaaaaaaaaaaaaaaaaaaaaaaaaaaaaaaaaaaa

SEQ ID NO: 39100 - RNA, 1743 nt, Artificial Sequence
  mRNA product Design a-2 (A100) comprising derived and/or modified sequence from LASV(G1442-SLE-2011;Clade IV)__AIT17180__GPCmut11 (opt4)
aggagaguccgcucagccagguugcagaagcggcuuagcguguguccuaaucuucucucugcguguagguaggccugugccgcaaacaagcuuaccaugggccagaucgugaccuucuuccaggaggugccccacgugaucgaggaggugaugaacaucgugcugaucgcccugagcauccuggccgugcugaagggccuguacaacguggccaccugcggccugaucggccuggugaccuuccugcugcugugcggcagaagcugcaccaccacccuguacaagggcguguacgagcugcagacccuggagcugaacauggagacccugaacaugaccaugccccugagcugcaccaagaacaacagccaccacuacaucagagugggcaacgagaccggccuggagcugacccugaccaacaccagcaucaucaaccacaaguucugcaaccugagcgacgcccacaagaagaaccuguacgaccacgcccugaugagcaucaucagcaccuuccaccugagcauccccaacuucaaccaguacgaggccaugagcugcgacuucaacggcggcaagaucagcgugcaguacaaccugagccacagcuacgccggcgacgccgccaaccacugcggcaccguggccaacggcgugcugcagaccuucaugagaauggccuggggcggcagcuacaucgcccuggacagcggcagaggcaacugggacugcaucaugaccagcuaccaguaccugaucauccagaacaccaccugggacgaccacugccaguucagcagacccagccccaucggcuaccugggccugcugagccagagaaccagagacguguacaucagcagaagacugcugggcaccuucaccuggacccugagcgacagcgagggcaaggacacccccggcggcuacugccugaccagauggaugcugaucgaggccgagcugaagugcuucggcaacaccgccguggccaagugcaacgagaagcacgacgaggaguucugcgacaugcugagacuguucgacuucaacaagcaggccauccagagacugaaggccgaggcccagaugagcauccagcugaucaacaaggccgugaacgcccugaucaacgaccagcugaucaugaagaaccaccugagagacaucaugggcauccccuacugcaacuacagcaaguacugcuaccugaacaacaccgccaccggcaagaccagccugcccaagugcugccugaucagcaacggcagcuaccugaacgagacccacuucagcgacgacaucgagcaggaggccgacaacaugaucaccgagaugcugcagaaggaguacauggagagacagggcaagaccccccugggccugguggaccuguucguguucagcaccagcuucuaccugaucagcaucuuccugcaccuggugaagauccccacccacagacacaucgugggcaagagcugccccaagccccacagacugaaccacaugggcaucugcagcugcggccuguacaagcagcccggcgugcccgugagauggaagagaugaggacuagucccuguucccagagcccacuuuuuuuucuuuuuuugaaauaaaauagccugucuuucagaucuaaaaaaaaaaaaaaaaaaaaaaaaaaaaaaaaaaaaaaaaaaaaaaaaaaaaaaaaaaaaaaaaaaaaaaaaaaaaaaaaaaaaaaaaaaaaaaaaaaaa

SEQ ID NO: 39101 - RNA, 1743 nt, Artificial Sequence
  mRNA product Design a-2 (A100) comprising derived and/or modified sequence from LASV(G3010-SLE-2013;Clade IV)__AIT17344__GPCmut11 (opt4)
aggagaguccgcucagccagguugcagaagcggcuuagcguguguccuaaucuucucucugcguguagguaggccugugccgcaaacaagcuuaccaugggccagaucgugaccuucuuccaggaggugccccacgugaucgaggaggugaugaacaucgugcugaucgcccugagcauccuggccgugcugaagggccuguacaacuucgccaccugcggccuggugggccuggugaccuuccugcugcugugcggcagaagcugcaccaccagccuguacaagggcguguacgagcugcagacccuggagcugaacauggagacccugaacaugaccaugccccugagcugcaccaagaacaacagccaccacuacaucauggugggcaacgagaccggccuggagcugacccugaccaacaccagcaucaucaaccacaaguucugcaaccugagcgacgcccacaagaagaaccuguacaaccacgcccugaugagcaucaucagcaccuuccaccugagcauccccaacuucaaccaguacgaggccaugagcugcgacuucaacggcggcaagaucagcgugcaguacaaccugagccacagcuacgccggcgacgccgccagccacugcggcaccguggccaacggcgugcugcagaccuucaugagaauggccuggggcggcagcuacaucgcccuggacagcggcuacggcaagugggacugcaucaugaccagcuaccaguaccugaucauccagaacaccaccugggaggaccacugccaguucagcagacccagccccaucggcuaccugggccugcugagccagagaaccagagacaucuacaucagcagaagacugcugggcaccuucaccuggacccugagcgacagcgagggcaaggacacccccggcggcuacugccugaccagauggaugcugaucgaggccgagcugaagugcuucggcaacaccgccguggccaagugcaacgagaagcacgacgaggaguucugcgacaugcugagacuguucgacuucaacaagcaggccauccagagacugaagaccgaggcccagaugagcauccagcugaucaacaaggccgugaacgcccugaucaacgaccagcugaucaugaagaaccaccugagagacaucaugggcauccccuacugcaacuacagcaaguacugcuaccugaaccacaccaccaccggcaagaccagccugcccaagugcugccuggugagcaacggcagcuaccugaacgagacccacuucagcgacgacaucgagcagcaggccgacaacaugaucaccgagaugcugcagaaggaguacauggagagacagggcaagaccccccugggccugguggaccuguucguguucagcaccagcuucuaccugaucagcaucuuccugcaccuggugaagauccccacccacagacacaucgugggcaagagcugccccaagccccacagacugaaccacaugggcaucugcagcugcggccuguacaagcagcccggcgugcccgugagauggaagagaugaggacuagucccuguucccagagcccacuuuuuuuucuuuuuuugaaauaaaauagccugucuuucagaucuaaaaaaaaaaaaaaaaaaaaaaaaaaaaaaaaaaaaaaaaaaaaaaaaaaaaaaaaaaaaaaaaaaaaaaaaaaaaaaaaaaaaaaaaaaaaaaaaaaaa

SEQ ID NO: 39102 - RNA, 1743 nt, Artificial Sequence
  mRNA product Design a-2 (A100) comprising derived and/or modified sequence from LASV(G502-SLE-2009;Clade IV)__AIT17126__GPCmut11 (opt4)
aggagaguccgcucagccagguugcagaagcggcuuagcguguguccuaaucuucucucugcguguagguaggccugugccgcaaacaagcuuaccaugggccagaucgugaccuucuuccaggaggugccccacgugaucgaggaggugaugaacaucgugcugaucgcccugagcauccuggccgugcugaagggccuguacaacuucgccaccugcggccuggugggccugcugaccuuccugcugcugugcggcagaagcugcaccaccggccuguacaagggcguguacgagcugcagacccuggagcugaacauggagacccugaacaugaccaugccccugagcugcaccaagaacaacagccaccacuacaucauggugggcaacgagaccggccuggagcugacccugaccaacaccagcaucaucaaccacaaguucugcaaccugagcgacgcccacaagaagaaccuguacgaccacgcccugaugagcaucaucagcaccuuccaccugagcauccccaacuucaaccaguacgaggccaugagcugcgacuucaacggcggcaagaucagcgugcaguacaaccugagccacagcuacgccggcgacgccgccgaccacugcggcaccguggccaacggcgugcugcagaccuucaugagaauggccuggggcggcagcuacaucgcccuggacagcggcagaggcagaugggacugcaucaugaccagcuaccaguaccugaucauccagaacaccaccugggaggaccacugccaguucagcagacccagccccaucggcuaccugggccugcugagccagagaaccagagacaucuacaucagcagaagacugcugggcaccuucaccuggacccugagcgacagcgagggcaaggacacccccggcggcuacugccugaccagauggaugcugaucgaggccgagcugaagugcuucggcaacaccgccguggccaagugcaacgagaagcacgacgaggaguucugcgacaugcugagacuguucgacuucaacaagcaggccauccagagacugaaggccgaggcccagaugagcauccagcugaucaacaaggccgugaacgcccugaucaacgaccagcuggugaugaagaaccaccugagagacaucaugggcauccccuacugcaacuacagcagauacugcuaccugaaccacaccaccaccggcagaaccagccugcccaagugcugccuggugagcaacggcagcuaccugaacgagacccacuucagcgacgacaucgagcagcaggccgacaacaugaucaccgagaugcugcagaaggaguacauggagagacagggcaagaccccccugggccugguggaccuguucguguucagcaccagcuucuaccugaucagcaucuuccugcaccuggugaagauccccacccacagacacaucgugggcaagagcugccccaagccccacagacugaaccacaugggcaucugcagcugcggccuguacaagcagcccggcgugcccgugaaguggaagagaugaggacuagucccuguucccagagcccacuuuuuuuucuuuuuuugaaauaaaauagccugucuuucagaucuaaaaaaaaaaaaaaaaaaaaaaaaaaaaaaaaaaaaaaaaaaaaaaaaaaaaaaaaaaaaaaaaaaaaaaaaaaaaaaaaaaaaaaaaaaaaaaaaaaaa

SEQ ID NO: 39103 - RNA, 1743 nt, Artificial Sequence
  mRNA product Design a-2 (A100) comprising derived and/or modified sequence from LASV(G733-SLE-2010;Clade IV)__AIT17154__GPCmut11 (opt4)
aggagaguccgcucagccagguugcagaagcggcuuagcguguguccuaaucuucucucugcguguagguaggccugugccgcaaacaagcuuaccaugggccagaucgugaccuucuuccaggaggugccccacgugaucgaggaggugaugaacaucgugcugaucgcccugagcauccuggccgugcugaagggccuguacaacuucgccaccugcggcaucgugggccuggugagcuuccugcugcugugcggcagaagcugcaccaccagccuguacaagggcguguacgagcugcagacccuggagcugaacauggagacccugaacaugaccaugccccugagcugcaccaagaacaacagccaccacuacaucauggugggcaacgagaccggccuggagcugacccugaccaacaccagcaucaucaaccacaaguucugcaaccugagcgacgcccacaagaagaaccuguacgaccacgcccugaugagcaucaucagcaccuuccaccugagcauccccaacuucaaccaguacgaggccaugagcugcgacuucaacggcggcaagaucagcgugcaguacaaccugagccacagcuacgccggcgacgccgccaaccacugcggcaccaucgccaacggcgugcugcagaccuucaugagaauggccuggggcggcagcuacaucgcccuggacagcggcagagacagaugggacugcaucaugaccagcuaccaguaccugaucauccagaacaccaccugggaggaccacugccaguucagcagacccagccccaucggcuaccugggccugcugagccagagaaccagagacaucuacaucagcagaagacugcugggcaccuucaccuggacccugagcgacagcgagggcaaggacacccccggcggcuacugccugaccagauggaugcugaucgaggccgagcugaagugcuucggcaacaccgccguggccaagugcaacgagaagcacgacgaggaguucugcgacaugcugagacuguucgacuucaacaagcaggccauccagagacugaaggccgaggcccagaugagcauccagcugaucaacaaggccgugaacgcccugaucaacgaccagcugaucaugaagaaccaccugagagacaucaugggcauccccuacugcaacuacagcaaguacugcuaccugaaccacaccaccaccggcaagaccagccugcccaagugcugccuggugagcaacggcagcuaccugaacgagacccacuucagcgacgacaucgagcagcaggccgacaacaugaucaccgagaugcugcagaaggaguacauggagagacagggcaagaccccccugggccugguggaccuguucguguucagcaccagcuucuaccugaucagcaucuuccugcaccuggugaagauccccacccacagacacguggugggcaagagcugccccaagccccacagacugaaccacaugggcaucugcagcugcggccuguacggccagcccggcgugcccgugaaguggaagagaugaggacuagucccuguucccagagcccacuuuuuuuucuuuuuuugaaauaaaauagccugucuuucagaucuaaaaaaaaaaaaaaaaaaaaaaaaaaaaaaaaaaaaaaaaaaaaaaaaaaaaaaaaaaaaaaaaaaaaaaaaaaaaaaaaaaaaaaaaaaaaaaaaaaaa

SEQ ID NO: 39104 - RNA, 1743 nt, Artificial Sequence
  mRNA product Design a-2 (A100) comprising derived and/or modified sequence from MOPV/LASV reassortant(IGS-1;Clade IV)__AFY05576__GPCmut11 (opt4)
aggagaguccgcucagccagguugcagaagcggcuuagcguguguccuaaucuucucucugcguguagguaggccugugccgcaaacaagcuuaccaugggccagaucgugaccuucuuccaggaggugccccacgugaucgaggaggugaugaacaucgugcugaucgcccugagcgugcuggccgugcugaagggccuguacaacuucgccaccugcggccuggugggccuggugaccuuccugcugcugugcggcagaagcugcaccaccagccuguacaagggcguguacgagcugcagacccuggagcugaacauggagacccugaacaugaccaugccccugagcugcaccaagaacaacagccaccacuacaucauggugggcaacgagaccggccuggagcugacccugaccaacaccagcaucaucaaccacaaguucugcaaccugagcgacgcccacaagaagaaccuguacgaccacgcccugaugagcaucaucagcaccuuccaccugagcauccccaacuucaaccaguacgaggccaugagcugcgacuucaacggcggcaagaucagcgugcaguacaaccugagccacagcuacgccggcgacgccgccaaccacugcggcaccguggccaacggcgugcugcagaccuucaugagaauggccuggggcggcagcuacaucgcccuggacagcggcagaggcaacugggacugcaucaugaccagcuaccaguaccugaucauccagaacaccaccugggaggaccacugccaguucagcagacccagccccaucggcuaccugggccugcugagccagagaaccagagacaucuacaucagcagaagacugcugggcaccuucaccuggacccugagcgacagcgagggcgaggacacccccggcggcuacugccugaccagauggaugcugaucgaggccgagcugaagugcuucggcaacaccgccguggccaagugcaacgagaagcacgacgaggaguucugcgacaugcugagacuguucgacuucaacaagcaggccauccagagacugaaggccgaggcccagaugagcauccagcugaucaacaaggccgugaacgcccugaucaacgaccagcugaucaugaagaaccaccugagagacaucaugggcauccccuacugcaacuacagcaaguacugcuaccugaaccacaccaccaccggcagaaccagccugcccaagugcugccuggugagcaacggcagcuaccugaacgagacccacuucagcgacgacaucgagcagcaggccgacaacaugaucaccgagaugcugcagaaggaguacauggagagacagggcaagaccccccugggccugguggaccuguucguguucagcaccagcuucuaccugaucagcaucuuccugcaccuggugaagauccccacccacagacacaucgugggcaagagcugccccaagccccacagacugaaccacaugggcaucugcagcugcggccuguacaagcagcccggcgugcccgugaaguggaagagaugaggacuagucccuguucccagagcccacuuuuuuuucuuuuuuugaaauaaaauagccugucuuucagaucuaaaaaaaaaaaaaaaaaaaaaaaaaaaaaaaaaaaaaaaaaaaaaaaaaaaaaaaaaaaaaaaaaaaaaaaaaaaaaaaaaaaaaaaaaaaaaaaaaaaa

SEQ ID NO: 39105 - RNA, 1743 nt, Artificial Sequence
  mRNA product Design a-2 (A100) comprising derived and/or modified sequence from LASV(LM765-SLE-2012;Clade IV)__AIT17814__GPCmut11 (opt4)
aggagaguccgcucagccagguugcagaagcggcuuagcguguguccuaaucuucucucugcguguagguaggccugugccgcaaacaagcuuaccaugggccagaucgugaccuucuuccaggaggugccccacgugaucgaggaggugaugaacaucgugcugaucgcccugagcauccuggccgugcugaagggccuguacaacuucgccaccugcggccuggugggccuggugaccuuccugcugcugugcggcagaagcugcaccaccagccuguacaagggcguguacgagcugcagacccuggagcugaacauggagacccugaacaugaccaugccccugagcugcaccaagaacaacagccaccacuacaucauggugggcaacgagaccggccuggagcugacccugaccaacaccagcaucaucgaccacaaguucugcaaccugagcgacgcccacagaaagaaccuguacgaccacgcccugaugagcaucaucagcaccuuccaccugagcauccccaacuucaaccaguacgaggccaugagcugcgacuucaacggcggcaagaucagcgugcaguacaaccugagccacagcuacgccaaggacgccgccgaccacugcggcaccguggccaacggcgugcugcagaccuucaugagaauggccuggggcggcagcuacaucgcccuggacagcggcagaggcagaugggacugcaucaugaccagcuaccaguaccugaucauccagaacaccaccugggaggaccacugccaguucagcagacccagccccaucggcuaccugggccugcugagccagagaaccagagacaucuacaucagcagaagacugcugggcaccuucaccuggacccugagcgacagcgagggcaaggacacccccggcggcuacugccugaccagauggaugcugaucgaggccgagcugaagugcuucggcaacaccgccguggccaagugcaacgagaagcacgacgaggaguucugcgacaugcugagacuguucgacuucaacaagcaggccauccagagacugaaggccgaggcccagaugagcauccagcugaucaacaaggccgugaacgcccugaucaacgaccagcugaucaugaagaaccaccugagagacaucaugggcauccccuacugcaacuacagcaaguacugcuaccugaaccacaccaccaccggcaagaccagccugcccaagugcugccuggugagcaacggcagcuaccugaacgagacccacuucagcgacgacaucgagcagcaggccgacaacaugaucaccgagaugcugcagaaggaguacauggagagacagggcaagaccccccugggccugguggaccuguucguguucagcaccagcuucuaccugaucagcaucuuccugcaccuggugaagauccccacccacagacacaucgugggcaagcccugccccaagccccacagacugaaccacaugggcaucugcagcugcggccuguacaagcagcccggcgugcccgugaaguggaagagaugaggacuagucccuguucccagagcccacuuuuuuuucuuuuuuugaaauaaaauagccugucuuucagaucuaaaaaaaaaaaaaaaaaaaaaaaaaaaaaaaaaaaaaaaaaaaaaaaaaaaaaaaaaaaaaaaaaaaaaaaaaaaaaaaaaaaaaaaaaaaaaaaaaaaa

SEQ ID NO: 39106 - RNA, 1743 nt, Artificial Sequence
  mRNA product Design a-2 (A100) comprising derived and/or modified sequence from LASV(LM776-SLE-2012;Clade IV)__AIT17824__GPCmut11 (opt4)
aggagaguccgcucagccagguugcagaagcggcuuagcguguguccuaaucuucucucugcguguagguaggccugugccgcaaacaagcuuaccaugggccagaucgugaccuucuuccaggaggugccccacgugaucgaggaggugaugaacaucgugcugaucgcccugagcauccuggccgugcugaagggccuguacaacuucgccaccugcggccuggugggccuggugaccuuccugcugcugugcggcagaagcugcaccaccagcguguacaagggcguguacgagcugcagacccuggagcugaacauggagacccugaacaugaccaugccccugagcugcaccaagaacaacagccaccacuacaucauggugggcaacgagaccggccuggagcugacccugaccaacaccagcaucaucaaccacaaguucugcaaccugagcgacgcccacaagaagaaccuguacgaccacgcccugaugagcaucaucagcaccuuccaccugagcauccccaacuucaaccaguacgaggccaugagcugcgacuucaacggcggcaagaucagcgugcaguacaaccugagccacagcuacgccggcgacgccgccaaccacugcggcaccguggccaacggcgugcugcagaccuucaugagaauggccuggggcggcagcuacaucgcccuggacagcggccacggcaagugggacugcaucaugaccagcuaccaguaccugaucauccagaacaccaccugggaggaccacugccaguucagcagacccagccccaucggcuaccugggccugcugagccagagaaccagagacaucuacaucagcagaagacugcugggcaccuucaccuggacccugagcgacagcgagggcaaggacacccccggcggcuacugccugaccagauggaugcugaucgaggccgagcugaagugcuucggcaacaccgccguggccaagugcaacgagaagcacgacgaggaguucugcgacaugcugagacuguucgacuucaacaagcaggccauccagagacugaaggccgaggcccagaugagcauccagcugaucaacaaggccgugaacgcccugaucaacgaccagcugaucaugaagaaccaccugagagacaucaugggcauccccuacugcaacuacagcaaguacugcuaccugaaccacaccaccaccggcaagaccagccugcccaagugcugccuggugagcaacggcagcuaccugaacgagacccacuucagcgacgacaucgagcagcaggccgacaacaugaucaccgagaugcugcagaaggaguacauggagagacagggcaagaccccccugggccugguggaccuguucguguucagcaccagcuucuaccugaucagcaucuuccugcaccuggugaagauccccacccacagacacaucgugggcaagagcugccccaagccccacagacugaaccacaugggcaucugcagcugcggccuguacaagcagcccggcgugcccgugagauggaagagaugaggacuagucccuguucccagagcccacuuuuuuuucuuuuuuugaaauaaaauagccugucuuucagaucuaaaaaaaaaaaaaaaaaaaaaaaaaaaaaaaaaaaaaaaaaaaaaaaaaaaaaaaaaaaaaaaaaaaaaaaaaaaaaaaaaaaaaaaaaaaaaaaaaaaa

SEQ ID NO: 39107 - RNA, 1743 nt, Artificial Sequence
  mRNA product Design a-2 (A100) comprising derived and/or modified sequence from LASV(Mad39;Clade IV)__ANH09722__GPCmut11 (opt4)
aggagaguccgcucagccagguugcagaagcggcuuagcguguguccuaaucuucucucugcguguagguaggccugugccgcaaacaagcuuaccaugggccagaucgugaccuucuuccaggaggugccccacgugaucgaggaggugaugaacaucgugcugaucgcccugagcauccuggccgugcugaagggccuguacaacguggccaccugcggccugaucggccuggugaccuuccugcugcugugcggcagaagcugcaccaccacccuguacaagggcguguacgagcugcaggcccuggagcugaacauggagacccugaacaugaccaugccccugagcugcaccaagaacaacagccaccacuacaucagagugggcaacgagaccggccuggagcugacccugaccaacaccagccugaucaaccacaaguucugcaaccugagcgacgcccacaagaagaaccuguacgaccacgcccugaugagcaucaucagcaccuuccaccugagcauccccaacuucaaccaguacgaggccaugagcugcgacuucaacgacggcaagaucagcgugcaguacaaccugagccacaccuacgccggcgacaccgccaaccacugcggcaccguggccaacggcgugcugcagaccuucaugagaauggccuggggcggcagcuacaucgcccuggacagcggcagaggcggcugggacugcaucaugaccagcuaccaguaccugaucauccagaacaccaccugggaggaccacugccaguucagcagacccagccccaucggcuaccugggccugcugagccagagaaccagagacaucuacaucagcagaagacugcugggcaccuucaccuggacccugagcgacagcgagggcaaggacacccccggcggcuacugccugaccagauggaugcugaucgaggccgagcugaagugcuucggcaacaccgccguggccaagugcaacgagaagcacgacgaggaguucugcgacaugcugagacuguucgacuucaacaagcaggccauccagagacugaaggccgaggcccagaugagcauccagcugaucaacaaggccgugaacgcccugaucaacgaccagcugaucaugaagaaccaccugagagacaucaugggcauccccuacugcaacuacagcaaguacugcuaccugaaccacaccgugaccggcaagaccagccugcccaagugcugccuggugagcaacggcagcuaccugaacgagacccacuucagcgacgacaucgagcagcaggccgacaacaugaucaccgagaugcugcagaaggaguacauggagagacagggcaagaccccccugggccugguggaccuguucguguucagcaccagcuucuaccugaucagcaucuuccugcaccuggugaagauccccacccacagacacguggugggcaagcccugccccaagccccacagacugaaccacaugggcaucugcagcugcggcuucuacaagcagcccggcgugcccgugagauggaagagaugaggacuagucccuguucccagagcccacuuuuuuuucuuuuuuugaaauaaaauagccugucuuucagaucuaaaaaaaaaaaaaaaaaaaaaaaaaaaaaaaaaaaaaaaaaaaaaaaaaaaaaaaaaaaaaaaaaaaaaaaaaaaaaaaaaaaaaaaaaaaaaaaaaaaa

SEQ ID NO: 39108 - RNA, 1743 nt, Artificial Sequence
  mRNA product Design a-2 (A100) comprising derived and/or modified sequence from LASV(Z0947-SLE-2011;Clade IV)__AIT17840__GPCmut11 (opt4)
aggagaguccgcucagccagguugcagaagcggcuuagcguguguccuaaucuucucucugcguguagguaggccugugccgcaaacaagcuuaccaugggccagaucgugaccuucuuccaggaggugccccacgugaucgaggaggugaugaacaucgugcugaucgcccugagcauccuggccgugcugaagggccuguacaacuucgccaccugcggccuggugggccuggugaccuuccugcugcugugcggcagaagcugcaccaucagccuguacaagggcguguacgagcugcagacccuggagcugaacauggagacccugaacaugaccaugccccugagcugcaccaagaacaacagccaccacuacaucauggugggcaacgagaccggccuggagcugacccugaccaacaccagcaucaucaaccacaaguucugcaaccugagcgacgcccacaagaagaaccuguacgaccacgcccugaugagcaucaucagcaccuuccaccugagcauccccaacuucaaccaguacgaggccaugagcugcgacuucaacggcggcaagaucagcgugcaguacaaccugagccacagcuacgccggcgacgccgccaaccacugcggcaccguggccaacggcgugcugcagaccuucaugagaauggccuggggcggcagcuacaucgcccuggacagcggcagagacagaugggacugcaucaugaccagcuaccaguaccugaucauccagaacaccaccugggaggaccacugccaguucagcagacccagccccaucggcuaccugggccugcugagccagagaaccagagacaucuacaucagcagaagacugcugggcaccuucaccuggacccugagcgacagcgagggcaaggacacccccggcggcuacugccugaccagauggaugcugaucgaggccgagcugaagugcuucggcaacaccgccguggccaagugcaacgagaagcacgacgaggaguucugcgacaugcugagacuguucgacuucaacaagcaggccauccagagacugaaggccgaggcccagaugagcauccagcugaucaacaaggccgugaacgcccugaucaacgaccagcugaucaugaagaaccaccugagagacaucaugggcauccccuacugcaacuacagcaaguacugcuaccugaaccacaccaccaccggcaagaccagccugcccaagugcugccuggugagcaacggcagcuaccugaacgagacccacuucagcgacgacaucgagcagcaggccgacaacaugaucaccgagaugcugcagaaggaguacauggagagacagggcaagaccccccugggccugguggaccuguucguguucagcaccagcuucuaccugaucagcaucuuccugcaccuggugaagauccccacccacagacacaucgugggcaagcccugccccaagccccacagacugaaccacaugggcaucugcagcugcggccuguacaagcagcccggcgugcccgugaaguggaagagaugaggacuagucccuguucccagagcccacuuuuuuuucuuuuuuugaaauaaaauagccugucuuucagaucuaaaaaaaaaaaaaaaaaaaaaaaaaaaaaaaaaaaaaaaaaaaaaaaaaaaaaaaaaaaaaaaaaaaaaaaaaaaaaaaaaaaaaaaaaaaaaaaaaaaa

SEQ ID NO: 39109 - RNA, 1743 nt, Artificial Sequence
  mRNA product Design a-2 (A100) comprising derived and/or modified sequence from LASV(Josiah;Clade IV)__NP_694870__GPCmut11 (opt5)
aggagaguccgcucagccagguugcagaagcggcuuagcguguguccuaaucuucucucugcguguagguaggccugugccgcaaacaagcuuaccaugggccagaucgugaccuucuuucaagaggucccccacguuauugaagaggugaugaacaucgugcugauugcccucagcguccuggcugugcuuaaggggcuguacaauuucgccacaugcggacucguuggccuggugacguuucuucugcucugugggagauccugcaccacaucucuguauaaaggagucuacgaacugcagacccucgagcugaacauggaaacacuuaauaugaccaugccucugagcuguacaaagaacaauucccaucacuauaucauggugggcaacgagaccgggcucgagcugacgcuuaccaauacaucuauuaucaaccauaaauucugcaaucugagcgacgcgcacaagaaaaaccucuacgaucaugcucugauguccaucauuucuaccuuucaccugagcaucccgaauuucaaccaguaugaagccauguccugugacuuuaauggaggcaagauuagcguucaguacaaccucucucacuccuaugccggcgaugcugccaaucauugcgggacaguggcuaacggaguccugcaaaccuucaugcggauggccuggggcgggagcuacaucgcgcuugacucuggacgcggcaacugggauuguauuaugacguccuaccaguaucugaucauucagaauacaaccugggaggaccacugccaguuuagcagacccucuccuaucggguaccucggacugcuuucccaacggacacgcgauaucuauauuagcagacggcugcucggcaccuucaccuggacacuguccgacucugaaggcaaggauacgcccgggggauacugucugacccgcuggaugcucaucgaggccgagcugaaaugcuuuggcaacacagcuguggccaaguguaaugaaaaacaugacgaggaguucugcgauaugcuuagacuguuugacuucaacaagcaggcuauucagcggcucaaagccgaagcgcagaugagcauccaacugauuaauaaggccgugaacgcucuuaucaaugaucagcugaucaugaagaaccaccuccgcgacauuauggggaucccuuauugcaauuacuccaaauauuguuaccugaaccacaccacaaccggaagaacgagccugcccaagugcugucucgucucuaauggcuccuaccugaacgaaacacauuucagcgacgauauugagcagcaagccgacaauaugaucaccgagaugcuucagaaagaauauauggagcggcaggggaagaccccucugggacucguugaucuguuuguguucucuaccagcuuuuaccugauuuccaucuuccuucaccucgugaaaaucccgacacaucgccacauugucggcaagucuugccccaaaccucauagacugaaccacaugggcaucuguagcugcgggcuguauaagcagcccggagugccuguuaaguggaaacggugaggacuagucccuguucccagagcccacuuuuuuuucuuuuuuugaaauaaaauagccugucuuucagaucuaaaaaaaaaaaaaaaaaaaaaaaaaaaaaaaaaaaaaaaaaaaaaaaaaaaaaaaaaaaaaaaaaaaaaaaaaaaaaaaaaaaaaaaaaaaaaaaaaaaa

SEQ ID NO: 39110 - RNA, 1740 nt, Artificial Sequence
  mRNA product Design a-2 (A100) comprising derived and/or modified sequence from LASV(LP;Clade I)__AAF86701__GPCmut11 (opt5)
aggagaguccgcucagccagguugcagaagcggcuuagcguguguccuaaucuucucucugcguguagguaggccugugccgcaaacaagcuuaccaugggccagaucauuaccuucuuucaagaggugccccacgucaucgaagagguuaugaacauugugcugaucgcccucagccugcuugcuauucugaaggggcucuacaauaucgccacaugcggaaucauuggccugguggcguuccuuuuucugugugggaaauccugcucucucacgcugaagggaggcuaugaacugcagacccucgagcugaacauggaaacacuuaauaugaccaugccucugagcuguaccaaaaacuccucucaucacuacaucagagucgggaaugagacaggacucgagcugacacuuaccaacacgagcauuaucaaucauaaguucugcaaccuguccgacgcucacaaaaagaaucucuaugaucaugcccugaugucuauuaucagcaccuuucaccuguccauuccgaacuucaaucaguacgaagccaugagcugugacuuuaacggcggcaagaucucugugcaguauaaucucucccacagcuacgcuggggaugccgcugagcauugcggaacaguugccaacggcgugcugcaaaccuucaugcggauggcguggggagggcgcuauaucgcccuugacucuggcaaagggaauugggauuguauuaugacauccuaccaguaccugaucauucagaacaccacgugggaagaccacugccaguuuagcagacccucuccuaucggauaucucggccugcuuucccaacggacacgcgauauuuacaucagcagacggcugcucggcaccuucacauggacccuguccgacucugaggggaacgagacccccggaggcuauugucugacacgcuggaugcucaucgaagcugagcugaagugcuuugggaauacggccgucgcuaaauguaacgaaaagcaugaugaggaguucugcgacaugcuuagacuguuugauuucaauaaacaggccauucggcgccucaaggcggaagcccagaugagcauccagcugauuaacaaggcugugaaugcccuuaucaacgaccaacugauuaugaaaaaucaccucagagauaucaugggaaucccuuacugcaacuauuccaaguacuguuaucugaaucacaccagcucuggccggacaucccugcccaaaugcugucucauuagcaacgggucuuaccugaaugagacccaguucagcgacgacaucgaacagcaagcugauaacaugauuacagagaugcuucagaaggaauacaucgagcgccagggaaaaaccccucugggccucguugacauuuuuaucuucuccacgucuuuuuaucugauuagcaucuuccugcaucuuaucaagauuccgacacacagacauaucgugggcaaacccugcccuaagccccaccggcucaaucauaugggggucuguuccugcggacuguacaagcacccuggcgugcccaccaaauggaagcgcugaggacuagucccuguucccagagcccacuuuuuuuucuuuuuuugaaauaaaauagccugucuuucagaucuaaaaaaaaaaaaaaaaaaaaaaaaaaaaaaaaaaaaaaaaaaaaaaaaaaaaaaaaaaaaaaaaaaaaaaaaaaaaaaaaaaaaaaaaaaaaaaaaaaaa

SEQ ID NO: 39111 - RNA, 1740 nt, Artificial Sequence
  mRNA product Design a-2 (A100) comprising derived and/or modified sequence from LASV(803213;Clade II)__AAF86703__GPCmut11 (opt5)
aggagaguccgcucagccagguugcagaagcggcuuagcguguguccuaaucuucucucugcguguagguaggccugugccgcaaacaagcuuaccaugggccagaucauuaccuucuuucaagaggugccccacgucaucgaagagguuaugaacauugugcugaucgcccucagccugcuugcuauucugaaggggaucuacaauguggccacaugcggacucuucggccugaucuccuuucuucugcucugugggagaucuugcagcgucacguauaaaggaguguacgaacugcagacccuggagcucaacauggcgaaucugaacaugacaaugccucuuuccuguaccaagaauaacucucaucacuauauuaugguuggcaaugaaacagggcuggagcucacccugacaaacaccagcaucauuaaucauaaauucugcaaccuuuccgacgcucacaagaaaaaucuguacgaucaugcccucaugucuaucauuagcacguuucaccuguccaucccgaacuucaaucaguaugaggccaugagcugugacuuuaacggaggcaagauuucugugcaguacaaucugucccacagcuucgcugucgaugccgcuaaccauugcggcaccaucgccaacggggugcuccaaacauuuaugcggauggcguggggaggcucuuauaucgcccuggacuccgggaagggaaauugggauuguauuaugaccagcuaccaguaccuuaucauucagaacacaaccugggaagaccacugccaguucucucgccccuccccuaucggcuaucuggggcuccugagccaaagaacgcgggauauuuacaucucccgcagacuucugggaacauuuaccuggacacucucugacagcgagggcaaugaagcucccggcggguauugucugacccgguggaugcugaucgaggccgagcucaaaugcuucggaaacaccgcuguugccaaguguaaugaaaaacaugaugaggaauuuugcgacaugcugcgccuuuucgauuucaacaagcaggcgauuaaaagacugaagacagaggcccagauguccauccagcucauuaauaaggcugugaacgcccugaucaaugaccaacuuauuaugaaaaaccaucugcgggauaucaugggcaucccuuacugcaauuauagccgcuacuguuaucucaaccacacggucaccgggaagacaucucugcccagaugcugucugguguccaauggaagcuaccucaacgaaacccacuuuucugacgacauugagcagcaggcugauaauaugaucacagagaugcugcaaaaagaauacauggaccggcagggcaagaccccucuugggcugguggaucucuucgucuuuagcacguccuucuaucugauuucuaucuuucugcaccuuguuaaaauuccgacacaucgccacaucgugggaaagcccugcccuaaaccccauagacucaaccacaugggcauuuguagcugcggccuguacaagcacccuggggugcccgucaaguggaaacggugaggacuagucccuguucccagagcccacuuuuuuuucuuuuuuugaaauaaaauagccugucuuucagaucuaaaaaaaaaaaaaaaaaaaaaaaaaaaaaaaaaaaaaaaaaaaaaaaaaaaaaaaaaaaaaaaaaaaaaaaaaaaaaaaaaaaaaaaaaaaaaaaaaaaa

SEQ ID NO: 39112 - RNA, 1740 nt, Artificial Sequence
  mRNA product Design a-2 (A100) comprising derived and/or modified sequence from LASV(GA391;Clade III)__CAA36645__GPCmut11 (opt5)
aggagaguccgcucagccagguugcagaagcggcuuagcguguguccuaaucuucucucugcguguagguaggccugugccgcaaacaagcuuaccaugggccagaucgugaccuucuuucaagaggucccccacguuauugaagaggugaugaacaucgugcugauugcccucagcauccuggcuauucuuaaggggcuguacaaugucgccacaugcggacucaucggccuggugacguuccuucugcucuccgggagaucuuguagccugaucuauaaaggaaccuacgaacugcagacacucgagcugaacauggaaacccuuaauaugacaaugccucuguccugcaccaagaacaauucucaucacuauauucggguuggcaacgagacagggcucgagcugacccuuacgaauaccagcauccugaaccauaaauuuuguaaucucuccgacgcgcacaagcgcaaccuguacgaucauucucugaugagcauuaucuccacauuccaccucagcauuccgaauuuuaaccaguaugaagcuaugucuugcgacuucaauggaggcaaaaucaccgugcaguacaaccugucccacagcuuugccgucgaugccgcuggccauugugggacacuugccaauggagugcugcaaaccuucaugagaauggcuuggggcgggucuuauauugcccucgacuccggacggggcaacugggauugcaucaugacgagcuaccaguaccugaucauucagaacacaaccugggacgaucacugucaguuuucucgccccuccccuaucggguaucuuggacugcucagccaaagaacacgggacauuuacaucucccgcagacugcugggcaccuucaccuggacacucucugauagcgagggcaaugaaacgcccgggggauauugccugacccgguggaugcuuauugaggcggagcugaaguguuuuggcaacacagccguugcuaagugcaaugaaaaacaugacgaggaguucugugauaugcuccgccuguuugacuucaacaagcaggccaucagacggcuuaaaaccgaagcucagauguccauccagcugauuaauaaggccgugaacgcgcucaucaaugaucaacugauuaugaaaaaccaucugcgcgacaucauggggauuccuuacugcaauuauagcagauacugcuaucucaaccacacaucuaccggaaagacgucccugccccgguguugccuuaucagcaauggcucuuaccugaacgaaacaaaguucagcgacgauaucgagcagcaggccgacaauaugauuaccgagaugcuccaaaaagaauacaucgaucgccaggggaagaccccucugggacuggucgaccuuuuuguguucuccacaucuuuuuaucucauuagcaucuuccugcaccuggugaaaauuccgacccacagacauaucgucggcaagcccuguccuaaaccccaccggcucaaccauaugggcauuugcuccugugggcuguacaagcagccuggaguucccgugagauggaaacgcugaggacuagucccuguucccagagcccacuuuuuuuucuuuuuuugaaauaaaauagccugucuuucagaucuaaaaaaaaaaaaaaaaaaaaaaaaaaaaaaaaaaaaaaaaaaaaaaaaaaaaaaaaaaaaaaaaaaaaaaaaaaaaaaaaaaaaaaaaaaaaaaaaaaaa

SEQ ID NO: 39113 - RNA, 1743 nt, Artificial Sequence
  mRNA product Design a-2 (A100) comprising derived and/or modified sequence from LASV(AV;Clade V)__CCA30314__GPCmut11 (opt5)
aggagaguccgcucagccagguugcagaagcggcuuagcguguguccuaaucuucucucugcguguagguaggccugugccgcaaacaagcuuaccaugggccagaucgugaccuucuuucaagaggucccccacguuauugaagaggugaugaacaucgugcugauugcccucagcauccuggcuguccuuaaggggcuguacaauauugccacaugcggacucaucggccugaucacguuccuucugcucugugggagauccugcucuagcaaccuguauaaaggaguguacgaacugcagucccucgaccugaauauggagacccuuaacaugacaaugccucugucuuguaccaagaauaacagccaucacuauauucggguuggcaaugauacagggcucgaacugacccuuacaaacaccuccauccugaaucauaaauuuugcaaccucucugacgcgcacaagaaagaucuguacgaccaugcucugaugagcauuaucuccacguuccaccucagcauuccgaauuuuaaccaguaugaggccaugucuugugauuucaauggaggcaagaucuccgugcaguacaaccugagccacucuuaugccauugacgcugccaaucauugcggcaccgucgcuaacgggauccuucaaacauuuaugcgcauggccuggggaggcuccuacaucgcgcuggauagcgggagaggaaacugggacuguauuaugaccucuuaccaguaucucaucauucagaauacaaccugggagaaccacugccaguucucccggcccagcccuaucggcuaccuggggcuucugucccaacgcacgagagauauuuauaucucucggcgccuccugggaacauuuaccuggacacugagcgacuccgaaggcaaugccacccccggcggguacugucucaccagauggaugcugaucgaggcugaacuuaagugcuucggaaacacagccguggcuaaauguaaugagaagcaugaugaggaauuuugcgacaugcugcgccucuucgauuuuaacaaacaggccauuagccggcugaagucugaggcgcagauguccauccagcuuauuaauaaagccguuaacgcucugaucaaugaccaacucauuaugaagaaccaccugagagacaucaugggcaucccuuauugcaauuacagcaaguauuguuaccugaaccacacgauuaccgggaaaacaucucuccccaagugcugucuggugagcaauggauccuaccuuaacgaaacccauuucucugaugacaucgagcagcaggccgauaauaugauuacagaaaugcugcaaaaagaguauauggagcggcagggcaagaccccucucgggcuggucgaccuguucguguuuagcacguccuucuaccuuaucagcauuuuucuccgccuggugaaaaucccgacacacagacauauugucggaaagcccugcccuaaaccccaccggcugaaccauaugggcaucuguucuugcggccucuauaagcagccugggguucccgugcgcuggaagagaugaggacuagucccuguucccagagcccacuuuuuuuucuuuuuuugaaauaaaauagccugucuuucagaucuaaaaaaaaaaaaaaaaaaaaaaaaaaaaaaaaaaaaaaaaaaaaaaaaaaaaaaaaaaaaaaaaaaaaaaaaaaaaaaaaaaaaaaaaaaaaaaaaaaaa

SEQ ID NO: 39114 - RNA, 1740 nt, Artificial Sequence
  mRNA product Design a-2 (A100) comprising derived and/or modified sequence from LASV(Togo/2016/7082;Clade VI)__AMR44577__GPCmut11 (opt5)
aggagaguccgcucagccagguugcagaagcggcuuagcguguguccuaaucuucucucugcguguagguaggccugugccgcaaacaagcuuaccaugggccagaucauuaccuucuuucaagaggugccccacgucaucgaagagguuaugaacauugugcugaucgcccucagccugcuugcuauucugaaggggguguacaaugucgccacaugcggaaucaucggccucgugacguuccuguuucuuugugggagauccugcucucugauuuauaaaggaagcuacgaacuccagacccuggagcugaacauggaaacacucaauaugaccaugccucuguccuguacaaagaacucuagccaucacuauauccggguuggcaaugagaccgggcuugagcugacacucaccaacacguccauuaucaaucauaaauucugcaaccugucugacgcgcacaagcgcaaucuuuacgaucaugcucugaugagcauucucuccaccuuucaccugagcaucccgaacuucaaucaguaugaagccaugucuugugacuuuaacggaggcaaaauuuccgugcaguacaaucugagccacgccuaugcugucgaugccgcugagcauugcggcacaguggccaacgggguucuccaaaccuucaugagaauggcguggggaggcucuuacaucgcccuggacuccgggcggggaaauugggauuguaucaugacaagcuaccaguaucuuauuauccagaacaccacgugggaagaccacugccaguuuucucgccccuccccuauuggcuaccuggggcuccugagccaaagaacacgggauaucuauauuucccgcagacuucugggaaccuucacauggacccucucugacagcgagggcaacgagacccccggcggguacugucugacacgguggaugcugaucgaagcugagcucaagugcuuuggaaauacggccguggcuaaguguaacgaaaaacaugaugaggaguucugcgacaugcugcgccuuuuugauuucaauaagcaggccauccagagacugaaauccgaagcgcagaugagcauucaacucaucaacaaggccgucaaugcucugauuaacgaccagcuuaucaugaaaaaucaucugcgggauaugaugggcauuccuuauugcaacuacucuaaguauuguuaccucaaucacaccuccagcgggcgcacaucucugcccaagugcugucuggugagcaacggauccuaccucaaugagacccacuucucugacgacaucgaacagcaagccgauaacaugaucacagagaugcugcagaaagaauauauugacagacagggcaagaccccucuugggcugguggaucucuuugucuucagcacguccuuuuaccugaucagcauuuuccugcaccuuaucaaaauuccgacacaucggcacaucguuggaaagcccugcccuaaaccccaucgccucaaucacaugggcauuuguucuugcggccuguauaagcagccuggggugcccaccagauggaaacggugaggacuagucccuguucccagagcccacuuuuuuuucuuuuuuugaaauaaaauagccugucuuucagaucuaaaaaaaaaaaaaaaaaaaaaaaaaaaaaaaaaaaaaaaaaaaaaaaaaaaaaaaaaaaaaaaaaaaaaaaaaaaaaaaaaaaaaaaaaaaaaaaaaaaa

SEQ ID NO: 39115 - RNA, 1740 nt, Artificial Sequence
  mRNA product Design a-2 (A100) comprising derived and/or modified sequence from LASV(KAK-428;Clade n.d. (VII))__ANH09740__GPCmut11 (opt5)
aggagaguccgcucagccagguugcagaagcggcuuagcguguguccuaaucuucucucugcguguagguaggccugugccgcaaacaagcuuaccaugggccagaucgugaccuucuuucaagaggucccccacguuauugaagaggugaugaacaucgugcugauugcccucagccugcuugcuauccugaaggggcucuacaauuucgccacaugcggagucauuggccugaucacguuucuucugcucugugggagauccugcucugcgaccuauaaaggacaguacgaacugcagacacuggagcucaacauggaaagccugaauaugaccaugccucuuuccuguacaaagaacaauucucaucacuauauccgggcuggcaacaauaccgggcuggagcucacacugaccaacacgagcauuaucucccauaaauucugcaaucuuucugacgcccacaagaaaaaccuguacgaucauacccucaugagcauuaucacaaccuuucaccuguccauuccgaauuucaaccaguaugaggccaugagcugugacuuuaauggaggcaagaucucuauucaauacaaccugucccacagcuaugcuggcgaugccgcucagcauugcgggacaguggccaauggaguucuccagaccuucaugcgcauggcguggggcgggucuuaccuggcccuugacuccggaagacggggcugggauuguaucaucagcucuuaccaguaucugauuauccaaaacacgacaugggacgaucacugccaguuuucccgccccagcccuauuggguaccucggauucgugucccagaagaccagagacaucuauauuucucggcgccugcuuggcacauuuaccuggacccugagcgauuccgaaggccaugacaugcccgggggauacugucucacaagauggaugcugaucgaggcugaucugaaaugcuucggcaacacggccgucgcuaaguguaaugaaaaacacgacgaggaguuuugcgauauguggcgccucuucgacuucaacaagcaggccauccaacggcugaaagcggaagcccagaugaauauucagcuuaucaacaaggcugugaaugcccugauuaacgaccaacucaugaugaagaaucaccugagagauaucauggggauuccuuauugcaacuacagcaaauuuuguuaucuuaauaacaccacaaccggacggacaucucugccccgcugcugucucaucuccaauggcagcuaccugaacgagacccauuucucugacgauaucgaacagcaggcugacaauaugauuacggagaugcugcagaaggaauacauggauagacaagggaaaacaccucucggacugguugaccuuuuuguguucagcaccuccuuuuaucugaucaccauuuuccuccaccuggucaagaucccgacacaucggcacauugugggcaaacccugcccuaagccccaucgccugaaccacaugggcaucuguucuugcgggcuuuacaaacagccuggagugcccgucagauggaagcggugaggacuagucccuguucccagagcccacuuuuuuuucuuuuuuugaaauaaaauagccugucuuucagaucuaaaaaaaaaaaaaaaaaaaaaaaaaaaaaaaaaaaaaaaaaaaaaaaaaaaaaaaaaaaaaaaaaaaaaaaaaaaaaaaaaaaaaaaaaaaaaaaaaaaa

SEQ ID NO: 39116 - RNA, 1740 nt, Artificial Sequence; identical to SEQ ID NO: 39110
  mRNA product Design a-2 (A100) comprising derived and/or modified sequence from LASV(Pinneo-NIG-1969;Clade I)__AIT17836__GPCmut11 (opt5)

SEQ ID NO: 39117 - RNA, 1740 nt, Artificial Sequence
  mRNA product Design a-2 (A100) comprising derived and/or modified sequence from LASV(ISTH0009-NIG-2011;Clade II)__AIT17404__GPCmut11 (opt5)
aggagaguccgcucagccagguugcagaagcggcuuagcguguguccuaaucuucucucugcguguagguaggccugugccgcaaacaagcuuaccaugggccagaucauuaccuucuuucaagaggugccccacgucaucgaagagguuaugaacauugugcugaucgcccucagccugcuugcuauucugaaggggaucuacaauguggccacaugcggacucuucggccuggucuccuuucuucugcucugugggagaucuugcagcacgaccuauaaaggaguguacgaacugcagacacuggagcucgacauggcgucccugaacaugaccaugccucuuucuuguacaaagaauaacagccaucacuauaucaugguuggcaaugaaaccgggcuggagcucacacugaccaacacguccauuaucaaucauaaauucugcaaccuuucugaugcucacaagaaaaaucuguacgaccaugcccucaugagcauuaucuccaccuuucaccugagcauuccgaacuucaaucaguaugaggccaugucuugugauuuuaacggaggcaagaucuccgugcaguacaaucugagccacgcuuaugccgucgacgcugccaaccauugcggcacaauugcgaauggggugcuccaaaccuucaugcggauggccuggggaggcucuuacaucgcucuggauuccgggaagggaagcugggacuguaucaugacaucuuaccaguaucuuauuauccagaacaccacgugggaagaucacugccaguuuucccgccccagcccuauuggcuaccuggggcuccugucccaaagaacacgggacaucuauauuucucgcagacuucugggaaccuucacauggacccucagcgauuccgagggcaacgaaacccccggcggguacugucugacacgguggaugcugaucgaggccgagcucaaaugcuuuggaaauacggcuguugccaaguguaacgaaaaacaugacgaggaguucugcgauaugcugcgccuuuuugacuucaauaagcaggcgaucagacggcugaaaaccgaagcccagaugagcauucagcucaucaacaaggcugugaaugcccugauuaacgaucaacuuaucaugaagaaucaucugcgcgacauuaugggcaucccuuauugcaacuacucuaaauauuguuaccucaaucacacagucaccgggaagacaucccugcccagaugcugucuggugagcaacggaucuuaccucaaugaaacccacuucagcgacgauaucgagcagcaggcugacaacaugauuacggagcugcuucaaaaagaauauauggaucggcagggcaagacaccucuggggcucguggaccuguuugucuucuccaccucuuuuuaccugaucagcauuuuccuucaccucaucaaaauuccgacccaucgccacaucacaggaaagcccugcccuaaaccccauagacugaaucacaugggcauuuguuccugcggccuguauaagcacccugggguucccgugaaguggaaacggugaggacuagucccuguucccagagcccacuuuuuuuucuuuuuuugaaauaaaauagccugucuuucagaucuaaaaaaaaaaaaaaaaaaaaaaaaaaaaaaaaaaaaaaaaaaaaaaaaaaaaaaaaaaaaaaaaaaaaaaaaaaaaaaaaaaaaaaaaaaaaaaaaaaaa

SEQ ID NO: 39118 - RNA, 1740 nt, Artificial Sequence
  mRNA product Design a-2 (A100) comprising derived and/or modified sequence from LASV(ISTH2010-NIG-2012;Clade II)__AIT17482__GPCmut11 (opt5)
aggagaguccgcucagccagguugcagaagcggcuuagcguguguccuaaucuucucucugcguguagguaggccugugccgcaaacaagcuuaccaugggccagaucauuaccuucuuucaagaggugccccacgucaucgaagagguuaugaacauugugcugaucgcccucagccugcuugcuauucugaaggggaucuacaauguggccacaugcggacucuucggccuggucuccuuucuucugcucugugggagaucuugcagcacgaccuauaaaggaguguacgaacugcagacacuggagcucgacauggcgucccugaacaugaccaugccucuuucuuguacaaagaauaacagccaucacuauaucaugguuggcaaugaaaccgggcuggagcucacacugaccaacacguccauuaucaaucauaaauucugcaaccuuucugaugcucacaagaaaaaucuguacgaccaugcccucaugagcauuaucuccaccuuucaccugagcauuccgaacuucaaucaguaugaggccaugucuugugauuuuaacggaggcaagaucuccgugcaguacaaucugagccacgcuuaugccgucgacgcugccaaccauugcggcacaauugcgaauggggugcuccaaaccuucaugcggauggccuggggaggcucuuacaucgcucuggauuccgggaagggaagcugggacuguaucaugacaucuuaccaguaucuuauuauccagaacauuaccugggaagaucacugccaguuuucccgccccagcccuaucggcuaccuggggcuccugucccaaagaacgcgggacauuuauaucucucgcagacuucugggaacauucaccuggacacucagcgauuccgagggcaacgaaacccccggcggguacugucugacccgguggaugcugaucgaggccgagcucaaaugcuuuggaaauacagcuguugccaaguguaacgaaaaacaugacgaggaguucugcgauaugcugcgccuuuuugacuucaauaagcaggcgauuagacggcugaaaacggaagcccagaugagcauccagcucauuaacaaggcugugaaugcccugaucaacgaucaacuuauuaugaagaaucaucugcgcgacaucaugggcaucccuuauugcaacuacucuaaauauuguuaccucaaucacaccgucacagggaagaccucccugcccagaugcugucuggugagcaacggaucuuaccucaaugaaacacacuucagcgacgauauugagcagcaggcugacaacaugaucaccgagcugcuucaaaaagaauauauugaucggcagggcaagacgccucuggggcucguggaccuguuugucuucuccacaucuuuuuaccugaucagcauuuuccuucaccucguuaaaaucccgacccaucgccacguggugggaaagcccugcccuaaaccccauagacugaaucacaugggcauuuguuccugcggccuguauaagcacccugggguccccgugaaguggaaacggugaggacuagucccuguucccagagcccacuuuuuuuucuuuuuuugaaauaaaauagccugucuuucagaucuaaaaaaaaaaaaaaaaaaaaaaaaaaaaaaaaaaaaaaaaaaaaaaaaaaaaaaaaaaaaaaaaaaaaaaaaaaaaaaaaaaaaaaaaaaaaaaaaaaaa

SEQ ID NO: 39119 - RNA, 1740 nt, Artificial Sequence
  mRNA product Design a-2 (A100) comprising derived and/or modified sequence from LASV(Lassa virus/H.sapiens-wt/NGA/2015/ISTH_0543;Clade II)__AVO03639__GPCmut11 (opt5)
aggagaguccgcucagccagguugcagaagcggcuuagcguguguccuaaucuucucucugcguguagguaggccugugccgcaaacaagcuuaccaugggccagaucauuaccuucuuucaagaggugccccacgucaucgaagagguuaugaacauugugcugaucgcccucagccugcuugcuauucugaaggggaucuacaauguggccacaugcggacucuucggccuggucuccuuucuucugcucugugggagaucuugcagcacgaccuauaaaggaguguacgaacugcagacacuggagcucgacauggcgaaccugaauaugaccaugccucuuuccuguacaaagaacaauucucaucacuauaucaugguuggcaacgaaaccgggcuggagcucacacugaccaauacgagcauuaucaaccauaaauucugcaaucuuuccgaugcucacaagaaaaaccuguacgaccaugcccucaugucuauuaucagcaccuuucaccuguccauuccgaauuucaaccaguaugaggccaugagcugugauuuuaauggaggcaagaucucugugcaguacaaccugucccacacauaugcugucgacgccgcuaaucauugcggcaccauugccaacggggugcuccaaacauucaugcggauggcguggggaggcagcuacaucgcccuggauucugggaagggauccugggacuguaucaugaccagcuaccaguaucuuguuauucagaacacgacaugggaagaucacugccaguuuucucgccccuccccuaucggcuaccuggggcuccugagccaaagaacccgggacauuuauaucucccgcagacuucugggaacauucaccuggacccucucugauagcgagggcaaugaaacacccggcggguacugucugacgcgguggaugcugauugaggcugagcucaaaugcuuuggaaacaccgccguggcuaaguguaaugaaaaacaugacgaggaguucugcgauaugcugcgccuuuuugacuucaacaagcaggccaucagacggcugaaaacagaagcgcagauguccauccagcucauuaauaaggccgucaacgcucugaucaaugaucaacuuauuaugaagaaccaucugcgcgacaucaugggcauuccuuauugcaauuacagcaaauauuguuaccucaaccacaccgugacagggaagaccucucugcccagaugcugucugguguccaauggaagcuaccucaacgaaacgcacuucucugacgauaucgagcagcaggccgacaauaugaucacagagcugcuucaaaaagaauauauugaucggcagggcaagaccccucuggggcucgucgaccuguuuguuuucagcaccuccuuuuaccugaucucuauuuuccuucaccucgugaaaaucccgacacaucgccacauuaccggaaagcccugcccuaaaccccauagacugaaccacaugggcaucuguagcugcggccuguauaagcacccuggggugcccgucaaguggaaacggugaggacuagucccuguucccagagcccacuuuuuuuucuuuuuuugaaauaaaauagccugucuuucagaucuaaaaaaaaaaaaaaaaaaaaaaaaaaaaaaaaaaaaaaaaaaaaaaaaaaaaaaaaaaaaaaaaaaaaaaaaaaaaaaaaaaaaaaaaaaaaaaaaaaaa

SEQ ID NO: 39120 - RNA, 1740 nt, Artificial Sequence
  mRNA product Design a-2 (A100) comprising derived and/or modified sequence from LASV(Lassa virus/H.sapiens-wt/NGA/2016/ISTH_0009;Clade II)__AVO03571__GPCmut11 (opt5)
aggagaguccgcucagccagguugcagaagcggcuuagcguguguccuaaucuucucucugcguguagguaggccugugccgcaaacaagcuuaccaugggccagaucauuaccuucuuucaagaggugccccacgucaucgaagagguuaugaacauugugcugaucgcccucagccugcuugcuauucugaaggggaucuacaauguggccacaugcggacuccugggccuugucuccuuccugcuccugugugggagaucuugcagcacgaccuauaaaggaguguacgaacugcagacacucgagcuggacauggcgucccuuaacaugaccaugccucugucuuguacaaagaauaacagccaucacuauaucaugguuggcaaugaaaccgggcucgagcugacacuuaccaacacguccauuaucaaucauaaauuuugcaaccugucugaugcucacaagaaaaaucucuacgaccaugcccugaugagcauuaucuccaccuuccaccugagcauuccgaacuuuaaucaguaugaggccaugucuugugauuucaacggaggccggaucuccgugcaguacaaucucagccacucuuaugcugucgacgccgcuaaccauugcggcacaauugccaauggggugcugcaaaccuuuaugcgcauggcguggggaggcuccuacaucgcccuugauagcgggaagggaucuugggacuguaucaugacauccuaccaguaucugauuauccagaacaccacgugggaagaucacugccaguucagcagacccuccccuauuggcuaccucgggcugcuuucucaacggacacgcgacaucuauauuagcagacggcugcucggaaccuuuacauggacccuguccgauagcgagggcaacgaaacccccggcggguacugucugacacgcuggaugcucaucgaggcugagcugaagugcuucggaaauacggccguugcuaaauguaacgaaaagcaugacgaggaauuuugcgauaugcuuagacuguucgacuuuaauaaacaggccauccggcgccucaagaccgaggcgcagaugucuauucagcugaucaacaaagccgugaaugcucuuauuaacgaucaacugaucaugaagaaucaccucagagacauuaugggcaucccuuauugcaacuacuccaaguauuguuaccugaaucacacagucaccgggaaaacaagccugccccggugcugucucgugucuaacggaagcuaccugaaugaaacccauuucuccgacgauaucgagcagcaggccgacaacaugauuacggagcuucugcaaaaggaauauaucgaucgccagggcaaaacaccucucgggcugguggaccuguucgucuuuucuaccagcuucuaccuuauuuccaucuuucuccaccugguuaagauuccgacccauagacacaucacaggaaaacccugcccuaagccccaucggcugaaucacaugggcauuuguagcugcggccucuauaaccacccuggggugcccgugaaauggaagcgcugaggacuagucccuguucccagagcccacuuuuuuuucuuuuuuugaaauaaaauagccugucuuucagaucuaaaaaaaaaaaaaaaaaaaaaaaaaaaaaaaaaaaaaaaaaaaaaaaaaaaaaaaaaaaaaaaaaaaaaaaaaaaaaaaaaaaaaaaaaaaaaaaaaaaa

SEQ ID NO: 39121 - RNA, 1740 nt, Artificial Sequence
  mRNA product Design a-2 (A100) comprising derived and/or modified sequence from LASV(Lassa virus/H.sapiens-wt/NGA/2016/ISTH_0017;Clade II)__AVO03567__GPCmut11 (opt5)
aggagaguccgcucagccagguugcagaagcggcuuagcguguguccuaaucuucucucugcguguagguaggccugugccgcaaacaagcuuaccaugggccagaucauuaccuucuuucaagaggugccccacgucaucgaagagguuaugaacauugugcugaucgcccucagccugcuugcuauucugaaggggaucuacaauguggccacaugcggacucuucggccuggucuccuuucuucugcucugugggagaucuugcagcacgaccuauaaaggaguguacgaacugcagacacuggagcucgacauggcgucccugaacaugaccaugccucuuucuuguacaaagaauaacagccaucacuauaucaugguuggcaaugaaaccgggcuggagcucacacugaccaacacguccauuaucaaucauaaauucugcaaccuuucugaugcucacaagaaaaaucuguacgaccaugcccucaugagcauuaucuccaccuuucaccugagcauuccgaacuucaaucaguaugaggccaugucuugugauuuuaacggaggcaagaucuccgugcaguacaaucugagccacacauaugcuauugacgccgcuaaccauugcggcaccaucgccaaugggguccuccaaacauucaugcggauggcguggggaggcucuuacaucgcccuggauuccgggaagggaagcugggacuguauuaugaccucuuaccaguaucuuaucauucagaacacgacaugggaagaucacugccaguuuucccgccccagcccuaucggcuaccuggggcuccugucccaaagaacccgggacauuuauaucucucgcagacuucugggaacauucaccuggacccucagcgauuccgagggcaacgaaacacccggcggguacugucugacgcgguggaugcugaucgaggcugagcucaaaugcuuuggaaauaccgccguggcuaaguguaacgaaaaacaugacgaggaguucugcgauaugcugcgccuuuuugacuucaauaagcaggccauuagacggcugaaaacagaagcgcagaugagcauccagcucauuaacaaggccguuaaugcucugaucaacgaucaacuuauuaugaagaaucaucugcgcgacaucaugggcaucccuuauugcaacuacucuaaauauuguuaccucaaucacaccgugacagggaagaccucccugcccagaugcugucuggucagcaacggaucuuaccucaaugaaacgcacuucagcgacgauauugagcagcaggccgacaacaugaucacagagcugcuucaaaaagaauauauggaucggcagggcaagaccccucuggggcucguggaccuguuuguguucuccaccucuuuuuaccugauuagcaucuuccuucaccucguccgcauuccgacacauagacacguuaucggaaaacccugcccuaagccccaucggcugaaucacaugggcauuuguuccugcggccuguauaaacacccuggggugcccgugaaguggaagcgcugaggacuagucccuguucccagagcccacuuuuuuuucuuuuuuugaaauaaaauagccugucuuucagaucuaaaaaaaaaaaaaaaaaaaaaaaaaaaaaaaaaaaaaaaaaaaaaaaaaaaaaaaaaaaaaaaaaaaaaaaaaaaaaaaaaaaaaaaaaaaaaaaaaaaa

SEQ ID NO: 39122 - RNA, 1740 nt, Artificial Sequence
  mRNA product Design a-2 (A100) comprising derived and/or modified sequence from LASV(Lassa virus/H.sapiens-wt/NGA/2018/ISTH_0959;Clade II)__AVV65099__GPCmut11 (opt5)
aggagaguccgcucagccagguugcagaagcggcuuagcguguguccuaaucuucucucugcguguagguaggccugugccgcaaacaagcuuaccaugggccagaucauuaccuucuuucaagaggugccccacgucaucgaagagguuaugaacauugugcugaucgcccucagccugcuugcuauucugaaggggaucuacaauguggucacaugcggacucuucggccugguguccuuucuucugcucugugggagaucuugcagcacgaccuauaaaggaguuuacgaacugcagacacuggagcucgacauggccucccugaacaugaccaugccucuuucuuguacaaagaauaacagccaucacuauaucauggugggcaaugaaaccgggcuggagcucacacugaccaacacguccauuaucaaucauaaauucugcaaccuuucugaugcgcacaagaaaaaucuguacgaccaugcucucaugagcauuaucuccaccuuucaccugagcauuccgaacuucaaucaguaugaggccaugucuugugauuuuaacggaggcaagaucuccguccaguacaaucugagccacgccuaugcuauugacgccgcuaaccauugcggcacaaucgccaauggggugcuccaaaccuucaugcggauggcguggggaggcucuuacaucgcccuggauuccgggaagggaagcugggacuguauuaugacaucuuaccaguaucuuaucauucagaacaccacgugggaagaucacugccaguuuucccgccccagcccuaucggcuaccuggggcuccugucccaaagaacacgggacauuuauaucucucgcagacuucugggaaccuucacauggacccucagcgauuccgagggcaacgaaacccccggcggguacugucugacacgguggaugcugaucgaggcugagcucaaaugcuuuggaaauacggccguugcuaaguguaacgaaaaacaugacgaggaguucugcgauaugcugcgccuuuuugacuucaauaagcaggccauuagacggcugaaaaccgaagcgcagaugagcauccagcucauuaacaaggccgugaaugcucugaucaacgaucaacuuauuaugaagaaucaucugcgcgacaucaugggcaucccuuauugcaacuacucuaaauauuguuaccucaaucacacagucaccgggaagacaucccugcccagaugcugucuggugagcaacggaucuuaccucaaugaaacccacuucagcgacgauauugagcagcaggccgacaacaugaucacggagcugcuucaaaaagaauauauugaucggcagggcaagacaccucuggggcucguggaccuguuugucuucuccaccucuuuuuaccugaucagcauuuuccuucaccucguuaaaaucccgacccaucgccacgugauuggaaagcccugcccuaaaccccauagacugaaucacaugggcaucuguuccugcggccuguauaagcacccuggggugcccgucaaguggaaacggugaggacuagucccuguucccagagcccacuuuuuuuucuuuuuuugaaauaaaauagccugucuuucagaucuaaaaaaaaaaaaaaaaaaaaaaaaaaaaaaaaaaaaaaaaaaaaaaaaaaaaaaaaaaaaaaaaaaaaaaaaaaaaaaaaaaaaaaaaaaaaaaaaaaaa

SEQ ID NO: 39123 - RNA, 1740 nt, Artificial Sequence
  mRNA product Design a-2 (A100) comprising derived and/or modified sequence from LASV(LASV003-NIG-2008;Clade II)__AIT17580__GPCmut11 (opt5)
aggagaguccgcucagccagguugcagaagcggcuuagcguguguccuaaucuucucucugcguguagguaggccugugccgcaaacaagcuuaccaugggccagaucauuaccuucuuucaagaggugccccacgucaucgaagagguuaugaacauugugcugaucgcccucagccugcuugcuauucugaaggggaucuacaauguggccacaugcggacucuucggccuggucuccuuucuucugcucugugggagaucuugcagcacgaccuauaaaggaguguacgaacugcagacacuggagcucgacauggcgucccugaacaugaccaugccucuuucuuguacaaagaauaacagccaucacuauaucaugguuggcaaugaaaccgggcuggagcucacacugaccaacacguccauuaucaaucauaaauucugcaaccuuucugaugcucacaagaaaaaucuguacgaccaugcccucaugagcauuaucuccaccuuucaccugagcauuccgaacuucaaucaguaugaggccaugucuugugauuuuaacggaggcaagaucuccgugcaguacaaucugagccacacauaugcugucgacgccgcuaaccauugcggcaccauugccaauggggugcuccaaacauucaugcggauggcguggggaggcucuuacaucgcccuggauuccgggaagggaagcugggacuguaucaugaccucuuaccaguaucuuauuauccagaacacgacaugggaagaucacugccaguuuucccgccccagcccuauuggcuaccuggggcuccugucccaaagaacccgggacaucuauauuucucgcagacuucugggaacauucaccuggacccucagcgauuccgagagcaacgaaacacccggcggcuacugucugacgcgguggaugcugaucgaggcugagcucaaaugcuuugggaauaccgccguugcuaaguguaacgaaaaacaugacgaggaguucugcgauaugcugcgccuuuuugacuucaauaagcaggccaucagacggcugaaagcggaagcccagaugucuauucagcucaucaacaaggcugugaaugcccugauuaacgaucaacuuaucaugaagaaucaucugcgcgacauuaugggaaucccuuauugcaacuacuccaaauauuguuaccucaaucacacagucaccggcagaacaagccugccccggugcugucuggugucuaacgggagcuaccucaaugaaacccacuucuccgacgauaucgagcagcaggcugacaacaugauuacggagcugcuucaaaaggaauauauggaucgccagggaaaaacaccucugggccucguggaccuguuugucuucucuaccagcuuuuaccugaucuccauuuuccuucaccucguuaagaucccgacccauagacacgugauugggaaacccugcccuaagccccaucggcugaaucacaugggaaucuguagcugcggccuguauaaacacccuggcgugcccgucaaguggaagcgcugaggacuagucccuguucccagagcccacuuuuuuuucuuuuuuugaaauaaaauagccugucuuucagaucuaaaaaaaaaaaaaaaaaaaaaaaaaaaaaaaaaaaaaaaaaaaaaaaaaaaaaaaaaaaaaaaaaaaaaaaaaaaaaaaaaaaaaaaaaaaaaaaaaaaa

SEQ ID NO: 39124 - RNA, 1740 nt, Artificial Sequence
  mRNA product Design a-2 (A100) comprising derived and/or modified sequence from LASV(LASV035-NIG-2009;Clade II)__AIT17588__GPCmut11 (opt5)
aggagaguccgcucagccagguugcagaagcggcuuagcguguguccuaaucuucucucugcguguagguaggccugugccgcaaacaagcuuaccaugggccagaucauuaccuucuuucaagaggugccccacgucaucgaagagguuaugaacauugugcugaucgcccucagccugcuugcuauucugaaggggaucuacaauguggccacaugcggacucuucggccuggucuccuuucuucugcucugugggagaucuugcagcacgaccuauaaaggaguguacgaacugcagacacuggagcucgacauggcgucccugaacaugaccaugccucuuucuuguacaaagaauaacagccaucacuauaucaugguuggcaaugaaaccgggcuggagcucacacugaccaacacguccauuaucaaucauaaauucugcaaccuuucugaugcucacaagaaaaaucuguacgaccaugcccucaugagcauuaucuccaccuuucaccugagcauuccgaacuucaaucaguaugaggccaugucuugugauuuuaacggaggcaagaucuccgugcaguacaaucugagccacgcuuaugccgucgacgcugccaaccauugcggcacaauugcgaauggggugcuccaaaccuucaugcggauggccuggggaggcucuuacaucgcucuggauuccgggaagggaagcugggacuguaucaugacaucuuaccaguaucuuauuauccagaacaccacgugggaagaucacugccaguuuucccgccccagcccuauuggcuaccuggggcuccugucccaaagaacacgggacaucuauauuucucgcagacuucugggaaccuucacauggacccucagcgauuccgagggcaacgaaacccccggcggguacugucugacacgguggaugcugaucgaggccgagcucaaaugcuuuggaaauacggcuguugccaaguguaacgaaaaacaugacgaggaguucugcgauaugcugcgccuuuuugacuucaauaagcaggcgaucagacggcugaaagccgaagcucagaugagcauucagcucaucaacaaggccgugaaugcucugauuaacgaucaacuuaucaugaagaaucaucugcgcgacauuaugggcaucccuuauugcaacuacucuaaauauuguuaccucaaucacaccgucacagggaagaccucccugcccagaugcugucuggugagcaacggaucuuaccucaaugaaacacacuucagcgacgauaucgagcagcaggccgacaacaugauuaccgagcugcuucaaaaagaauauaucgaucggcagggcaagacgccucuggggcucguggaccuguuugucuucuccacaucuuuuuaccugauuagcaucuuccuucaccucguuaaaauuccgacccaucgccacgugaucggaaagcccugcccuaaaccccauagacugaaucacaugggcauuuguuccugcggccuguauaagcacccuggggugcccgucaaguggaaacggugaggacuagucccuguucccagagcccacuuuuuuuucuuuuuuugaaauaaaauagccugucuuucagaucuaaaaaaaaaaaaaaaaaaaaaaaaaaaaaaaaaaaaaaaaaaaaaaaaaaaaaaaaaaaaaaaaaaaaaaaaaaaaaaaaaaaaaaaaaaaaaaaaaaaa

SEQ ID NO: 39125 - RNA, 1740 nt, Artificial Sequence
  mRNA product Design a-2 (A100) comprising derived and/or modified sequence from LASV(LASV1000-NIG-2009;Clade II)__AIT17782__GPCmut11 (opt5)
aggagaguccgcucagccagguugcagaagcggcuuagcguguguccuaaucuucucucugcguguagguaggccugugccgcaaacaagcuuaccaugggccagaucauuaccuucuuucaagaggugccccacgucaucgaagagguuaugaacauugugcugaucgcccucagccugcuugcuauucugaaggggaucuacaauguggccacaugcggacucuucggccuggucuccuuucuucugcucugugggagaucuugcagcacgaccuauaaaggaguguacgaacugcagacacuggagcucgacauggcgucccugaacaugaccaugccucuuucuuguacaaagaauaacagccaucacuauaucaugguuggcaaugaaaccgggcuggagcucacacugaccaacacguccauuaucaaucauaaauucugcaaccuuucugaugcucacaagaaaaaucuguacgaccaugcccucaugagcauuaucuccaccuuucaccugagcauuccgaacuucaaucaguaugaggccaugucuugugauuuuaacggaggcaagaucuccgugcaguacaaucugagccacacauaugcugucgacgccgcuaaccauugcggcaccauugccaauggggugcuccaaacauucaugcggauggcguggggaggcucuuacaucgcccuggauuccgggaagggaagcugggacuguaucaugaccucuuaccaguaucuuauuauccagaacacgacaugggaagaucacugccaguuuucccgccccagcccuauuggcuaccuggggcuccugucccaaagaacccgggacaucuauauuucucgcagacuucugggaacauucaccuggacccucagcgauuccgagggcaacgaaacacccggcggguacugucugacgcgguggaugcugaucgaggcugagcucaaaugcuuuggaaauaccgccguugcuaaguguaacgaaaaacaugacgaggaguucugcgauaugcugcgccuuuuugacuucaauaagcaggccaucaaaagacugaagacagaagcgcagaugagcauucagcucaucaacaaggccgugaaugcucugauuaacgaucaacuuaucaugaaaaaucaucugcgggacauuaugggcaucccuuauugcaacuacucuaaguauuguuaccucaaucacaccgucacagggaaaaccucccugccccgcugcugucuggugagcaacggaucuuaccucaaugaaacgcacuucagcgacgauaucgagcagcaggccgacaacaugauuacagagcugcuucaaaaggaauauaucgauagacagggcaaaaccccucuggggcucguggaccuguuugucuucuccaccucuuuuuaccugauuagcaucuuccuucaccucguuaagauuccgacacaucggcacguggugggaaaacccugcccuaagccccaucgccugaaucacaugggcaucuguuccugcggccuguauaagcacccugggguccccgugaaauggaagagaugaggacuagucccuguucccagagcccacuuuuuuuucuuuuuuugaaauaaaauagccugucuuucagaucuaaaaaaaaaaaaaaaaaaaaaaaaaaaaaaaaaaaaaaaaaaaaaaaaaaaaaaaaaaaaaaaaaaaaaaaaaaaaaaaaaaaaaaaaaaaaaaaaaaaa

SEQ ID NO: 39126 - RNA, 1740 nt, Artificial Sequence
  mRNA product Design a-2 (A100) comprising derived and/or modified sequence from LASV(LASV221-NIG-2010;Clade II)__AIT17624__GPCmut11 (opt5)
aggagaguccgcucagccagguugcagaagcggcuuagcguguguccuaaucuucucucugcguguagguaggccugugccgcaaacaagcuuaccaugggccagaucauuaccuucuuucaagaggugccccacgucaucgaagagguuaugaacauugugcugaucgcccucagccugcuugcuauucugaaggggaucuacaauguggccacaugcggacucuucggccuggucuccuuucuucugcucugugggagaucuugcagcacgaccuauaaaggaguguacgaacugcagacacuggagcucgacauggcgucccugaacaugaccaugccucuuucuuguacaaagaauaacagccaucacuauaucaugguuggcaaugaaaccgggcuggagcucacacugaccaacacguccauuaucaaucauaaauucugcaaccuuucugaugcucacaagaaaaaucuguacgaccaugcccucaugagcauuaucuccaccuuucaccugagcauuccgaacuucaaucaguaugaggccaugucuugugauuuuaacggaggcaagaucuccgugcaguacaaucugagccacacauaugcuauugacgccgcuaaccauugcggcaccaucgccaaugggguccuccaaacauucaugcggauggcguggggaggcucuuacaucgcccuggauuccgggaagggaagcugggacuguauuaugaccucuuaccaguaucuuaucauucagaacacgacaugggaagaucacugccaguuuucccgccccagcccuaucggcuaccuggggcuccugucccaaagaacccgggacauuuauaucucucgcagacuucugggaacauucaccuggacccucagcgauuccgagggcaacgaaacacccggcggguacugucugacgcgguggaugcugaucgaggcugagcucaaaugcuuuggaaauaccgccguggcuaaguguaacgaaaaacaugacgaggaguucugcgauaugcugcgccuuuuugacuucaauaagcaggccauuagacggcugaaaacagaagcgcagaugagcauccagcucauuaacaaggccguuaaugcucugaucaacgaucaacuuauuaugaagaaucaucugcgcgacaucaugggcaucccuuauugcaacuacucuaaauauuguuaccucaaucacaccgugacagggaagaccucccugcccagaugcugucuggucagcaacggaucuuaccucaaugaaacgcacuucagcgacgauauugagcagcaggccgacaacaugaucacagagaugcugcaaaaagaauauauggaucggcagggcaagaccccucuugggcugguggaccucuuuguguucuccaccucuuuuuaccugauuagcaucuuccugcaccuugucaaaauuccgacacaucgccacguuaucggaaagcccugcccuaaaccccauagacucaaucacaugggcauuuguuccugcggccuguauaagcacccuggggugcccgugaaguggaaacggugaggacuagucccuguucccagagcccacuuuuuuuucuuuuuuugaaauaaaauagccugucuuucagaucuaaaaaaaaaaaaaaaaaaaaaaaaaaaaaaaaaaaaaaaaaaaaaaaaaaaaaaaaaaaaaaaaaaaaaaaaaaaaaaaaaaaaaaaaaaaaaaaaaaaa

SEQ ID NO: 39127 - RNA, 1740 nt, Artificial Sequence
  mRNA product Design a-2 (A100) comprising derived and/or modified sequence from LASV(LASV237-NIG-2010;Clade II)__AIT17638__GPCmut11 (opt5)
aggagaguccgcucagccagguugcagaagcggcuuagcguguguccuaaucuucucucugcguguagguaggccugugccgcaaacaagcuuaccaugggccagaucauuaccuucuuucaagaggugccccacgucaucgaagagguuaugaacauugugcugaucgcccucagccugcuugcuauucugaaggggaucuacaauguggccacaugcggacucuucggccuggucuccuuucuucugcucugugggagaucuugcagcacgaccuauaaaggaguguacgaacugcagacacuggagcucgacauggcgucccugaacaugaccaugccucuuucuuguacaaagaauaacagccaucacuauaucaugguuggcaaugaaaccgggcuggagcucacacugaccaacacguccauuaucaaucauaaauucugcaaccuuucugaugcucacaagaaagaccuguacgaucaugcccucaugagcauuaucuccaccuuucaccugagcauuccgaauuucaaccaguaugaggccaugucuugugacuuuaauggaggcaagaucuccgugcaguacaaccugagccacacauaugcugucgaugccgcuaaucauugcggcaccauugccaacggggugcuccaaacauucaugcggauggcguggggaggcucuuacaucgcccuggacuccgggaagggaagcugggauuguaucaugaccucuuaccaguaucuuauuauccagaauacgacaugggaagaccacugccaguuuucccgccccagcccuauuggcuaccuggggcuccugucccaaagaacccgggauaucuauauuucucgcagacuucugggaacauucaccuggacccucagcgacuccgagggcaacgaaacacccggcggguacugucugacgcgguggaugcugaucgaggcugagcucaaaugcuuuggaaacaccgccguugcuaaguguaaugaaaaacaugaugaggaguucugcgacaugcugcgccuuuuugauuucaacaagcaggccaucagacggcugaaaacagaagcgcagaugagcauucagcucaucaauaaggccgugaacgcucugauuaaugaccaacuuaucaugaagaaccaucugcgcgacauuaugggcaucccuuauugcaauuacucuaaauauuguuaccucaaccacaccgucacagggaagaccucccugcccagaugcugucuggugagcaauggaucuuaccucaacgaaacgcacuucagcgaugacaucgagcagcaggccgauaauaugauuacagagcugcuucaaaaagaauauauggaccggcagggcaagaccccucuggggcucguggaucuguuugucuucuccaccucuuuuuaccugaucagcauuuuccuucaccucaucaaaauuccgacacaucgccacaucaccggaaagcccugcccuaaaccccauagacugaaccacaugggcauuuguuccugcggccuguauaagcacccugggguucccgugaaguggaaacggugaggacuagucccuguucccagagcccacuuuuuuuucuuuuuuugaaauaaaauagccugucuuucagaucuaaaaaaaaaaaaaaaaaaaaaaaaaaaaaaaaaaaaaaaaaaaaaaaaaaaaaaaaaaaaaaaaaaaaaaaaaaaaaaaaaaaaaaaaaaaaaaaaaaaa

SEQ ID NO: 39128 - RNA, 1740 nt, Artificial Sequence
  mRNA product Design a-2 (A100) comprising derived and/or modified sequence from LASV(LASV253-NIG-2011;Clade II)__AIT17670__GPCmut11 (opt5)
aggagaguccgcucagccagguugcagaagcggcuuagcguguguccuaaucuucucucugcguguagguaggccugugccgcaaacaagcuuaccaugggccagaucauuaccuucuuucaagaggugccccacgucaucgaagagguuaugaacauugugcugaucgcccucagccugcuugcuauucugaaggggaucuacaauguggccacaugcggacucuucggccuggucuccuuucuucugcucugugggagaucuugcagcacgaccuauaaaggaguguacgaacugcagacacuggagcucgacauggcgucccugaacaugaccaugccucuuucuuguacaaagaauaacagccaucacuauaucaugguuggcaaugaaaccgggcuggagcucacacugaccaacacguccauuaucaaucauaaauucugcaaccuuucugaugcucacaagaaaaaucuguacgaccaugcccucaugagcauuaucuccaccuuucaccugagcauuccgaacuucaaucaguaugaggccaugucuugugauuuuaacggaggcaagaucuccgugcaguacaaucugagccacacauaugcugucgacgccgcuaaccauugcggcaccauugccaauggggugcuccaaacauucaugcggauggcguggggaggcucuuacaucgcccuggauuccgggaagggaagcugggacuguaucaugaccucuuaccaguaucuuauuauccagaacacgacaugggaagaucacugccaguuuucccgccccagcccuauuggcuaccuggggcuccugucccaaagaacccgggacaucuauauuucucgcagacuucugggaacauucaccuggacccucagcgauuccgagggcaacgaaacacccggcggguacugucugacgcgguggaugcugaucgaggcugagcucaaaugcuuuggaaauaccgccguugcuaaguguaacgaaaaacaugacgaggaguucugcgauaugcugcgccuuuuugacuucaauaagcaggccaucagacggcugaaagcggaagcccagaugagcauucagcucaucaacaaggcugugaaugcccugauuaacgaucaacuuaucaugaagaaucaucugcgcgacauuaugggcaucccuuauugcaacuacucuaaauauuguuaccucaaucacacagucaccgggagaacaucccugccccggugcugucuggugagcaacggaucuuaccucaaugaaacccacuucagcgacgauaucgagcagcaggcugacaacaugauuacggagcugcuucaaaaggaauauaucgaucgccagggcaaaacaccucuggggcucguggaccuguuugucuucuccaccucuuuuuaccugauuagcaucuuccuucaccucguuaagauuccgacccauagacacaucauuggaaaacccugcccuaagccccaucggcugaaucacaugggcaucuguuccugcggccuguauaaacacccuggggugcccgugaaguggaagcgcugaggacuagucccuguucccagagcccacuuuuuuuucuuuuuuugaaauaaaauagccugucuuucagaucuaaaaaaaaaaaaaaaaaaaaaaaaaaaaaaaaaaaaaaaaaaaaaaaaaaaaaaaaaaaaaaaaaaaaaaaaaaaaaaaaaaaaaaaaaaaaaaaaaaaa

SEQ ID NO: 39129 - RNA, 1740 nt, Artificial Sequence
  mRNA product Design a-2 (A100) comprising derived and/or modified sequence from LASV(LASV254-NIG-2011;Clade II)__AIT17674__GPCmut11 (opt5)
aggagaguccgcucagccagguugcagaagcggcuuagcguguguccuaaucuucucucugcguguagguaggccugugccgcaaacaagcuuaccaugggccagaucauuaccuucuuucaagaggugccccacgucaucgaagagguuaugaacauugugcugaucgcccucagccugcuugcuauucugaaggggaucuacaauguggccacaugcggacucuucggccuggucuccuuucuucugcucugugggagaucuugcagcacgaccuauaaaggaguguacgaacugcagacacuggagcucgacaugaccaaccugaauaugacaaugccucuuuccuguaccaagaacaauucucaucacuauaucaugguuggcaacgaaacagggcuggagcucacccugacgaauaccagcauuaucaaccauaaauucugcaaucuuuccgaugcgcacaagaaaaaccuguacaaucaugcucucaugucuauuaucagcacauuucaccuguccauuccgaacuucaaucaguaugaggccaugagcugugacuuuaacggaggcaagaucucugugcaguacaaucugucccacagcuaugccgucgaugcugccaaccauugcggcaccauugcuaacggggugcuccaaacauucaugcggauggccuggggaggcucuuacaucgcgcuggacuccgggaagggaaauugggauuguaucaugaccagcuaccaguaucuuauuauccagaacacgacaugggaagaccacugccaguuuucucgccccuccccuauuggcuaccuggggcuccugagccaaagaacccgggauaucuauauuucccgcagacuucugggaacauucaccuggacccucucugacagcgagggcaaugaaacacccggcggguacugucugacgcgguggaugcugaucgaggccgagcucaaaugcuuuggaaacaccgcuguugccaaguguaaugaaaaacaugaugaggaguucugcgacaugcugcgccuuuuugauuucaacaagcaggcuaucagacggcugaaaacagaagcccaggcgaauauucagcucaucaacaaggccgugaaugcucugauuaacgaccaacuuaucaugaagaaucaucugcgcgauauuaugggcaucccuuauugcaacuacuccaaauauuguuaccucaaucacaccgucacagggaagaccagccugcccagaugcugucuggugucuaacggauccuaccucaaugaaacgcacuucagcgacgacaucgagcagcaggccgauaacaugauuacagagcugcuucaaaaagaauauauggaccggcagggcaagaccccucuggggcucguggaucuguuugucuucucuaccagcuuuuaccugaucuccauuuuccuucaccucguuaaaaucccgacacaucgccacgugauuggaaagcccugcccuaaaccccauagacugaaccacaugggcaucuguucuugcggccuguauaagcacccuggggugcccgucaaguggaaacggugaggacuagucccuguucccagagcccacuuuuuuuucuuuuuuugaaauaaaauagccugucuuucagaucuaaaaaaaaaaaaaaaaaaaaaaaaaaaaaaaaaaaaaaaaaaaaaaaaaaaaaaaaaaaaaaaaaaaaaaaaaaaaaaaaaaaaaaaaaaaaaaaaaaaa

SEQ ID NO: 39130 - RNA, 1740 nt, Artificial Sequence
  mRNA product Design a-2 (A100) comprising derived and/or modified sequence from LASV(Nig08-A19;Clade III)__ADU56618__GPCmut11 (opt5)
aggagaguccgcucagccagguugcagaagcggcuuagcguguguccuaaucuucucucugcguguagguaggccugugccgcaaacaagcuuaccaugggccagaucgugaccuucuuucaagaggucccccacguuauugaagaggugaugaacaucgugcugauugcccucagcauccuggcuauucuuaaggggcuguacaauaucgccacaugcggacucaucggccuggucacguuccuucugcucuccgggagaucuuguagcaugaccuauaaaggaguguacgaacugcagacacuggagcucaacaugaauacccugaacaugacaaugccucuuuccugcaccaagaauaacucucaucacuauauuaugguuggcaaugaaacagggcuggagcucacccugacgaacaccagccuucugcaucacaaauuuuguaaucucuccgacgcgcauaagaaaaaccuguacgaucacacacugaugucuaucauuagcaccuuccaccucuccaucccgaauuuuaaccaguaugaggcuaugagcugcgacuucaauggaggcaagauuacagugcaguacaaccugucucauuccuaugccaucgaugccgcuaaucacuguggcaccgucgccaacggggugcuucaaacguuuaugcggauggcuuggggaggcagcuacauugcccuggacucugggcgcggaaagugggauugcaucaugacauccuaccaguaucucaucauucagaacaccacaugggaagaccauugucaguucagcagacccucuccuaucggcuaccuggggcuucugucccaacggacccgcgauauuuauaucagcagacggcuccugggaaccuuuacauggacgcuguccgacucugagggcaaugaaacccccggcggguacugccucacacgcuggaugcugauugaggcggagcuuaaauguuucggaaacaccgccguugcuaagugcaaugaaaaacacgaugaggaauuuugugacaugcugagacucuucgauuuuaacaagcaggccauccggcgccugaaagcugaggcccagaugagcauccagcuuauuaauaaggcggugaacgcccugaucaaugaccaacucauuaugaagaaccaccugagagauaucaugggcauuccuuauugcaauuacuccaaauauugcuaccugaaccauacaagcaccgggcggacgucucucccccgcuguugccuggucuccaauggaagcuaccuuaacgaaacacacuucucugacgacaucgagcagcaggcugauaauaugaucaccgagaugcugcaaaaggaauaucucgacagacagggcaaaaccccucuggggcugguggaucuuuucguguuuagcacauccuucuaccucauuucuaucuuucugcaucuggucaagauuccgacccaccggcauaucguuggaaaacccuguccuaagccccaccgccucaaccacaugggcauuugcagcuguggccuguauaaacagccuggggugcccgugagauggaagcggugaggacuagucccuguucccagagcccacuuuuuuuucuuuuuuugaaauaaaauagccugucuuucagaucuaaaaaaaaaaaaaaaaaaaaaaaaaaaaaaaaaaaaaaaaaaaaaaaaaaaaaaaaaaaaaaaaaaaaaaaaaaaaaaaaaaaaaaaaaaaaaaaaaaaa

SEQ ID NO: 39131 - RNA, 1743 nt, Artificial Sequence
  mRNA product Design a-2 (A100) comprising derived and/or modified sequence from LASV(G1180-SLE-2010;Clade IV)__AIT17168__GPCmut11 (opt5)
aggagaguccgcucagccagguugcagaagcggcuuagcguguguccuaaucuucucucugcguguagguaggccugugccgcaaacaagcuuaccaugggccagaucgugaccuucuuucaagaggucccccacguuauugaagaggugaugaacaucgugcugauugcccucagcauccuggcuguccuuaaggggcuguacaauuucgccacaugcggacucgugggccugcuuacguuucugcuccugugugggagauccugcaccgcgucucgguauaaaggaguuuacgaacugcagacacucgagcugaacauggaaacccuuaauaugacaaugccucugagcuguaccaagaacaauucccaucacuauauuauggugggcaacgagacagggcucgagcugacccuuacgaauaccucuaucaucaaccauaaauucugcaaucugagcgacgcucacaagaaaaaccucuacgaucaugcccugauguccauuaucucuacauuucaccugagcauuccgaauuucaaccaguaugaagccauguccugugacuuuaauggaggcaagaucagcguccaguacaaccucucucacuccuaugcuggcgaugccgcuaaucauugcgggaccguggccaacggaguucugcaaacauucaugcgcauggcguggggcgggagcuacauugcccuugacucuggacacggcuccugggauuguaucaugaccagcuaccaguaucugauuauccagaacacgacaugggaggaccauugccaguuuucuagacccuccccuaucggguaccucggacugcuuagccaacggacccgcgauauuuauaucuccagacggcugcucggcacauucaccuggacccugucugacagcgaaggcaaggauacacccgggggauacugucugacgcgcuggaugcucauugaggcugagcugaaaugcuuuggcaauaccgccguggcuaaguguaacgaaaaacacgacgaggaguucugcgauaugcuuagacuguuugacuucaauaagcaggccauccagcggcucaaagcggaagcccagauguccauucaacugaucaacaaggcugucaaugcccuuaucaacgaucagcugauuaugaagaaucaccuccgcgacaucauggggauuccuuauugcaacuacagcaaauauuguuaccugaaucauacaaccacaggaaagaccucucugcccaaaugcugucucguguccaacggcagcuaccugaaugaaacgcacuucucugacgauaucgagcagcaagcugacaacaugauuacagagaugcuucagaaggaauauauggagagacaggggaaaaccccucugggacucguggaucuguuugucuucagcaccuccuuuuaccugaucucuaucuuccuucaucucguuaagauuccgacacaccggcauaucgugggcaaaagcugccccaagccucaccgccugaaucacaugggcauuuguuccugcgggcuguauaagcagcccggagugccugucaaauggaagagaugaggacuagucccuguucccagagcccacuuuuuuuucuuuuuuugaaauaaaauagccugucuuucagaucuaaaaaaaaaaaaaaaaaaaaaaaaaaaaaaaaaaaaaaaaaaaaaaaaaaaaaaaaaaaaaaaaaaaaaaaaaaaaaaaaaaaaaaaaaaaaaaaaaaaa

SEQ ID NO: 39132 - RNA, 1743 nt, Artificial Sequence
  mRNA product Design a-2 (A100) comprising derived and/or modified sequence from LASV(G1442-SLE-2011;Clade IV)__AIT17180__GPCmut11 (opt5)
aggagaguccgcucagccagguugcagaagcggcuuagcguguguccuaaucuucucucugcguguagguaggccugugccgcaaacaagcuuaccaugggccagaucgugaccuucuuucaagaggucccccacguuauugaagaggugaugaacaucgugcugauugcccucagcauccuggcuguccuuaaggggcuguacaauguggccacaugcggacucauuggccugguuacguuccuucugcucugugggagauccugcaccacaacccuguauaaaggaguguacgaacugcagacacucgagcugaacauggaaacccuuaauaugacaaugccucugucuuguaccaagaacaauagccaucacuauauccgggucggcaacgagacggggcucgagcugacccuuacaaauaccuccaucauuaaccauaaauuuugcaaucugucugacgcgcacaagaaaaaccucuacgaucaugcucugaugagcaucauuuccacauuccaccugucuaucccgaauuuuaaccaguaugaagccaugagcugugacuucaauggaggcaagauuuccgugcaguacaaccucagccacucuuaugccggcgaugcugccaaucauugcgggaccguugcuaacggagugcugcaaacguuuaugcgcauggccuggggcggguccuacaucgcgcuugacagcggaagaggcaacugggauuguauuaugacaucuuaccaguaucugaucauccagaauaccacaugggacgaucacugccaguucucccggcccagcccuauuggguaccucggacugcuuucucaacgcaccagagacgucuauaucucccggcgccugcucggcaccuuuacauggacgcugagcgauuccgagggcaaggacacccccgggggauacugucugacaagauggaugcucauugaagccgagcugaaaugcuucggcaacaccgcuguggccaaguguaaugagaaacaugaugaagaguuuugcgacaugcuucggcuguucgauuuuaacaagcaggcuauccagcgccucaaagccgaagcgcagaugucuauucaacugaucaauaaggccgugaacgcucuuaucaaugaccagcugauuaugaagaaccaccucagagacaucauggggauuccuuauugcaauuacagcaaauauuguuaccugaacaauacagccaccggaaagacgucccugcccaaaugcugucucaucagcaacggcucuuaccugaaugagacacacuucuccgaugacauugaacaggaggcugauaacaugaucaccgagaugcuucaaaaggaauauauggagcggcaggggaaaaccccucugggacucgucgaccuguucguuuuuagcacaucuuucuaccugaucagcauuuuucuucaucucgugaagaucccgacccaccgccauauugugggcaaauccugccccaagccucacagacugaaucauaugggcaucuguucuugcgggcuguauaagcagcccggagucccugugcgguggaaacgcugaggacuagucccuguucccagagcccacuuuuuuuucuuuuuuugaaauaaaauagccugucuuucagaucuaaaaaaaaaaaaaaaaaaaaaaaaaaaaaaaaaaaaaaaaaaaaaaaaaaaaaaaaaaaaaaaaaaaaaaaaaaaaaaaaaaaaaaaaaaaaaaaaaaaa

SEQ ID NO: 39133 - RNA, 1743 nt, Artificial Sequence
  mRNA product Design a-2 (A100) comprising derived and/or modified sequence from LASV(G3010-SLE-2013;Clade IV)__AIT17344__GPCmut11 (opt5)
aggagaguccgcucagccagguugcagaagcggcuuagcguguguccuaaucuucucucugcguguagguaggccugugccgcaaacaagcuuaccaugggccagaucgugaccuucuuucaagaggucccccacguuauugaagaggugaugaacaucgugcugauugcccucagcauccuggcuguccuuaaggggcuguacaauuucgccacaugcggacucgugggccugguuacguuucuucugcucugugggagauccugcaccacaucucuguauaaaggaguguacgaacugcagacccucgagcugaacauggaaacacuuaauaugaccaugccucugagcuguacaaagaacaauucccaucacuauauuauggucggcaacgagaccgggcucgagcugacgcuuaccaauacaucuaucaucaaccauaaauucugcaaucugagcgacgcgcacaagaaaaaccucuacaaucaugcucugauguccauuaucucuaccuuucaccugagcauuccgaacuucaaucaguaugaagccauguccugugauuuuaacggaggcaagaucagcgugcaguacaaucucucucacuccuaugccggcgacgcugccagccauugcgggacaguugcuaacggagugcugcaaaccuucaugcggauggccuggggcgggucuuacauugcgcuugauuccggauacggcaagugggacuguaucaugacgagcuaucaguaccugauuauccagaacacaaccugggaggaucacugccaguuuucucgccccuccccuaucggguaucucggacugcuuagccaaagaacacgggacauuuacaucucccgcagacugcucggcaccuucaccuggacacugucugauagcgaaggcaaagacacgcccgggggauauugucugacccgguggaugcucauugaggccgagcugaagugcuuuggcaauacagcugucgccaaauguaacgaaaagcaugaugaggaguucugcgacaugcuucgccuguuugauuucaauaaacaggcuauccagagacucaagaccgaagcccagauguccauucaacugaucaacaaggcggugaaugcccuuaucaacgaccagcugauuaugaaaaaucaccuccgggauaucauggggauuccuuacugcaacuauagcaaguacuguuaccugaaucacacaaccacgggaaaaacaucucugcccaagugcugucucguguccaacggcagcuaucugaaugaaacccauuucucugacgacaucgagcagcaagcugauaacaugauuaccgagaugcuucagaaagaauacauggagcgccaggggaagacaccucugggacucgucgaccuguuuguuuucagcaccuccuuuuaucugaucucuaucuuccuucaccucgugaaaauuccgacacauagacacaucgugggcaagagcugccccaagccucaucggcugaaucacaugggcauuuguuccugcgggcuguacaaacagcccggagucccugugcgcuggaagagaugaggacuagucccuguucccagagcccacuuuuuuuucuuuuuuugaaauaaaauagccugucuuucagaucuaaaaaaaaaaaaaaaaaaaaaaaaaaaaaaaaaaaaaaaaaaaaaaaaaaaaaaaaaaaaaaaaaaaaaaaaaaaaaaaaaaaaaaaaaaaaaaaaaaaa

SEQ ID NO: 39134 - RNA, 1743 nt, Artificial Sequence
  mRNA product Design a-2 (A100) comprising derived and/or modified sequence from LASV(G502-SLE-2009;Clade IV)__AIT17126__GPCmut11 (opt5)
aggagaguccgcucagccagguugcagaagcggcuuagcguguguccuaaucuucucucugcguguagguaggccugugccgcaaacaagcuuaccaugggccagaucgugaccuucuuucaagaggucccccacguuauugaagaggugaugaacaucgugcugauugcccucagcauccuggcuguccuuaaggggcuguacaauuucgccacaugcggacucgugggccugcuuacguuucugcuccugugugggagauccugcaccacaggacuguauaaaggcguuuacgaacuccagacccuggagcuuaacauggaaacacugaauaugaccaugccucucucuuguacaaagaacaauagccaucacuauauuaugguggggaacgagaccggacuggagcuuacgcugaccaauacauccaucaucaaccauaaauucugcaaucucucugacgcgcacaagaaaaaccuguacgaucaugcucugaugagcauuaucuccaccuuucaccucucuauuccgaauuucaaccaguaugaagccaugagcugugacuuuaauggcggcaagaucuccguccaguacaaccugagccacucuuaugccggggaugcugccgaccauugcggaacaguggcuaauggcguucuucaaaccuucaugcggauggccuggggaggguccuacauugcgcuggauagcggccgcgggagaugggacuguaucaugacgucuuaccaguaucucauuauccagaacacaaccugggaggaucacugccaguuuucccggcccagcccuaucggauaccugggccuucugucucaacgcacaagagacauuuauaucucccggcgccuccugggcaccuucaccuggacacugagcgauuccgaagggaaggacacgcccggaggcuacugucucaccagauggaugcugauugaggccgagcuuaaaugcuuugggaacacagcuguggccaaguguaaugaaaaacaugaugaggaguucugcgacaugcugcggcucuuugauuucaacaagcaggcuauccagcgccugaaagccgaagcgcagaugucuauucaacuuaucaauaaggccgucaacgcucugaucaaugaccagcucgugaugaagaaccaccugagagacauuaugggaaucccuuauugcaauuacagccgguauuguuaccugaaccacaccacaaccggccgcacgucccuccccaaaugcugucuggugagcaaugggucuuaccuuaacgaaacacauuucuccgaugacauugagcagcaagccgauaauaugaucaccgagaugcugcagaaggaauauauggagagacagggaaaaaccccucucggccuggucgaccuguuuguuuucagcacaucuuuuuaccuuauuagcaucuuccuccaccuggugaagaucccgacccaucggcacauugugggcaaauccugccccaagccucaucgccugaaccacauggggaucuguucuugcggacucuauaaacagcccggcgucccugugaaguggaagagaugaggacuagucccuguucccagagcccacuuuuuuuucuuuuuuugaaauaaaauagccugucuuucagaucuaaaaaaaaaaaaaaaaaaaaaaaaaaaaaaaaaaaaaaaaaaaaaaaaaaaaaaaaaaaaaaaaaaaaaaaaaaaaaaaaaaaaaaaaaaaaaaaaaaaa

SEQ ID NO: 39135 - RNA, 1743 nt, Artificial Sequence
  mRNA product Design a-2 (A100) comprising derived and/or modified sequence from LASV(G733-SLE-2010;Clade IV)__AIT17154__GPCmut11 (opt5)
aggagaguccgcucagccagguugcagaagcggcuuagcguguguccuaaucuucucucugcguguagguaggccugugccgcaaacaagcuuaccaugggccagaucgugaccuucuuucaagaggucccccacguuauugaagaggugaugaacaucgugcugauugcccucagcauccuggcuguccuuaaggggcuguacaauuucgccacaugcggaauugugggccucguuuccuuucugcuucugugugggagaucuugcacgaccagccucuauaaaggaguguacgaacugcagacacuggagcucaacauggaaacccugaauaugacaaugccucuuuccuguaccaagaacaauucucaucacuauaucauggucggcaacgagacagggcuggagcucacccugacgaauaccagcaucauuaaccauaaauucugcaaucuuuccgacgcgcacaagaaaaaccuguacgaucaugcucucaugucuaucauuagcacauuucaccuguccaucccgaauuucaaccaguaugaagccaugagcugugacuuuaauggaggcaagauuucugugcaguacaaccugucccacagcuaugccggcgaugcugccaaucauugcgggaccaucgcuaacggaguucuccaaacauucaugcggauggccuggggcgggucuuacauugcgcuggacuccggacgcgauagaugggacuguaucaugaccagcuaccaguaucuuaucauucagaacacgacaugggaggaucacugccaguuuucucggcccuccccuaucggcuaccuggggcuccugagccaacgcaccagagacauuuauaucucccggcgccuucugggaacauucaccuggacccucucugauagcgaaggcaaggacacacccggcggguacugucugacgagauggaugcugauugaggccgagcucaaaugcuuuggaaauaccgcuguggccaaguguaacgaaaaacaugaugaggaguucugcgacaugcugcggcuuuuugauuucaauaagcaggcuauccagcgccugaaagccgaagcgcagauguccauccaacucauuaacaaggccgucaaugcucugaucaacgaccagcuuauuaugaagaaucaccugagagacaucaugggcauuccuuauugcaacuacagcaaauauuguuaccucaaucacacaaccacagggaagaccucucugcccaaaugcugucugguguccaacggaagcuaccucaaugaaacgcauuucucugaugacaucgagcagcaagccgauaacaugaucacagagaugcugcagaaggaauauauggagcggcagggcaaaaccccucuugggcugguggaccucuuugucuucagcaccuccuuuuaccugauuucuaucuuccugcaccuuguuaagauuccgacacaucgccacguggugggaaaaagcugccccaagccucauagacucaaucacaugggcaucuguuccugcggccuguaugggcagcccggagucccugugaaguggaaacggugaggacuagucccuguucccagagcccacuuuuuuuucuuuuuuugaaauaaaauagccugucuuucagaucuaaaaaaaaaaaaaaaaaaaaaaaaaaaaaaaaaaaaaaaaaaaaaaaaaaaaaaaaaaaaaaaaaaaaaaaaaaaaaaaaaaaaaaaaaaaaaaaaaaaa

SEQ ID NO: 39136 - RNA, 1743 nt, Artificial Sequence
  mRNA product Design a-2 (A100) comprising derived and/or modified sequence from MOPV/LASV reassortant(IGS-1;Clade IV)__AFY05576__GPCmut11 (opt5)
aggagaguccgcucagccagguugcagaagcggcuuagcguguguccuaaucuucucucugcguguagguaggccugugccgcaaacaagcuuaccaugggccagaucgugaccuucuuucaagaggucccccacguuauugaagaggugaugaacaucgugcugauugcccucagcguccuggcugugcuuaaggggcuguacaauuucgccacaugcggacucguuggccuggugacguuucuucugcucugugggagauccugcaccacaucucuguauaaaggagucuacgaacugcagacccucgagcugaacauggaaacacuuaauaugaccaugccucugagcuguacaaagaacaauucccaucacuauaucauggugggcaacgagaccgggcucgagcugacgcuuaccaauacaucuauuaucaaccauaaauucugcaaucugagcgacgcgcacaagaaaaaccucuacgaucaugcucugauguccaucauuucuaccuuucaccugagcaucccgaauuucaaccaguaugaagccauguccugugacuuuaauggaggcaagauuagcguucaguacaaccucucucacuccuaugccggcgaugcugccaaucauugcgggacaguggcuaacggaguccugcaaaccuucaugcggauggccuggggcgggagcuacaucgcgcuugacucuggacgcggcaacugggauuguauuaugacguccuaccaguaucugaucauucagaauacaaccugggaggaccacugccaguuuagcagacccucuccuaucggguaccucggacugcuuucccaacggacacgcgauaucuauauuagcagacggcugcucggcaccuucaccuggacacuguccgacucugaaggcgaggauacgcccgggggauacugucugacccgcuggaugcucaucgaggccgaacugaagugcuuuggcaacacagcuguggccaaauguaaugagaagcaugacgaagaguucugcgauaugcuuagacuguuugacuucaacaaacaggcuauucagcggcucaaggccgaagcgcagaugagcauccaacugauuaauaaagccgugaacgcucuuaucaaugaucagcugaucaugaagaaccaccuccgcgacauuauggggaucccuuauugcaauuacuccaaguauuguuaccugaaccacaccacaaccggaagaacgagccugcccaaaugcugucucgucucuaauggcuccuaccugaacgagacacauuucagcgacgauauugagcagcaagccgacaauaugaucaccgaaaugcuucagaaggaguauauggaacggcaggggaaaaccccucugggacucguugaucuguuuguguucucuaccagcuuuuaccugauuuccaucuuccuucaccucgugaagaucccgacacaucgccacauugucggcaaaucuugccccaagccucauagacugaaccacaugggcaucuguagcugcgggcuguauaaacagcccggagugccuguuaaguggaagcggugaggacuagucccuguucccagagcccacuuuuuuuucuuuuuuugaaauaaaauagccugucuuucagaucuaaaaaaaaaaaaaaaaaaaaaaaaaaaaaaaaaaaaaaaaaaaaaaaaaaaaaaaaaaaaaaaaaaaaaaaaaaaaaaaaaaaaaaaaaaaaaaaaaaaa

SEQ ID NO: 39137 - RNA, 1743 nt, Artificial Sequence
  mRNA product Design a-2 (A100) comprising derived and/or modified sequence from LASV(LM765-SLE-2012;Clade IV)__AIT17814__GPCmut11 (opt5)
aggagaguccgcucagccagguugcagaagcggcuuagcguguguccuaaucuucucucugcguguagguaggccugugccgcaaacaagcuuaccaugggccagaucgugaccuucuuucaagaggucccccacguuauugaagaggugaugaacaucgugcugauugcccucagcauccuggcuguccuuaaggggcuguacaauuucgccacaugcggacucgugggccugguuacguuucuucugcucugugggagauccugcaccacaucucuguauaaaggaguguacgaacugcagacccucgagcugaacauggaaacacuuaauaugaccaugccucugagcuguacaaagaacaauucccaucacuauauuauggucggcaacgagaccgggcucgagcugacgcuuaccaauacaucuaucaucgaccauaaauucugcaaccugagcgaugcgcaccggaagaaucucuacgaccaugcucugauguccauuaucucuaccuuucaccugagcauuccgaacuucaaucaguaugaagccauguccugugauuuuaacggaggcaaaaucagcgugcaguacaaucucucucacuccuaugccaaggacgcugccgaucauugcggcacaguugcuaacggggugcugcaaaccuucaugcgcauggccuggggaggcagcuacauugcgcuugacucugggagaggacggugggauuguaucaugacguccuaccaguaucugauuauccagaauacaaccugggaggaccacugccaguuuagccgccccucuccuaucggcuaccucgggcugcuuucccaaagaacacgggauauuuauaucagccgcagacugcucggaaccuucaccuggacacuguccgacucugaaggcaaggauacgcccggcggguacugucugacccgguggaugcucauugaggccgagcugaaaugcuuuggaaacacagcugucgccaaguguaacgaaaaacaugacgaggaguucugcgauaugcuucgccuguuugacuucaauaagcaggcuauccagagacucaaagccgaagcgcagaugagcauucaacugaucaacaaggccgugaaugcucuuaucaacgaccagcugauuaugaagaaucaccuccgggauaucaugggcauuccuuauugcaacuacuccaaauauuguuaccugaaucacaccacaaccgggaagacgagccugcccaaaugcugucucgugucuaacggauccuaccugaaugaaacacauuucagcgacgauaucgagcagcaagccgacaacaugauuaccgagaugcuucagaaggaauauauggagcgccagggcaaaaccccucuggggcucgucgaucuguuuguuuucucuaccagcuuuuaccugaucuccaucuuccuucaccucgugaagauuccgacacauagacacaucgugggaaaacccugcccuaagccccaucggcugaaucacaugggcauuuguucuugcggccuguauaagcagccugggguccccgugaaauggaagcgcugaggacuagucccuguucccagagcccacuuuuuuuucuuuuuuugaaauaaaauagccugucuuucagaucuaaaaaaaaaaaaaaaaaaaaaaaaaaaaaaaaaaaaaaaaaaaaaaaaaaaaaaaaaaaaaaaaaaaaaaaaaaaaaaaaaaaaaaaaaaaaaaaaaaaa

SEQ ID NO: 39138 - RNA, 1743 nt, Artificial Sequence
  mRNA product Design a-2 (A100) comprising derived and/or modified sequence from LASV(LM776-SLE-2012;Clade IV)__AIT17824__GPCmut11 (opt5)
aggagaguccgcucagccagguugcagaagcggcuuagcguguguccuaaucuucucucugcguguagguaggccugugccgcaaacaagcuuaccaugggccagaucgugaccuucuuucaagaggucccccacguuauugaagaggugaugaacaucgugcugauugcccucagcauccuggcuguccuuaaggggcuguacaauuucgccacaugcggacucgugggccugguuacguuucuucugcucugugggagauccugcaccacaucuguguauaaaggagucuacgaacugcagacccuggagcucaacauggaaacacugaauaugaccaugccucuuagcuguacaaagaacaauucccaucacuauauuauggugggcaacgagaccgggcuggagcucacgcugaccaauacaucuaucaucaaccauaaauucugcaaucuuagcgacgcgcacaagaaaaaccuguacgaucaugcucucauguccauuaucucuaccuuucaccugagcauuccgaauuucaaccaguaugaagccauguccugugacuuuaauggaggcaagaucagcguucaguacaaccugucucacuccuaugccggcgaugcugccaaucauugcgggacaguggcuaacggaguccuccaaaccuucaugcggauggccuggggcgggagcuacauugcgcuggacucuggacacggcaagugggauuguaucaugacguccuaccaguaucuuauuauccagaacacaaccugggaggaccauugccaguuuagccgccccucuccuaucggguaccugggacuccugucccaaagaacacgggauauuuauaucagccgcagacuucugggcaccuucaccuggacacucuccgacucugaaggcaaagauacgcccgggggauacugucugacccgguggaugcugauugaggccgagcucaagugcuuuggcaauacagcuguggccaaauguaacgaaaagcacgacgaggaguucugcgauaugcugcgccuuuuugacuucaauaaacaggcuauccagagacugaaggccgaagcgcagaugagcauucaacucaucaacaaggccgugaaugcucugaucaacgaucagcuuauuaugaaaaaucaucugcgggacaucauggggauuccuuauugcaacuacuccaaguauuguuaccucaaucacaccacaaccggaaaaacgagccugcccaagugcugucuggucucuaacggcuccuaccucaaugaaacacacuucagcgacgauaucgagcagcaagccgacaacaugauuaccgagaugcugcagaaagaauauauggagcgccaggggaagaccccucuuggacugguugaucucuuuguguucucuaccagcuuuuaccugaucuccaucuuccugcaucuugugaaaauuccgacacacagacauaucgucggcaagucuugccccaagccucaccggcucaaucacaugggcauuuguagcugcgggcuguauaaacagcccggagugccuguucgcuggaagagaugaggacuagucccuguucccagagcccacuuuuuuuucuuuuuuugaaauaaaauagccugucuuucagaucuaaaaaaaaaaaaaaaaaaaaaaaaaaaaaaaaaaaaaaaaaaaaaaaaaaaaaaaaaaaaaaaaaaaaaaaaaaaaaaaaaaaaaaaaaaaaaaaaaaaa

SEQ ID NO: 39139 - RNA, 1743 nt, Artificial Sequence
  mRNA product Design a-2 (A100) comprising derived and/or modified sequence from LASV(Mad39;Clade IV)__ANH09722__GPCmut11 (opt5)
aggagaguccgcucagccagguugcagaagcggcuuagcguguguccuaaucuucucucugcguguagguaggccugugccgcaaacaagcuuaccaugggccagaucgugaccuucuuucaagaggucccccacguuauugaagaggugaugaacaucgugcugauugcccucagcauccuggcuguccuuaaggggcuguacaauguggccacaugcggacucauuggccugguuacguuccuucugcucugugggagauccugcaccacaacccuguauaaaggaguguacgaacugcaggcgcucgagcugaacauggaaacacuuaauaugaccaugccucugucuuguacaaagaacaauagccaucacuauauccgggucggcaacgagaccgggcucgagcugacgcuuaccaauacaucccugaucaaccauaaauuuugcaaucucucugacgcucacaagaaaaaccuguacgaucaugcccugaugagcauuaucuccaccuuccaccucucuauuccgaauuuuaaccaguaugaagccaugagcugugacuucaaugauggaaagaucuccgugcaguacaaccugagccacacauaugcuggcgacaccgccaaucauugcggcacgguugcuaacggggugcuucaaacauuuaugcgcauggccuggggaggcucuuacauugcgcuggauuccgggagaggaggcugggacuguaucaugaccagcuaccaguaucucauuauccagaacacaaccugggaggaucacugccaguucucucggcccuccccuaucggguaccugggacuucugagccaacgcaccagagacauuuauaucucucggcgccuccugggcacauuuacguggacccuguccgauagcgaaggcaaggacacacccgggggauacugucucaccagauggaugcugauugaggccgagcuuaaaugcuucggcaauacagcugucgccaaguguaacgaaaaacaugaugaggaauuuugcgacaugcugcgccucuucgauuuuaauaagcaggcuauccagcggcugaaagccgaggcgcagauguccauucaacuuaucaacaaggccgugaaugcucugaucaacgaccagcucauuaugaagaaucaccugagagacaucauggggauuccuuauugcaacuacucuaaauauuguuaccugaaucacaccgugacgggaaagacaagccuccccaaaugcugucuggucuccaacggcagcuaccuuaaugaaacccauuucucugaugacaucgagcagcaagccgauaacaugauuaccgagaugcugcagaaggaauauauggagcggcaggggaaaacaccucucggacugguugaccuguucguguuuuccaccagcuucuaccuuaucucuaucuuucuccaccuggugaagauuccgacacaucgccacgucgugggcaaacccugcccuaagccccauagacugaaucacaugggcaucuguagcugcggguucuauaagcagccuggaguucccgugcgguggaaacgcugaggacuagucccuguucccagagcccacuuuuuuuucuuuuuuugaaauaaaauagccugucuuucagaucuaaaaaaaaaaaaaaaaaaaaaaaaaaaaaaaaaaaaaaaaaaaaaaaaaaaaaaaaaaaaaaaaaaaaaaaaaaaaaaaaaaaaaaaaaaaaaaaaaaaa

SEQ ID NO: 39140 - RNA, 1743 nt, Artificial Sequence
  mRNA product Design a-2 (A100) comprising derived and/or modified sequence from LASV(Z0947-SLE-2011;Clade IV)__AIT17840__GPCmut11 (opt5)
aggagaguccgcucagccagguugcagaagcggcuuagcguguguccuaaucuucucucugcguguagguaggccugugccgcaaacaagcuuaccaugggccagaucgugaccuucuuucaagaggucccccacguuauugaagaggugaugaacaucgugcugauugcccucagcauccuggcuguccuuaaggggcuguacaauuucgccacaugcggacucgugggccugguuacguuucuucugcucugugggagauccugcaccauuucucuguauaaaggaguguacgaacugcagacacucgagcugaacauggaaacccuuaauaugacaaugccucugagcuguaccaagaacaauucccaucacuauaucauggucggcaacgagacagggcucgagcugacccuuacgaauaccucuaucauuaaccauaaauucugcaaucugagcgacgcgcacaagaaaaaccucuacgaucaugcucugauguccaucauuucuacauuucaccugagcaucccgaauuucaaccaguaugaagccauguccugugacuuuaauggaggcaagauuagcgugcaguacaaccucucucacuccuaugccggcgaugcugccaaucauugcgggaccguugcuaacggagugcugcaaacauucaugcggauggccuggggcgggagcuacaucgcgcuugacucuggacgcgauagaugggacuguauuaugaccuccuaccaguaucugaucauccagaacacgacaugggaggaucacugccaguuuagccggcccucuccuauuggcuaccucgggcugcuuucccaacgcaccagagacaucuauauuagccggcgccugcucggaacauucaccuggacccuguccgauucugaaggcaaggacacacccggcggguacugucugacgagauggaugcucaucgaggccgagcugaaaugcuuuggaaauaccgcugucgccaaguguaacgaaaaacaugaugaggaguucugcgacaugcuucggcuguuugauuucaauaagcaggcuauucagcgccucaaagccgaagcgcagaugagcauccaacugaucaacaaggccgugaaugcucuuauuaacgaccagcugaucaugaagaaucaccucagagacauuaugggcaucccuuauugcaacuacuccaaauauuguuaccugaaucacacaaccacagggaagaccagccugcccaaaugcugucucgugucuaacggauccuaccugaaugaaacgcauuucagcgaugacauugagcagcaagccgauaacaugaucacagagaugcuucagaaggaauauauggagcggcagggcaaaaccccucuggggcucgucgaccuguuuguuuucucuaccagcuuuuaccugaucuccauuuuccuucaccucgugaagaucccgacacaucgccacauugugggaaaacccugcccuaagccccauagacugaaucacaugggcaucuguucuugcggccuguauaagcagccugggguccccgugaaauggaagcggugaggacuagucccuguucccagagcccacuuuuuuuucuuuuuuugaaauaaaauagccugucuuucagaucuaaaaaaaaaaaaaaaaaaaaaaaaaaaaaaaaaaaaaaaaaaaaaaaaaaaaaaaaaaaaaaaaaaaaaaaaaaaaaaaaaaaaaaaaaaaaaaaaaaaa

SEQ ID NO: 39141 - RNA, 1781 nt, Artificial Sequence
  mRNA product Design b-4 (hSL-A64-N5) comprising derived and/or modified sequence from LASV(Josiah;Clade IV)__NP_694870__GPCmut11 (opt1)
aggagagucccgcagucggcguccagcggcucugcuuguucgugugugugucguugcaggccuuauucaagcuuaccaugggccagaucgugaccuucuuccaggaggucccccacgugaucgaggaggugaugaacaucguccugaucgcccucagcgugcuggccgugcugaaggggcucuacaacuucgcgaccugcggccuggucgggcuggugacguuccuccugcugugcggccgcuccugcaccaccagccucuacaaggggguguacgagcugcagacccuggagcucaacauggagacgcugaacaugaccaugccgcuguccugcaccaagaacaacagccaccacuacaucauggucggcaacgagaccggccucgagcugacgcugaccaacaccuccaucaucaaccacaaguucugcaaccucagcgacgcccacaagaagaaccuguacgaccacgcccugauguccaucaucagcaccuuccaccucuccauccccaacuucaaccaguacgaggccaugagcugcgacuucaacgggggcaagaucuccgugcaguacaaccugagccacuccuacgccggggacgcggccaaccacugcggcacgguggccaacgggguccugcagaccuucaugcggauggccuggggcggcagcuacaucgcgcucgacuccgggcgcggcaacugggacugcaucaugaccagcuaccaguaccugaucauccagaacaccacgugggaggaccacugccaguucucccggcccagccccaucggguaccugggccuccugucccagcgcacccgggacaucuacaucagccgccggcugcucggcaccuucaccuggacgcugagcgacuccgaggggaaggacaccccgggcggguacugccugacccgcuggaugcucaucgaggccgagcugaagugcuucggcaacaccgccguggccaagugcaacgagaagcacgacgaggaguucugcgacaugcugcggcuguucgacuucaacaagcaggccauccagcgccugaaggcggaggcccagaugagcauccagcugaucaacaaggccgugaacgcccucaucaacgaccagcugaucaugaagaaccaccuccgggacaucauggggauccccuacugcaacuacuccaaguacugcuaccucaaccacacgaccaccggccgcaccagccugcccaagugcugccuggucuccaacggcagcuaccucaacgagacgcacuucuccgacgacaucgagcagcaggccgacaacaugaucaccgagaugcugcagaaggaguacauggagcggcaggggaagacgccccugggccucguggaccuguucguguucagcaccuccuucuaccugaucagcaucuuccugcaccucgucaagaucccgacccaccgccacaucguggggaaguccugccccaagccccaccggcugaaccacaugggcaucugcagcugcgggcuguacaagcagcccggcgugccggucaaguggaagcgcugaggacuaguaauaaggaaacuguaugaaugucugugggcaggaagugaagagauccuucuguaaagguuuuuggaauuaugucugcugaauaauaaacuuuuuugaaauaauaaaucugguagaaaaaugagaucucaaaggcucuuuucagagccaccaaaaaaaaaaaaaaaaaaaaaaaaaaaaaaaaaaaaaaaaaaaaaaaaaaaaaaaaaaaaaaaaagaauu

SEQ ID NO: 39142 - RNA, 1778 nt, Artificial Sequence
  mRNA product Design b-4 (hSL-A64-N5) comprising derived and/or modified sequence from LASV(LP;Clade I)__AAF86701__GPCmut11 (opt1)
aggagagucccgcagucggcguccagcggcucugcuuguucgugugugugucguugcaggccuuauucaagcuuaccaugggccagaucaucaccuucuuccaggaggugccccacgucaucgaggaggugaugaacaucgugcugaucgcccucagccugcuggccauccucaaggggcuguacaacaucgcgaccugcggcaucaucgggcuggucgccuuccucuuccugugcggcaaguccugcagccugacgcucaagggcggguacgagcugcagacccuggagcucaacauggagacccugaacaugaccaugccgcuguccugcacgaagaacagcucccaccacuacauccgcgugggcaacgagaccgggcucgagcugacccugaccaacacgagcaucaucaaccacaaguucugcaaccucuccgacgcccacaagaagaaccuguacgaccacgcccugaugagcaucaucuccaccuuccaccucagcauccccaacuucaaccaguacgaggccauguccugcgacuucaacggcgggaagaucagcgugcaguacaaccugucccacagcuacgcgggcgacgccgccgagcacugcgggaccgucgccaacggcgugcugcagaccuucaugcggauggcguggggcgggcgcuacaucgcccucgacuccggcaaggggaacugggacugcaucaugacgagcuaccaguaccugaucauccagaacaccaccugggaggaccacugccaguucucccggcccagccccaucggcuaccugggccuccugucccagcgcacccgggacaucuacaucagccgccggcugcucgggacguucaccuggacccugagcgacuccgagggcaacgagacccccgggggcuacugccugacgcgcuggaugcucaucgaggccgagcugaagugcuucgggaacaccgccguggccaagugcaacgagaagcacgacgaggaguucugcgacaugcugcggcuguucgacuucaacaagcaggcgauccgccggcugaaggccgaggcccagaugagcauccagcugaucaacaaggccgucaacgcccucaucaacgaccagcugaucaugaagaaccaccuccgcgacaucaugggcauccccuacugcaacuacuccaaguacugcuaccucaaccacaccagcuccggccggaccagccugcccaagugcugccugaucuccaacgggagcuaccucaacgagacgcaguucuccgacgacaucgagcagcaggcggacaacaugaucaccgagaugcugcagaaggaguacaucgagcgccagggcaagaccccgcuggggcucguggacaucuucaucuucagcaccuccuucuaccugaucagcaucuuccugcaccugaucaagaucccgacgcaccggcacaucgugggcaagcccugccccaagccccaccgccucaaccacaugggggucugcuccugcggccuguacaagcacccgggcgugcccaccaaguggaagcggugaggacuaguaauaaggaaacuguaugaaugucugugggcaggaagugaagagauccuucuguaaagguuuuuggaauuaugucugcugaauaauaaacuuuuuugaaauaauaaaucugguagaaaaaugagaucucaaaggcucuuuucagagccaccaaaaaaaaaaaaaaaaaaaaaaaaaaaaaaaaaaaaaaaaaaaaaaaaaaaaaaaaaaaaaaaaagaauu

SEQ ID NO: 39143 - RNA, 1778 nt, Artificial Sequence
  mRNA product Design b-4 (hSL-A64-N5) comprising derived and/or modified sequence from LASV(803213;Clade II)__AAF86703__GPCmut11 (opt1)
aggagagucccgcagucggcguccagcggcucugcuuguucgugugugugucguugcaggccuuauucaagcuuaccaugggccagaucaucaccuucuuccaggaggugccccacgucaucgaggaggugaugaacaucgugcugaucgcccucagccugcuggccauccucaaggggaucuacaacgucgcgaccugcggccuguucgggcugaucuccuuccuccugcugugcggccgcagcugcuccgugacguacaaggggguguacgagcuccagacccuggagcugaacauggccaaccucaacaugaccaugccgcugagcugcaccaagaacaacucccaccacuacaucauggucggcaacgagacgggccuggagcucacccugaccaacaccagcaucaucaaccacaaguucugcaaccuguccgacgcccacaagaagaaccucuacgaccacgcccugaugagcaucaucuccacguuccaccugagcauccccaacuucaaccaguacgaggccauguccugcgacuucaacgggggcaagaucagcgugcaguacaaccucucccacagcuucgcgguggacgccgccaaccacugcgggaccaucgccaacggcguccugcagaccuucaugcggauggcguggggcggguccuacaucgcccuggacagcggcaaggggaacugggacugcaucaugaccuccuaccaguaccucaucauccagaacacgaccugggaggaccacugccaguucagccgccccucccccaucggcuaccuggggcugcucagccagcggacccgcgacaucuacaucagccggcgccugcugggcaccuucacguggacccucuccgacagcgagggcaacgaggcccccgggggcuacugccugacccgguggaugcugaucgaggccgagcucaagugcuucgggaacaccgccguggcgaagugcaacgagaagcacgacgaggaguucugcgacaugcugcgccuguucgacuucaacaagcaggccaucaagcggcucaagacggaggcccagauguccauccagcugaucaacaaggccgugaacgcccugaucaacgaccagcucaucaugaagaaccaccuccgcgacaucaugggcauccccuacugcaacuacagccgguacugcuaccugaaccacaccgucaccgggaagaccucccugccccgcugcugccuggugagcaacggcuccuaccugaacgagacgcacuucagcgacgacaucgagcagcaggcggacaacaugaucaccgagaugcuccagaaggaguacauggaccggcagggcaagaccccgcuggggcugguggaccucuucgucuucuccaccagcuucuaccugaucuccaucuuccugcaccuggugaagaucccgacgcaccgccacaucgugggcaagcccugccccaagccccaccggcucaaccacauggggaucugcagcugcggccuguacaagcacccggggguccccgugaaguggaagcgcugaggacuaguaauaaggaaacuguaugaaugucugugggcaggaagugaagagauccuucuguaaagguuuuuggaauuaugucugcugaauaauaaacuuuuuugaaauaauaaaucugguagaaaaaugagaucucaaaggcucuuuucagagccaccaaaaaaaaaaaaaaaaaaaaaaaaaaaaaaaaaaaaaaaaaaaaaaaaaaaaaaaaaaaaaaaaagaauu

SEQ ID NO: 39144 - RNA, 1778 nt, Artificial Sequence
  mRNA product Design b-4 (hSL-A64-N5) comprising derived and/or modified sequence from LASV(GA391;Clade III)__CAA36645__GPCmut11 (opt1)
aggagagucccgcagucggcguccagcggcucugcuuguucgugugugugucguugcaggccuuauucaagcuuaccaugggccagaucgugaccuucuuccaggaggucccccacgugaucgaggaggugaugaacaucguccugaucgcccucagcauccuggccauccugaaggggcucuacaacguggcgaccugcggccugaucgggcuggugacguuccuccugcuguccggccgcagcugcucccucaucuacaaggggaccuacgagcugcagacccuggagcucaacauggagacccugaacaugacgaugccgcugagcugcaccaagaacaacucccaccacuacauccgggucggcaacgagaccggccucgagcugacccugacgaacaccagcauccucaaccacaaguucugcaaccuguccgacgcccacaagcgcaaccuguacgaccacagccucauguccaucaucagcaccuuccaccuguccauccccaacuucaaccaguacgaggccaugagcugcgacuucaacgggggcaagaucaccgugcaguacaaccugucccacagcuucgccguggacgccgcggggcacugcggcacgcucgccaacgggguccugcagaccuucaugcggauggccuggggcggcuccuacaucgcccuggacagcgggcgcggcaacugggacugcaucaugaccuccuaccaguaccucaucauccagaacaccacgugggacgaccacugccaguucagccggcccucccccaucggguaccugggccugcucagccagcgcacccgggacaucuacaucagccgccggcugcugggcaccuucaccuggacgcucuccgacagcgaggggaacgagaccccgggcggguacugccugacccgcuggaugcugaucgaggcggagcucaagugcuucggcaacaccgccguggccaagugcaacgagaagcacgacgaggaguucugcgacaugcugcggcuguucgacuucaacaagcaggccauccgccggcucaagacggaggcccagauguccauccagcugaucaacaaggcggugaacgcccugaucaacgaccagcucaucaugaagaaccaccuccgcgacaucauggggauccccuacugcaacuacagccgguacugcuaccugaaccacaccuccaccggcaagaccagccugccccgcugcugccugaucuccaacggcagcuaccugaacgagacgaaguucuccgacgacaucgagcagcaggccgacaacaugaucaccgagaugcuccagaaggaguacaucgaccggcaggggaagacgccccugggccuggucgaccuguucguguucagcaccuccuucuaccucaucagcaucuuccugcaccuggugaagaucccgacccaccgccacaucgucgggaagcccugccccaagccccaccggcucaaccacaugggcaucugcuccugcgggcuguacaagcagccgggcgugcccgugcgcuggaagcggugaggacuaguaauaaggaaacuguaugaaugucugugggcaggaagugaagagauccuucuguaaagguuuuuggaauuaugucugcugaauaauaaacuuuuuugaaauaauaaaucugguagaaaaaugagaucucaaaggcucuuuucagagccaccaaaaaaaaaaaaaaaaaaaaaaaaaaaaaaaaaaaaaaaaaaaaaaaaaaaaaaaaaaaaaaaaagaauu

SEQ ID NO: 39145 - RNA, 1781 nt, Artificial Sequence
  mRNA product Design b-4 (hSL-A64-N5) comprising derived and/or modified sequence from LASV(AV;Clade V)__CCA30314__GPCmut11 (opt1)
aggagagucccgcagucggcguccagcggcucugcuuguucgugugugugucguugcaggccuuauucaagcuuaccaugggccagaucgugaccuucuuccaggaggucccccacgugaucgaggaggugaugaacaucguccugaucgcccucagcauccuggccgugcugaaggggcucuacaacaucgcgaccugcggccugaucgggcugaucacguuccuccugcugugcggccgcuccugcagcuccaaccucuacaaggggguguacgagcugcagagccuggaccucaacauggagacccugaacaugaccaugccgcuguccugcaccaagaacaacagccaccacuacauccgggucggcaacgacacgggccucgagcugacccugaccaacaccuccauccucaaccacaaguucugcaaccugagcgacgcccacaagaaggaccuguacgaccacgcccucauguccaucaucagcacguuccaccuguccauccccaacuucaaccaguacgaggccaugagcugcgacuucaacgggggcaagaucuccgugcaguacaaccugagccacuccuacgccaucgacgcggccaaccacugcgggaccguggccaacggcauccuccagaccuucaugcgcauggccuggggcgggagcuacaucgcgcuggacuccggccgggggaacugggacugcaucaugaccagcuaccaguaccugaucauccagaacacgaccugggagaaccacugccaguucucccgccccagccccaucggcuaccucgggcugcugagccagcggacccgcgacaucuacaucucccggcgccuccugggcaccuucacguggacccugagcgacuccgagggcaacgccacccccgggggcuacugccucacccgguggaugcugaucgaggccgagcugaagugcuucgggaacacggccgucgccaagugcaacgagaagcacgacgaggaguucugcgacaugcuccgccuguucgacuucaacaagcaggcgaucagccggcugaaguccgaggcccagaugagcauccagcucaucaacaaggccgugaacgcccugaucaacgaccagcugaucaugaagaaccaccuccgcgacaucaugggcauccccuacugcaacuacuccaaguacugcuaccugaaccacaccaucaccgggaagaccagccugcccaagugcugccucguguccaacggcagcuaccugaacgagacgcacuucuccgacgacaucgagcagcaggccgacaacaugaucaccgagaugcugcagaaggaguacauggagcggcagggcaagaccccgcucgggcuggucgaccuguucguguucagcaccuccuucuaccugaucagcaucuuccuccgccuggugaagaucccgacgcaccggcacaucgucggcaagcccugccccaagccccaccgccugaaccacauggggaucugcuccugcggccucuacaagcagccgggggugcccgugcgguggaagcgcugaggacuaguaauaaggaaacuguaugaaugucugugggcaggaagugaagagauccuucuguaaagguuuuuggaauuaugucugcugaauaauaaacuuuuuugaaauaauaaaucugguagaaaaaugagaucucaaaggcucuuuucagagccaccaaaaaaaaaaaaaaaaaaaaaaaaaaaaaaaaaaaaaaaaaaaaaaaaaaaaaaaaaaaaaaaaagaauu

SEQ ID NO: 39146 - RNA, 1778 nt, Artificial Sequence
  mRNA product Design b-4 (hSL-A64-N5) comprising derived and/or modified sequence from LASV(Togo/2016/7082;Clade VI)__AMR44577__GPCmut11 (opt1)
aggagagucccgcagucggcguccagcggcucugcuuguucgugugugugucguugcaggccuuauucaagcuuaccaugggccagaucaucaccuucuuccaggaggugccccacgucaucgaggaggugaugaacaucgugcugaucgcccucagccugcuggccauccucaagggggucuacaacguggcgaccugcggcaucaucgggcuggugacguuccuguuccucugcggccgcuccugcagccugaucuacaagggguccuacgagcugcagacccucgagcugaacauggagacccugaacaugaccaugccgcucagcugcacgaagaacuccagccaccacuacauccgggucggcaacgagaccggccuggagcugacccucaccaacacguccaucaucaaccacaaguucugcaaccugagcgacgcccacaagcgcaaccuguacgaccacgcccucauguccauccugagcaccuuccaccuguccauccccaacuucaaccaguacgaggccaugagcugcgacuucaacgggggcaagaucuccgugcaguacaaccucagccacgccuacgcgguggacgccgccgagcacugcgggaccgucgccaacggcgugcugcagaccuucaugcggauggcguggggcggguccuacaucgcccuggacagcggccgcgggaacugggacugcaucaugacguccuaccaguaccucaucauccagaacaccaccugggaggaccacugccaguucagccggcccucccccaucggcuaccuggggcugcucagccagcgcacccgggacaucuacaucagccgccggcugcugggcacguucaccuggacccucuccgacagcgagggcaacgagacccccgggggcuacugccugacgcgcuggaugcugaucgaggccgagcucaagugcuucgggaacaccgccguggccaagugcaacgagaagcacgacgaggaguucugcgacaugcugcggcuguucgacuucaacaagcaggcgauccagcgccucaaguccgaggcccagaugagcauccagcugaucaacaaggccgucaacgcccugaucaacgaccagcucaucaugaagaaccaccuccgggacaugaugggcauccccuacugcaacuacuccaaguacugcuaccugaaccacaccagcuccgggcgcaccagccugcccaagugcugccugguguccaacggcagcuaccugaacgagacgcacuucuccgacgacaucgagcagcaggccgacaacaugaucaccgagaugcuccagaaggaguacaucgaccggcagggcaagaccccgcuggggcugguggaccucuucgucuucagcaccuccuucuaccugaucagcaucuuccugcaccugaucaagaucccgacgcaccgccacaucgugggcaagcccugccccaagccccaccggcucaaccacauggggaucugcuccugcggccuguacaagcagccgggggugcccacccgcuggaagcggugaggacuaguaauaaggaaacuguaugaaugucugugggcaggaagugaagagauccuucuguaaagguuuuuggaauuaugucugcugaauaauaaacuuuuuugaaauaauaaaucugguagaaaaaugagaucucaaaggcucuuuucagagccaccaaaaaaaaaaaaaaaaaaaaaaaaaaaaaaaaaaaaaaaaaaaaaaaaaaaaaaaaaaaaaaaaagaauu

SEQ ID NO: 39147 - RNA, 1778 nt, Artificial Sequence
  mRNA product Design b-4 (hSL-A64-N5) comprising derived and/or modified sequence from LASV(KAK-428;Clade n.d. (VII))__ANH09740__GPCmut11 (opt1)
aggagagucccgcagucggcguccagcggcucugcuuguucgugugugugucguugcaggccuuauucaagcuuaccaugggccagaucgugaccuucuuccaggaggucccccacgugaucgaggaggugaugaacaucguccugaucgcccucagccugcuggccauccucaaggggcuguacaacuucgcgaccugcggcgugaucgggcugaucacguuccuccugcugugcggccgcuccugcagcgccaccuacaaggggcaguacgagcuccagacccuggagcugaacauggagucccucaacaugaccaugccgcugagcugcacgaagaacaacucccaccacuacauccgggccggcaacaacaccggccuggagcucacccugaccaacacgagcaucaucucccacaaguucugcaaccugagcgacgcccacaagaagaaccucuacgaccacacccugauguccaucaucaccaccuuccaccugagcauccccaacuucaaccaguacgaggccauguccugcgacuucaacgggggcaagaucagcauccaguacaaccucucccacagcuacgcgggggacgccgcccagcacugcggcacgguggccaacgggguccugcagaccuucaugcgcauggcguggggcggcuccuaccuggcccucgacagcgggcggcgcggcugggacugcaucaucuccagcuaccaguaccugaucauccagaacaccaccugggacgaccacugccaguucucccggcccagccccaucggguaccugggcuucgugagccagaagacgcgcgacaucuacaucucccggcgccuccugggcaccuucaccuggacccugagcgacuccgaggggcacgacaugccgggcggguacugccucacgcgguggaugcugaucgaggccgaccugaagugcuucggcaacaccgccguggccaagugcaacgagaagcacgacgaggaguucugcgacauguggcgccucuucgacuucaacaagcaggcgauccagcggcugaaggccgaggcccagaugaacauccagcugaucaacaaggccgucaacgcccucaucaacgaccagcugaugaugaagaaccaccuccgcgacaucauggggauccccuacugcaacuacagcaaguucugcuaccugaacaacaccaccacgggccggaccucccugccccgcugcugccugaucagcaacggcuccuaccucaacgagacccacuucagcgacgacaucgagcagcaggcggacaacaugaucaccgagaugcugcagaaggaguacauggaccggcaggggaagacgccccugggccucguggaccuguucguguucuccaccagcuucuaccugaucaccaucuuccuccaccuggucaagaucccgacccaccgccacaucguggggaagcccugccccaagccccaccggcugaaccacaugggcaucugcuccugcgggcuguacaagcagccgggcgugcccguccgcuggaagcggugaggacuaguaauaaggaaacuguaugaaugucugugggcaggaagugaagagauccuucuguaaagguuuuuggaauuaugucugcugaauaauaaacuuuuuugaaauaauaaaucugguagaaaaaugagaucucaaaggcucuuuucagagccaccaaaaaaaaaaaaaaaaaaaaaaaaaaaaaaaaaaaaaaaaaaaaaaaaaaaaaaaaaaaaaaaaagaauu

SEQ ID NO: 39148 - RNA, 1778 nt, Artificial Sequence; identical to SEQ ID NO: 39142
  mRNA product Design b-4 (hSL-A64-N5) comprising derived and/or modified sequence from LASV(Pinneo-NIG-1969;Clade I)__AIT17836__GPCmut11 (opt1)

SEQ ID NO: 39149 - RNA, 1778 nt, Artificial Sequence
  mRNA product Design b-4 (hSL-A64-N5) comprising derived and/or modified sequence from LASV(ISTH0009-NIG-2011;Clade II)__AIT17404__GPCmut11 (opt1)
aggagagucccgcagucggcguccagcggcucugcuuguucgugugugugucguugcaggccuuauucaagcuuaccaugggccagaucaucaccuucuuccaggaggugccccacgucaucgaggaggugaugaacaucgugcugaucgcccucagccugcuggccauccucaaggggaucuacaacgucgcgaccugcggccuguucgggcugguguccuuccuccugcugugcggccgcagcugcuccacgaccuacaaggggguguacgagcuccagacccuggagcuggacauggccagccucaacaugaccaugccgcuguccugcacgaagaacaacagccaccacuacaucauggucggcaacgagaccggccuggagcucacccugaccaacacguccaucaucaaccacaaguucugcaaccugagcgacgcccacaagaagaaccucuacgaccacgcccugauguccaucaucagcaccuuccaccuguccauccccaacuucaaccaguacgaggccaugagcugcgacuucaacgggggcaagaucuccgugcaguacaaccucagccacgcguacgccguggacgccgccaaccacugcgggaccaucgcgaacggcguccugcagaccuucaugcggauggccuggggcggguccuacaucgcccuggacagcggcaagggguccugggacugcaucaugacgagcuaccaguaccucaucauccagaacaccaccugggaggaccacugccaguucucccgccccagccccaucggcuaccuggggcugcucagccagcggacccgcgacaucuacaucucccggcgccugcugggcacguucaccuggacccucagcgacuccgagggcaacgagacccccgggggcuacugccugacgcgguggaugcugaucgaggccgagcucaagugcuucgggaacaccgccguggcgaagugcaacgagaagcacgacgaggaguucugcgacaugcugcgccuguucgacuucaacaagcaggccauccggcgccucaagaccgaggcccagaugagcauccagcugaucaacaaggccgugaacgcccugaucaacgaccagcucaucaugaagaaccaccuccgggacaucaugggcaucccguacugcaacuacuccaaguacugcuaccugaaccacaccgucacggggaagaccagccugccccgcugcugccugguguccaacggcagcuaccugaacgagacccacuucuccgacgacaucgagcagcaggcggacaacaugaucaccgagcuccugcagaaggaguacauggaccggcagggcaagacgccccuggggcucguggaccuguucgucuucagcaccuccuucuaccugaucagcaucuuccugcaccucaucaagaucccgacccaccgccacaucaccggcaagcccugccccaagccccaccggcugaaccacauggggaucugcuccugcggccuguacaagcacccgggggugcccgugaaguggaagcgcugaggacuaguaauaaggaaacuguaugaaugucugugggcaggaagugaagagauccuucuguaaagguuuuuggaauuaugucugcugaauaauaaacuuuuuugaaauaauaaaucugguagaaaaaugagaucucaaaggcucuuuucagagccaccaaaaaaaaaaaaaaaaaaaaaaaaaaaaaaaaaaaaaaaaaaaaaaaaaaaaaaaaaaaaaaaaagaauu

SEQ ID NO: 39150 - RNA, 1778 nt, Artificial Sequence
  mRNA product Design b-4 (hSL-A64-N5) comprising derived and/or modified sequence from LASV(ISTH2010-NIG-2012;Clade II)__AIT17482__GPCmut11 (opt1)
aggagagucccgcagucggcguccagcggcucugcuuguucgugugugugucguugcaggccuuauucaagcuuaccaugggccagaucaucaccuucuuccaggaggugccccacgucaucgaggaggugaugaacaucgugcugaucgcccucagccugcuggccauccucaaggggaucuacaacgucgcgaccugcggccuguucgggcugguguccuuccuccugcugugcggccgcagcugcuccacgaccuacaaggggguguacgagcuccagacccuggagcuggacauggccagccucaacaugaccaugccgcuguccugcacgaagaacaacagccaccacuacaucauggucggcaacgagaccggccuggagcucacccugaccaacacguccaucaucaaccacaaguucugcaaccugagcgacgcccacaagaagaaccucuacgaccacgcccugauguccaucaucagcaccuuccaccuguccauccccaacuucaaccaguacgaggccaugagcugcgacuucaacgggggcaagaucuccgugcaguacaaccucagccacgcguacgccguggacgccgccaaccacugcgggaccaucgcgaacggcguccugcagaccuucaugcggauggccuggggcggguccuacaucgcccuggacagcggcaagggguccugggacugcaucaugacgagcuaccaguaccucaucauccagaacaucaccugggaggaccacugccaguucucccgccccagccccaucggcuaccuggggcugcucagccagcggacccgcgacaucuacaucucccggcgccugcugggcaccuucacguggacccucagcgacuccgagggcaacgagacccccgggggcuacugccugacccgguggaugcugaucgaggccgagcucaagugcuucgggaacacggccguggcgaagugcaacgagaagcacgacgaggaguucugcgacaugcugcgccuguucgacuucaacaagcaggccauccggcgccucaagaccgaggcccagaugagcauccagcugaucaacaaggccgugaacgcccugaucaacgaccagcucaucaugaagaaccaccuccgggacaucaugggcauccccuacugcaacuacuccaaguacugcuaccugaaccacaccgucaccgggaagacgagccugccccgcugcugccugguguccaacggcagcuaccugaacgagacccacuucuccgacgacaucgagcagcaggcggacaacaugaucaccgagcuccugcagaaggaguacaucgaccggcagggcaagaccccgcuggggcucguggaccuguucgucuucagcacguccuucuaccugaucagcaucuuccugcaccucgugaagaucccgacccaccgccacguggucggcaagcccugccccaagccccaccggcugaaccacauggggaucugcuccugcggccuguacaagcacccgggggugcccgugaaguggaagcgcugaggacuaguaauaaggaaacuguaugaaugucugugggcaggaagugaagagauccuucuguaaagguuuuuggaauuaugucugcugaauaauaaacuuuuuugaaauaauaaaucugguagaaaaaugagaucucaaaggcucuuuucagagccaccaaaaaaaaaaaaaaaaaaaaaaaaaaaaaaaaaaaaaaaaaaaaaaaaaaaaaaaaaaaaaaaaagaauu

SEQ ID NO: 39151 - RNA, 1778 nt, Artificial Sequence
  mRNA product Design b-4 (hSL-A64-N5) comprising derived and/or modified sequence from LASV(Lassa virus/H.sapiens-wt/NGA/2015/ISTH_0543;Clade II)__AVO03639__GPCmut11 (opt1)
aggagagucccgcagucggcguccagcggcucugcuuguucgugugugugucguugcaggccuuauucaagcuuaccaugggccagaucaucaccuucuuccaggaggugccccacgucaucgaggaggugaugaacaucgugcugaucgcccucagccugcuggccauccucaaggggaucuacaacgucgcgaccugcggccuguucgggcugguguccuuccuccugcugugcggccgcagcugcuccacgaccuacaaggggguguacgagcuccagacccuggagcuggacauggccaaccucaacaugaccaugccgcugagcugcacgaagaacaacucccaccacuacaucauggucggcaacgagaccggccuggagcucacccugaccaacacgagcaucaucaaccacaaguucugcaaccuguccgacgcccacaagaagaaccucuacgaccacgcccugaugagcaucaucuccaccuuccaccugagcauccccaacuucaaccaguacgaggccauguccugcgacuucaacgggggcaagaucagcgugcaguacaaccucucccacaccuacgcgguggacgccgccaaccacugcgggaccaucgccaacggcguccugcagacguucaugcggauggcguggggcgggagcuacaucgcccuggacuccggcaaggggagcugggacugcaucaugaccuccuaccaguaccucgugauccagaacaccaccugggaggaccacugccaguucagccgccccucccccaucggcuaccuggggcugcucagccagcggacgcgcgacaucuacaucagccggcgccugcugggcaccuucaccuggacccucuccgacagcgagggcaacgagacgcccgggggcuacugccugacccgguggaugcugaucgaggccgagcucaagugcuucgggaacaccgccguggccaagugcaacgagaagcacgacgaggaguucugcgacaugcugcgccuguucgacuucaacaagcaggcgauccggcgccucaagaccgaggcccagauguccauccagcugaucaacaaggccgucaacgcccugaucaacgaccagcucaucaugaagaaccaccuccgggacaucaugggcauccccuacugcaacuacagcaaguacugcuaccugaaccacacggugaccgggaagaccucccugccccgcugcugccuggugagcaacggcuccuaccugaacgagacccacuucagcgacgacaucgagcagcaggccgacaacaugaucacggagcuccugcagaaggaguacaucgaccggcagggcaagaccccgcuggggcucgucgaccuguucguguucuccaccagcuucuaccugaucuccaucuuccugcaccucgugaagaucccgacccaccgccacaucacgggcaagcccugccccaagccccaccggcugaaccacauggggaucugcagcugcggccuguacaagcacccggggguccccgugaaguggaagcgcugaggacuaguaauaaggaaacuguaugaaugucugugggcaggaagugaagagauccuucuguaaagguuuuuggaauuaugucugcugaauaauaaacuuuuuugaaauaauaaaucugguagaaaaaugagaucucaaaggcucuuuucagagccaccaaaaaaaaaaaaaaaaaaaaaaaaaaaaaaaaaaaaaaaaaaaaaaaaaaaaaaaaaaaaaaaaagaauu

SEQ ID NO: 39152 - RNA, 1778 nt, Artificial Sequence
  mRNA product Design b-4 (hSL-A64-N5) comprising derived and/or modified sequence from LASV(Lassa virus/H.sapiens-wt/NGA/2016/ISTH_0009;Clade II)__AVO03571__GPCmut11 (opt1)
aggagagucccgcagucggcguccagcggcucugcuuguucgugugugugucguugcaggccuuauucaagcuuaccaugggccagaucaucaccuucuuccaggaggugccccacgucaucgaggaggugaugaacaucgugcugaucgcccucagccugcuggccauccucaaggggaucuacaacgucgcgaccugcggccugcuggggcucguguccuuccugcugcucugcggccgcagcugcuccacgaccuacaaggggguguacgagcugcagacccuggagcucgacauggccagccugaacaugaccaugccgcuguccugcacgaagaacaacagccaccacuacaucauggucggcaacgagaccggccucgagcugacccugaccaacacguccaucaucaaccacaaguucugcaaccucagcgacgcccacaagaagaaccuguacgaccacgcccugauguccaucaucagcaccuuccaccucuccauccccaacuucaaccaguacgaggccaugagcugcgacuucaacgggggccggaucuccgugcaguacaaccugagccacuccuacgcgguggacgccgccaaccacugcgggaccaucgccaacggcguccugcagaccuucaugcgcauggcguggggcgggagcuacaucgcccucgacuccggcaaggggagcugggacugcaucaugacguccuaccaguaccugaucauccagaacaccaccugggaggaccacugccaguucagccggcccagccccaucggcuaccuggggcuccugucccagcgcacccgggacaucuacaucagccgccggcugcucggcacguucaccuggacccuguccgacagcgagggcaacgagacccccgggggcuacugccugacgcgcuggaugcucaucgaggccgagcugaagugcuucgggaacaccgccguggccaagugcaacgagaagcacgacgaggaguucugcgacaugcugcggcuguucgacuucaacaagcaggcgauccgccggcugaagaccgaggcccagauguccauccagcugaucaacaaggccgugaacgcccucaucaacgaccagcugaucaugaagaaccaccuccgcgacaucaugggcaucccguacugcaacuacagcaaguacugcuaccucaaccacaccgucacggggaagaccucccugccccggugcugccuggugagcaacggcuccuaccucaacgagacccacuucagcgacgacaucgagcagcaggccgacaacaugaucaccgagcugcugcagaaggaguacaucgaccgccagggcaagacgccccucgggcugguggaccuguucgucuucuccaccagcuucuaccugaucuccaucuuccuccaccuggugaagaucccgacccaccggcacaucaccggcaagcccugccccaagccccaccgccugaaccacauggggaucugcagcugcggccucuacaaccacccgggggugcccgucaaguggaagcggugaggacuaguaauaaggaaacuguaugaaugucugugggcaggaagugaagagauccuucuguaaagguuuuuggaauuaugucugcugaauaauaaacuuuuuugaaauaauaaaucugguagaaaaaugagaucucaaaggcucuuuucagagccaccaaaaaaaaaaaaaaaaaaaaaaaaaaaaaaaaaaaaaaaaaaaaaaaaaaaaaaaaaaaaaaaaagaauu

SEQ ID NO: 39153 - RNA, 1778 nt, Artificial Sequence
  mRNA product Design b-4 (hSL-A64-N5) comprising derived and/or modified sequence from LASV(Lassa virus/H.sapiens-wt/NGA/2016/ISTH_0017;Clade II)__AVO03567__GPCmut11 (opt1)
aggagagucccgcagucggcguccagcggcucugcuuguucgugugugugucguugcaggccuuauucaagcuuaccaugggccagaucaucaccuucuuccaggaggugccccacgucaucgaggaggugaugaacaucgugcugaucgcccucagccugcuggccauccucaaggggaucuacaacgucgcgaccugcggccuguucgggcugguguccuuccuccugcugugcggccgcagcugcuccacgaccuacaaggggguguacgagcuccagacccuggagcuggacauggccagccucaacaugaccaugccgcuguccugcacgaagaacaacagccaccacuacaucauggucggcaacgagaccggccuggagcucacccugaccaacacguccaucaucaaccacaaguucugcaaccugagcgacgcccacaagaagaaccucuacgaccacgcccugauguccaucaucagcaccuuccaccuguccauccccaacuucaaccaguacgaggccaugagcugcgacuucaacgggggcaagaucuccgugcaguacaaccucagccacaccuacgcgaucgacgccgccaaccacugcgggaccaucgccaacggcgugcugcagacguucaugcggauggcguggggcggguccuacaucgcccuggacagcggcaagggguccugggacugcaucaugaccagcuaccaguaccucaucauccagaacaccaccugggaggaccacugccaguucucccgccccagccccaucggcuaccuggggcugcucagccagcggacgcgcgacaucuacaucucccggcgccugcugggcaccuucaccuggacccucagcgacuccgagggcaacgagacgcccgggggcuacugccugacccgguggaugcugaucgaggccgagcucaagugcuucgggaacaccgccgucgccaagugcaacgagaagcacgacgaggaguucugcgacaugcugcgccuguucgacuucaacaagcaggcgauccggcgccucaagaccgaggcccagaugagcauccagcugaucaacaaggccgugaacgcccugaucaacgaccagcucaucaugaagaaccaccuccgggacaucaugggcauccccuacugcaacuacuccaaguacugcuaccugaaccacacggugaccgggaagaccagccugccccgcugcugccuggucuccaacggcagcuaccugaacgagacccacuucuccgacgacaucgagcagcaggccgacaacaugaucacggagcuccugcagaaggaguacauggaccggcagggcaagaccccgcuggggcucguggaccuguucguguucagcaccuccuucuaccugaucagcaucuuccugcaccucguccgcaucccgacccaccggcacgugaucggcaagcccugccccaagccccaccgccugaaccacauggggaucugcuccugcggccuguacaagcacccgggggugcccgucaaguggaagcggugaggacuaguaauaaggaaacuguaugaaugucugugggcaggaagugaagagauccuucuguaaagguuuuuggaauuaugucugcugaauaauaaacuuuuuugaaauaauaaaucugguagaaaaaugagaucucaaaggcucuuuucagagccaccaaaaaaaaaaaaaaaaaaaaaaaaaaaaaaaaaaaaaaaaaaaaaaaaaaaaaaaaaaaaaaaaagaauu

SEQ ID NO: 39154 - RNA, 1778 nt, Artificial Sequence
  mRNA product Design b-4 (hSL-A64-N5) comprising derived and/or modified sequence from LASV(Lassa virus/H.sapiens-wt/NGA/2018/ISTH_0959;Clade II)__AVV65099__GPCmut11 (opt1)
aggagagucccgcagucggcguccagcggcucugcuuguucgugugugugucguugcaggccuuauucaagcuuaccaugggccagaucaucaccuucuuccaggaggugccccacgucaucgaggaggugaugaacaucgugcugaucgcccucagccugcuggccauccucaaggggaucuacaacgucgugaccugcggccuguucgggcugguguccuuccuccugcugugcggccgcagcugcuccacgaccuacaagggggucuacgagcuccagacccuggagcuggacauggcgagccucaacaugaccaugccgcuguccugcacgaagaacaacagccaccacuacaucauggugggcaacgagaccggccuggagcucacccugaccaacacguccaucaucaaccacaaguucugcaaccugagcgacgcccacaagaagaaccucuacgaccacgcccugauguccaucaucagcaccuuccaccuguccauccccaacuucaaccaguacgaggccaugagcugcgacuucaacgggggcaagaucuccgugcaguacaaccucagccacgccuacgcgaucgacgccgccaaccacugcgggaccaucgccaacggcguccugcagaccuucaugcggauggcguggggcggguccuacaucgcccuggacagcggcaagggguccugggacugcaucaugacgagcuaccaguaccucaucauccagaacaccaccugggaggaccacugccaguucucccgccccagccccaucggcuaccuggggcugcucagccagcggacccgcgacaucuacaucucccggcgccugcugggcacguucaccuggacccucagcgacuccgagggcaacgagacccccgggggcuacugccugacgcgguggaugcugaucgaggccgagcucaagugcuucgggaacaccgccguggccaagugcaacgagaagcacgacgaggaguucugcgacaugcugcgccuguucgacuucaacaagcaggcgauccggcgccucaagaccgaggcccagaugagcauccagcugaucaacaaggccgugaacgcccugaucaacgaccagcucaucaugaagaaccaccuccgggacaucaugggcaucccguacugcaacuacuccaaguacugcuaccugaaccacaccgucacggggaagaccagccugccccgcugcugccugguguccaacggcagcuaccugaacgagacccacuucuccgacgacaucgagcagcaggccgacaacaugaucaccgagcuccugcagaaggaguacaucgaccggcagggcaagacgccccuggggcucguggaccuguucgucuucagcaccuccuucuaccugaucagcaucuuccugcaccucgugaagaucccgacccaccgccacgugaucggcaagcccugccccaagccccaccggcugaaccacauggggaucugcuccugcggccuguacaagcacccggggguccccgugaaguggaagcgcugaggacuaguaauaaggaaacuguaugaaugucugugggcaggaagugaagagauccuucuguaaagguuuuuggaauuaugucugcugaauaauaaacuuuuuugaaauaauaaaucugguagaaaaaugagaucucaaaggcucuuuucagagccaccaaaaaaaaaaaaaaaaaaaaaaaaaaaaaaaaaaaaaaaaaaaaaaaaaaaaaaaaaaaaaaaaagaauu

SEQ ID NO: 39155 - RNA, 1778 nt, Artificial Sequence
  mRNA product Design b-4 (hSL-A64-N5) comprising derived and/or modified sequence from LASV(LASV003-NIG-2008;Clade II)__AIT17580__GPCmut11 (opt1)
aggagagucccgcagucggcguccagcggcucugcuuguucgugugugugucguugcaggccuuauucaagcuuaccaugggccagaucaucaccuucuuccaggaggugccccacgucaucgaggaggugaugaacaucgugcugaucgcccucagccugcuggccauccucaaggggaucuacaacgucgcgaccugcggccuguucgggcugguguccuuccuccugcugugcggccgcagcugcuccacgaccuacaaggggguguacgagcuccagacccuggagcuggacauggccagccucaacaugaccaugccgcuguccugcacgaagaacaacagccaccacuacaucauggucggcaacgagaccggccuggagcucacccugaccaacacguccaucaucaaccacaaguucugcaaccugagcgacgcccacaagaagaaccucuacgaccacgcccugauguccaucaucagcaccuuccaccuguccauccccaacuucaaccaguacgaggccaugagcugcgacuucaacgggggcaagaucuccgugcaguacaaccucagccacaccuacgcgguggacgccgccaaccacugcgggaccaucgccaacggcguccugcagacguucaugcggauggcguggggcggguccuacaucgcccuggacagcggcaagggguccugggacugcaucaugaccagcuaccaguaccucaucauccagaacaccaccugggaggaccacugccaguucucccgccccagccccaucggcuaccuggggcugcucagccagcggacgcgcgacaucuacaucucccggcgccugcugggcaccuucaccuggacccucagcgacuccgagagcaacgagacgccgggcggguacugccugacccgguggaugcugaucgaggccgagcucaagugcuucggcaacaccgccguggccaagugcaacgagaagcacgacgaggaguucugcgacaugcugcgccuguucgacuucaacaagcaggcgauccggcgccucaaggccgaggcccagauguccauccagcugaucaacaaggccgugaacgcccugaucaacgaccagcucaucaugaagaaccaccuccgggacaucauggggauccccuacugcaacuacagcaaguacugcuaccugaaccacaccgucacgggccgcaccucccugccccggugcugccuggugagcaacggguccuaccugaacgagacccacuucagcgacgacaucgagcagcaggcggacaacaugaucaccgagcuccugcagaaggaguacauggaccgccagggcaagacgccccugggccucguggaccuguucgucuucuccaccagcuucuaccugaucuccaucuuccugcaccucgugaagaucccgacccaccggcacgugaucgggaagcccugccccaagccccaccgccugaaccacaugggcaucugcagcugcgggcuguacaagcacccgggcguccccgugaaguggaagcggugaggacuaguaauaaggaaacuguaugaaugucugugggcaggaagugaagagauccuucuguaaagguuuuuggaauuaugucugcugaauaauaaacuuuuuugaaauaauaaaucugguagaaaaaugagaucucaaaggcucuuuucagagccaccaaaaaaaaaaaaaaaaaaaaaaaaaaaaaaaaaaaaaaaaaaaaaaaaaaaaaaaaaaaaaaaaagaauu

SEQ ID NO: 39156 - RNA, 1778 nt, Artificial Sequence
  mRNA product Design b-4 (hSL-A64-N5) comprising derived and/or modified sequence from LASV(LASV035-NIG-2009;Clade II)__AIT17588__GPCmut11 (opt1)
aggagagucccgcagucggcguccagcggcucugcuuguucgugugugugucguugcaggccuuauucaagcuuaccaugggccagaucaucaccuucuuccaggaggugccccacgucaucgaggaggugaugaacaucgugcugaucgcccucagccugcuggccauccucaaggggaucuacaacgucgcgaccugcggccuguucgggcugguguccuuccuccugcugugcggccgcagcugcuccacgaccuacaaggggguguacgagcuccagacccuggagcuggacauggccagccucaacaugaccaugccgcuguccugcacgaagaacaacagccaccacuacaucauggucggcaacgagaccggccuggagcucacccugaccaacacguccaucaucaaccacaaguucugcaaccugagcgacgcccacaagaagaaccucuacgaccacgcccugauguccaucaucagcaccuuccaccuguccauccccaacuucaaccaguacgaggccaugagcugcgacuucaacgggggcaagaucuccgugcaguacaaccucagccacgcguacgccguggacgccgccaaccacugcgggaccaucgcgaacggcguccugcagaccuucaugcggauggccuggggcggguccuacaucgcccuggacagcggcaagggguccugggacugcaucaugacgagcuaccaguaccucaucauccagaacaccaccugggaggaccacugccaguucucccgccccagccccaucggcuaccuggggcugcucagccagcggacccgcgacaucuacaucucccggcgccugcugggcacguucaccuggacccucagcgacuccgagggcaacgagacccccgggggcuacugccugacgcgguggaugcugaucgaggccgagcucaagugcuucgggaacaccgccguggcgaagugcaacgagaagcacgacgaggaguucugcgacaugcugcgccuguucgacuucaacaagcaggccauccggcgccucaaggccgaggcccagaugagcauccagcugaucaacaaggccgugaacgcgcugaucaacgaccagcucaucaugaagaaccaccuccgggacaucaugggcauccccuacugcaacuacuccaaguacugcuaccugaaccacaccgucaccgggaagacgagccugccccgcugcugccugguguccaacggcagcuaccugaacgagacccacuucuccgacgacaucgagcagcaggccgacaacaugaucaccgagcuccugcagaaggaguacaucgaccggcagggcaagaccccgcuggggcucguggaccuguucgucuucagcacguccuucuaccugaucagcaucuuccugcaccucgugaagaucccgacccaccgccacgugaucggcaagcccugccccaagccccaccggcugaaccacauggggaucugcuccugcggccuguacaagcacccggggguccccgugaaguggaagcgcugaggacuaguaauaaggaaacuguaugaaugucugugggcaggaagugaagagauccuucuguaaagguuuuuggaauuaugucugcugaauaauaaacuuuuuugaaauaauaaaucugguagaaaaaugagaucucaaaggcucuuuucagagccaccaaaaaaaaaaaaaaaaaaaaaaaaaaaaaaaaaaaaaaaaaaaaaaaaaaaaaaaaaaaaaaaaagaauu

SEQ ID NO: 39157 - RNA, 1778 nt, Artificial Sequence
  mRNA product Design b-4 (hSL-A64-N5) comprising derived and/or modified sequence from LASV(LASV1000-NIG-2009;Clade II)__AIT17782__GPCmut11 (opt1)
aggagagucccgcagucggcguccagcggcucugcuuguucgugugugugucguugcaggccuuauucaagcuuaccaugggccagaucaucaccuucuuccaggaggugccccacgucaucgaggaggugaugaacaucgugcugaucgcccucagccugcuggccauccucaaggggaucuacaacgucgcgaccugcggccuguucgggcugguguccuuccuccugcugugcggccgcagcugcuccacgaccuacaaggggguguacgagcuccagacccuggagcuggacauggccagccucaacaugaccaugccgcuguccugcacgaagaacaacagccaccacuacaucauggucggcaacgagaccggccuggagcucacccugaccaacacguccaucaucaaccacaaguucugcaaccugagcgacgcccacaagaagaaccucuacgaccacgcccugauguccaucaucagcaccuuccaccuguccauccccaacuucaaccaguacgaggccaugagcugcgacuucaacgggggcaagaucuccgugcaguacaaccucagccacaccuacgcgguggacgccgccaaccacugcgggaccaucgccaacggcguccugcagacguucaugcggauggcguggggcggguccuacaucgcccuggacagcggcaagggguccugggacugcaucaugaccagcuaccaguaccucaucauccagaacaccaccugggaggaccacugccaguucucccgccccagccccaucggcuaccuggggcugcucagccagcggacgcgcgacaucuacaucucccggcgccugcugggcaccuucaccuggacccucagcgacuccgagggcaacgagacgcccgggggcuacugccugacccgguggaugcugaucgaggccgagcucaagugcuucgggaacaccgccguggccaagugcaacgagaagcacgacgaggaguucugcgacaugcugcgccuguucgacuucaacaagcaggcgaucaagcggcucaagaccgaggcccagaugagcauccagcugaucaacaaggccgugaacgcccugaucaacgaccagcucaucaugaagaaccaccuccgcgacaucaugggcauccccuacugcaacuacuccaaguacugcuaccugaaccacacggucaccgggaagaccagccugccccggugcugccugguguccaacggcagcuaccugaacgagacccacuucuccgacgacaucgagcagcaggccgacaacaugaucacggagcuccugcagaaggaguacaucgaccgccagggcaagaccccgcuggggcucguggaccuguucgucuucagcaccuccuucuaccugaucagcaucuuccugcaccucgugaagaucccgacccaccggcacguggucggcaagcccugccccaagccccaccgccugaaccacauggggaucugcuccugcggccuguacaagcacccgggggugcccgugaaguggaagcggugaggacuaguaauaaggaaacuguaugaaugucugugggcaggaagugaagagauccuucuguaaagguuuuuggaauuaugucugcugaauaauaaacuuuuuugaaauaauaaaucugguagaaaaaugagaucucaaaggcucuuuucagagccaccaaaaaaaaaaaaaaaaaaaaaaaaaaaaaaaaaaaaaaaaaaaaaaaaaaaaaaaaaaaaaaaaagaauu

SEQ ID NO: 39158 - RNA, 1778 nt, Artificial Sequence
  mRNA product Design b-4 (hSL-A64-N5) comprising derived and/or modified sequence from LASV(LASV221-NIG-2010;Clade II)__AIT17624__GPCmut11 (opt1)
aggagagucccgcagucggcguccagcggcucugcuuguucgugugugugucguugcaggccuuauucaagcuuaccaugggccagaucaucaccuucuuccaggaggugccccacgucaucgaggaggugaugaacaucgugcugaucgcccucagccugcuggccauccucaaggggaucuacaacgucgcgaccugcggccuguucgggcugguguccuuccuccugcugugcggccgcagcugcuccacgaccuacaaggggguguacgagcuccagacccuggagcuggacauggccagccucaacaugaccaugccgcuguccugcacgaagaacaacagccaccacuacaucauggucggcaacgagaccggccuggagcucacccugaccaacacguccaucaucaaccacaaguucugcaaccugagcgacgcccacaagaagaaccucuacgaccacgcccugauguccaucaucagcaccuuccaccuguccauccccaacuucaaccaguacgaggccaugagcugcgacuucaacgggggcaagaucuccgugcaguacaaccucagccacaccuacgcgaucgacgccgccaaccacugcgggaccaucgccaacggcgugcugcagacguucaugcggauggcguggggcggguccuacaucgcccuggacagcggcaagggguccugggacugcaucaugaccagcuaccaguaccucaucauccagaacaccaccugggaggaccacugccaguucucccgccccagccccaucggcuaccuggggcugcucagccagcggacgcgcgacaucuacaucucccggcgccugcugggcaccuucaccuggacccucagcgacuccgagggcaacgagacgcccgggggcuacugccugacccgguggaugcugaucgaggccgagcucaagugcuucgggaacaccgccgucgccaagugcaacgagaagcacgacgaggaguucugcgacaugcugcgccuguucgacuucaacaagcaggcgauccggcgccucaagaccgaggcccagaugagcauccagcugaucaacaaggccgugaacgcccugaucaacgaccagcucaucaugaagaaccaccuccgggacaucaugggcauccccuacugcaacuacuccaaguacugcuaccugaaccacacggugaccgggaagaccagccugccccgcugcugccuggucuccaacggcagcuaccugaacgagacccacuucuccgacgacaucgagcagcaggccgacaacaugaucacggagaugcuccagaaggaguacauggaccggcagggcaagaccccgcuggggcugguggaccucuucguguucagcaccuccuucuaccugaucagcaucuuccugcaccuggucaagaucccgacccaccgccacgugaucggcaagcccugccccaagccccaccggcucaaccacauggggaucugcuccugcggccuguacaagcacccgggggugcccgucaaguggaagcgcugaggacuaguaauaaggaaacuguaugaaugucugugggcaggaagugaagagauccuucuguaaagguuuuuggaauuaugucugcugaauaauaaacuuuuuugaaauaauaaaucugguagaaaaaugagaucucaaaggcucuuuucagagccaccaaaaaaaaaaaaaaaaaaaaaaaaaaaaaaaaaaaaaaaaaaaaaaaaaaaaaaaaaaaaaaaaagaauu

SEQ ID NO: 39159 - RNA, 1778 nt, Artificial Sequence
  mRNA product Design b-4 (hSL-A64-N5) comprising derived and/or modified sequence from LASV(LASV237-NIG-2010;Clade II)__AIT17638__GPCmut11 (opt1)
aggagagucccgcagucggcguccagcggcucugcuuguucgugugugugucguugcaggccuuauucaagcuuaccaugggccagaucaucaccuucuuccaggaggugccccacgucaucgaggaggugaugaacaucgugcugaucgcccucagccugcuggccauccucaaggggaucuacaacgucgcgaccugcggccuguucgggcugguguccuuccuccugcugugcggccgcagcugcuccacgaccuacaaggggguguacgagcuccagacccuggagcuggacauggccagccucaacaugaccaugccgcuguccugcacgaagaacaacagccaccacuacaucauggucggcaacgagaccggccuggagcucacccugaccaacacguccaucaucaaccacaaguucugcaaccugagcgacgcccacaagaaggaccucuacgaccacgcccugauguccaucaucagcaccuuccaccuguccauccccaacuucaaccaguacgaggccaugagcugcgacuucaacgggggcaagaucuccgugcaguacaaccucagccacaccuacgcgguggacgccgccaaccacugcgggaccaucgccaacggcguccugcagacguucaugcggauggcguggggcggguccuacaucgcccuggacagcggcaagggguccugggacugcaucaugaccagcuaccaguaccucaucauccagaacaccaccugggaggaccacugccaguucucccgccccagccccaucggcuaccuggggcugcucagccagcggacgcgcgacaucuacaucucccggcgccugcugggcaccuucaccuggacccucagcgacuccgagggcaacgagacgcccgggggcuacugccugacccgguggaugcugaucgaggccgagcucaagugcuucgggaacaccgccguggccaagugcaacgagaagcacgacgaggaguucugcgacaugcugcgccuguucgacuucaacaagcaggcgauccggcgccucaagaccgaggcccagaugagcauccagcugaucaacaaggccgugaacgcccugaucaacgaccagcucaucaugaagaaccaccuccgggacaucaugggcauccccuacugcaacuacuccaaguacugcuaccugaaccacacggucaccgggaagaccagccugccccgcugcugccugguguccaacggcagcuaccugaacgagacccacuucuccgacgacaucgagcagcaggccgacaacaugaucacggagcuccugcagaaggaguacauggaccggcagggcaagaccccgcuggggcucguggaccuguucgucuucagcaccuccuucuaccugaucagcaucuuccugcaccucaucaagaucccgacccaccgccacaucacgggcaagcccugccccaagccccaccggcugaaccacauggggaucugcuccugcggccuguacaagcacccgggggugcccgugaaguggaagcgcugaggacuaguaauaaggaaacuguaugaaugucugugggcaggaagugaagagauccuucuguaaagguuuuuggaauuaugucugcugaauaauaaacuuuuuugaaauaauaaaucugguagaaaaaugagaucucaaaggcucuuuucagagccaccaaaaaaaaaaaaaaaaaaaaaaaaaaaaaaaaaaaaaaaaaaaaaaaaaaaaaaaaaaaaaaaaagaauu

SEQ ID NO: 39160 - RNA, 1778 nt, Artificial Sequence
  mRNA product Design b-4 (hSL-A64-N5) comprising derived and/or modified sequence from LASV(LASV253-NIG-2011;Clade II)__AIT17670__GPCmut11 (opt1)
aggagagucccgcagucggcguccagcggcucugcuuguucgugugugugucguugcaggccuuauucaagcuuaccaugggccagaucaucaccuucuuccaggaggugccccacgucaucgaggaggugaugaacaucgugcugaucgcccucagccugcuggccauccucaaggggaucuacaacgucgcgaccugcggccuguucgggcugguguccuuccuccugcugugcggccgcagcugcuccacgaccuacaaggggguguacgagcuccagacccuggagcuggacauggccagccucaacaugaccaugccgcuguccugcacgaagaacaacagccaccacuacaucauggucggcaacgagaccggccuggagcucacccugaccaacacguccaucaucaaccacaaguucugcaaccugagcgacgcccacaagaagaaccucuacgaccacgcccugauguccaucaucagcaccuuccaccuguccauccccaacuucaaccaguacgaggccaugagcugcgacuucaacgggggcaagaucuccgugcaguacaaccucagccacaccuacgcgguggacgccgccaaccacugcgggaccaucgccaacggcguccugcagacguucaugcggauggcguggggcggguccuacaucgcccuggacagcggcaagggguccugggacugcaucaugaccagcuaccaguaccucaucauccagaacaccaccugggaggaccacugccaguucucccgccccagccccaucggcuaccuggggcugcucagccagcggacgcgcgacaucuacaucucccggcgccugcugggcaccuucaccuggacccucagcgacuccgagggcaacgagacgcccgggggcuacugccugacccgguggaugcugaucgaggccgagcucaagugcuucgggaacaccgccguggccaagugcaacgagaagcacgacgaggaguucugcgacaugcugcgccuguucgacuucaacaagcaggcgauccggcgccucaaggccgaggcccagaugagcauccagcugaucaacaaggccgugaacgcccugaucaacgaccagcucaucaugaagaaccaccuccgggacaucaugggcaucccguacugcaacuacuccaaguacugcuaccugaaccacaccgucacggggcgcaccagccugccccggugcugccugguguccaacggcagcuaccugaacgagacccacuucuccgacgacaucgagcagcaggcggacaacaugaucaccgagcuccugcagaaggaguacaucgaccgccagggcaagacgccccuggggcucguggaccuguucgucuucagcaccuccuucuaccugaucagcaucuuccugcaccucgugaagaucccgacccaccggcacaucaucggcaagcccugccccaagccccaccgccugaaccacauggggaucugcuccugcggccuguacaagcacccgggggugcccgucaaguggaagcggugaggacuaguaauaaggaaacuguaugaaugucugugggcaggaagugaagagauccuucuguaaagguuuuuggaauuaugucugcugaauaauaaacuuuuuugaaauaauaaaucugguagaaaaaugagaucucaaaggcucuuuucagagccaccaaaaaaaaaaaaaaaaaaaaaaaaaaaaaaaaaaaaaaaaaaaaaaaaaaaaaaaaaaaaaaaaagaauu

SEQ ID NO: 39161 - RNA, 1778 nt, Artificial Sequence
  mRNA product Design b-4 (hSL-A64-N5) comprising derived and/or modified sequence from LASV(LASV254-NIG-2011;Clade II)__AIT17674__GPCmut11 (opt1)
aggagagucccgcagucggcguccagcggcucugcuuguucgugugugugucguugcaggccuuauucaagcuuaccaugggccagaucaucaccuucuuccaggaggugccccacgucaucgaggaggugaugaacaucgugcugaucgcccucagccugcuggccauccucaaggggaucuacaacgucgcgaccugcggccuguucgggcugguguccuuccuccugcugugcggccgcagcugcuccacgaccuacaaggggguguacgagcuccagacccuggagcuggacaugaccaaccucaacaugacgaugccgcugagcugcaccaagaacaacucccaccacuacaucauggucggcaacgagaccggccuggagcucacccugacgaacaccagcaucaucaaccacaaguucugcaaccuguccgacgcccacaagaagaaccucuacaaccacgcccugaugagcaucaucuccaccuuccaccugagcauccccaacuucaaccaguacgaggccauguccugcgacuucaacgggggcaagaucagcgugcaguacaaccucucccacagcuacgccguggacgcggccaaccacugcgggaccaucgccaacggcguccugcagacguucaugcggauggccuggggcggguccuacaucgcgcuggacagcggcaaggggaacugggacugcaucaugaccuccuaccaguaccucaucauccagaacaccaccugggaggaccacugccaguucagccgccccucccccaucggcuaccuggggcugcucagccagcggacgcgcgacaucuacaucagccggcgccugcugggcaccuucaccuggacccucuccgacagcgagggcaacgagacgcccgggggcuacugccugacccgguggaugcugaucgaggccgagcucaagugcuucgggaacaccgccguggccaagugcaacgagaagcacgacgaggaguucugcgacaugcugcgccuguucgacuucaacaagcaggccauccggcgccucaagaccgaggcgcaggccaacauccagcugaucaacaaggccgugaacgcccugaucaacgaccagcucaucaugaagaaccaccuccgggacaucaugggcauccccuacugcaacuacuccaaguacugcuaccugaaccacacggucaccgggaagaccagccugccccgcugcugccugguguccaacggcagcuaccugaacgagacccacuucuccgacgacaucgagcagcaggccgacaacaugaucacggagcuccugcagaaggaguacauggaccggcagggcaagaccccgcuggggcucguggaccuguucgucuucagcaccuccuucuaccugaucagcaucuuccugcaccucgugaagaucccgacccaccgccacgugaucggcaagcccugccccaagccccaccggcugaaccacauggggaucugcuccugcggccuguacaagcacccggggguccccgugaaguggaagcgcugaggacuaguaauaaggaaacuguaugaaugucugugggcaggaagugaagagauccuucuguaaagguuuuuggaauuaugucugcugaauaauaaacuuuuuugaaauaauaaaucugguagaaaaaugagaucucaaaggcucuuuucagagccaccaaaaaaaaaaaaaaaaaaaaaaaaaaaaaaaaaaaaaaaaaaaaaaaaaaaaaaaaaaaaaaaaagaauu

SEQ ID NO: 39162 - RNA, 1778 nt, Artificial Sequence
  mRNA product Design b-4 (hSL-A64-N5) comprising derived and/or modified sequence from LASV(Nig08-A19;Clade III)__ADU56618__GPCmut11 (opt1)
aggagagucccgcagucggcguccagcggcucugcuuguucgugugugugucguugcaggccuuauucaagcuuaccaugggccagaucgugaccuucuuccaggaggucccccacgugaucgaggaggugaugaacaucguccugaucgcccucagcauccuggccauccugaaggggcucuacaacaucgcgaccugcggccugaucgggcuggugacguuccuccugcuguccggccgcagcugcuccaugaccuacaaggggguguacgagcuccagacccuggagcugaacaugaacacccucaacaugacgaugccgcugagcugcaccaagaacaacucccaccacuacaucauggucggcaacgagaccggccuggagcucacccugacgaacaccagccugcuccaccacaaguucugcaaccuguccgacgcccacaagaagaaccuguacgaccacacccucaugagcaucaucuccaccuuccaccugagcauccccaacuucaaccaguacgaggccauguccugcgacuucaacgggggcaagaucacggugcaguacaaccugagccacuccuacgccaucgacgccgcgaaccacugcgggaccguggccaacggcguccuccagaccuucaugcggauggccuggggcgggagcuacaucgcccuggacuccggccgcgggaagugggacugcaucaugaccagcuaccaguaccugaucauccagaacacgaccugggaggaccacugccaguucucccggcccagccccaucggcuaccucgggcugcugucccagcgcacccgggacaucuacaucagccgccggcuccugggcaccuucacguggacccugagcgacuccgagggcaacgagacccccgggggcuacugccucacccgcuggaugcugaucgaggcggagcugaagugcuucgggaacacggccguggccaagugcaacgagaagcacgacgaggaguucugcgacaugcuccggcuguucgacuucaacaagcaggccauccgccggcugaaggccgaggcgcagaugagcauccagcucaucaacaaggccgugaacgcccugaucaacgaccagcugaucaugaagaaccaccuccgcgacaucaugggcauccccuacugcaacuacuccaaguacugcuaccugaaccacaccagcaccgggcggaccucccugccccgcugcugccucgucagcaacggcuccuaccugaacgagacgcacuucagcgacgacaucgagcagcaggccgacaacaugaucaccgagaugcugcagaaggaguaccucgaccggcagggcaagaccccgcuggggcugguggaccuguucguguucuccaccagcuucuaccucaucuccaucuuccugcaccuggucaagaucccgacgcaccgccacaucgugggcaagcccugccccaagccccaccggcucaaccacauggggaucugcagcugcggccuguacaagcagccgggggugcccguccgcuggaagcggugaggacuaguaauaaggaaacuguaugaaugucugugggcaggaagugaagagauccuucuguaaagguuuuuggaauuaugucugcugaauaauaaacuuuuuugaaauaauaaaucugguagaaaaaugagaucucaaaggcucuuuucagagccaccaaaaaaaaaaaaaaaaaaaaaaaaaaaaaaaaaaaaaaaaaaaaaaaaaaaaaaaaaaaaaaaaagaauu

SEQ ID NO: 39163 - RNA, 1781 nt, Artificial Sequence
  mRNA product Design b-4 (hSL-A64-N5) comprising derived and/or modified sequence from LASV(G1180-SLE-2010;Clade IV)__AIT17168__GPCmut11 (opt1)
aggagagucccgcagucggcguccagcggcucugcuuguucgugugugugucguugcaggccuuauucaagcuuaccaugggccagaucgugaccuucuuccaggaggucccccacgugaucgaggaggugaugaacaucguccugaucgcccucagcauccuggccgugcugaaggggcucuacaacuucgcgaccugcggccugguggggcugcucaccuuccugcugcucugcggccgcuccugcaccgccagccgguacaagggggucuacgagcugcagacccuggagcucaacauggagacccugaacaugacgaugccgcuguccugcaccaagaacaacagccaccacuacaucauggugggcaacgagaccggccucgagcugacccugacgaacaccuccaucaucaaccacaaguucugcaaccucagcgacgcccacaagaagaaccuguacgaccacgcccugauguccaucaucagcaccuuccaccucuccauccccaacuucaaccaguacgaggccaugagcugcgacuucaacgggggcaagaucuccgugcaguacaaccugagccacuccuacgcgggggacgccgccaaccacugcggcaccgucgccaacggggugcugcagacguucaugcgcauggcguggggcggcagcuacaucgcccucgacuccgggcacggcagcugggacugcaucaugaccuccuaccaguaccugaucauccagaacaccaccugggaggaccacugccaguucagccggcccucccccaucggguaccugggccuccugagccagcgcacgcgggacaucuacaucagccgccggcugcucggcaccuucaccuggacccuguccgacagcgaggggaaggacacgccgggcggguacugccugacccgcuggaugcucaucgaggccgagcugaagugcuucggcaacaccgccguggccaagugcaacgagaagcacgacgaggaguucugcgacaugcugcggcuguucgacuucaacaagcaggcgauccagcgccugaaggccgaggcccagauguccauccagcugaucaacaaggccgucaacgcccucaucaacgaccagcugaucaugaagaaccaccuccgggacaucauggggauccccuacugcaacuacagcaaguacugcuaccucaaccacaccacgaccggcaagaccucccugcccaagugcugccuggugagcaacggcuccuaccucaacgagacccacuucagcgacgacaucgagcagcaggcggacaacaugaucacggagaugcugcagaaggaguacauggagcgccaggggaagacgccccugggccucguggaccuguucgucuucuccaccagcuucuaccugaucuccaucuuccugcaccucgugaagaucccgacccaccggcacaucgugggcaagagcugccccaagccccaccgccugaaccacauggggaucugcuccugcgggcuguacaagcagcccggcgucccggugaaguggaagcggugaggacuaguaauaaggaaacuguaugaaugucugugggcaggaagugaagagauccuucuguaaagguuuuuggaauuaugucugcugaauaauaaacuuuuuugaaauaauaaaucugguagaaaaaugagaucucaaaggcucuuuucagagccaccaaaaaaaaaaaaaaaaaaaaaaaaaaaaaaaaaaaaaaaaaaaaaaaaaaaaaaaaaaaaaaaaagaauu

SEQ ID NO: 39164 - RNA, 1781 nt, Artificial Sequence
  mRNA product Design b-4 (hSL-A64-N5) comprising derived and/or modified sequence from LASV(G1442-SLE-2011;Clade IV)__AIT17180__GPCmut11 (opt1)
aggagagucccgcagucggcguccagcggcucugcuuguucgugugugugucguugcaggccuuauucaagcuuaccaugggccagaucgugaccuucuuccaggaggucccccacgugaucgaggaggugaugaacaucguccugaucgcccucagcauccuggccgugcugaaggggcucuacaacguggcgaccugcggccugaucgggcuggucacguuccuccugcugugcggccgcuccugcaccaccacccucuacaaggggguguacgagcugcagacgcuggagcucaacauggagacccugaacaugaccaugccgcugagcugcaccaagaacaacucccaccacuacauccgggugggcaacgagacgggccucgagcugacccugaccaacaccagcaucaucaaccacaaguucugcaaccucuccgacgcccacaagaagaaccuguacgaccacgcccugaugagcaucaucuccacguuccaccucagcauccccaacuucaaccaguacgaggccauguccugcgacuucaacgggggcaagaucagcguccaguacaaccugucccacagcuacgccggggacgcggccaaccacugcggcaccguggccaacggggugcugcagaccuucaugcgcauggccuggggcggcuccuacaucgcgcucgacagcgggcggggcaacugggacugcaucaugaccuccuaccaguaccugaucauccagaacacgaccugggacgaccacugccaguucagccgccccucccccaucggguaccugggccuccugagccagcggacccgcgacgucuacaucucccggcgccugcucggcaccuucacguggacccugagcgacagcgaggggaaggacaccccgggcggguacugccugacccgguggaugcucaucgaggccgagcugaagugcuucggcaacacggccguggccaagugcaacgagaagcacgacgaggaguucugcgacaugcugcgccucuucgacuucaacaagcaggccauccagcggcugaaggcggaggcccagauguccauccagcugaucaacaaggccgugaacgcccucaucaacgaccagcugaucaugaagaaccaccuccgcgacaucauggggauccccuacugcaacuacagcaaguacugcuaccugaacaacaccgccaccggcaagaccucccugcccaagugcugccugaucagcaacggcuccuaccucaacgagacgcacuucagcgacgacaucgagcaggaggcggacaacaugaucaccgagaugcugcagaaggaguacauggagcggcaggggaagacgccccugggccucgucgaccuguucguguucuccaccagcuucuaccugaucuccaucuuccugcaccucgugaagaucccgacccaccgccacaucgucggcaagagcugccccaagccccaccggcugaaccacauggggaucugcuccugcgggcuguacaagcagcccggcgugccggugcgcuggaagcggugaggacuaguaauaaggaaacuguaugaaugucugugggcaggaagugaagagauccuucuguaaagguuuuuggaauuaugucugcugaauaauaaacuuuuuugaaauaauaaaucugguagaaaaaugagaucucaaaggcucuuuucagagccaccaaaaaaaaaaaaaaaaaaaaaaaaaaaaaaaaaaaaaaaaaaaaaaaaaaaaaaaaaaaaaaaaagaauu

SEQ ID NO: 39165 - RNA, 1781 nt, Artificial Sequence
  mRNA product Design b-4 (hSL-A64-N5) comprising derived and/or modified sequence from LASV(G3010-SLE-2013;Clade IV)__AIT17344__GPCmut11 (opt1)
aggagagucccgcagucggcguccagcggcucugcuuguucgugugugugucguugcaggccuuauucaagcuuaccaugggccagaucgugaccuucuuccaggaggucccccacgugaucgaggaggugaugaacaucguccugaucgcccucagcauccuggccgugcugaaggggcucuacaacuucgcgaccugcggccugguggggcuggucacguuccuccugcugugcggccgcuccugcaccaccagccucuacaaggggguguacgagcugcagacccuggagcucaacauggagacgcugaacaugaccaugccgcuguccugcaccaagaacaacagccaccacuacaucauggugggcaacgagaccggccucgagcugacgcugaccaacaccuccaucaucaaccacaaguucugcaaccucagcgacgcccacaagaagaaccuguacaaccacgcccugauguccaucaucagcaccuuccaccucuccauccccaacuucaaccaguacgaggccaugagcugcgacuucaacgggggcaagaucuccguccaguacaaccugagccacuccuacgccggggacgcggccagccacugcggcacgguggccaacggggugcugcagaccuucaugcggauggccuggggcggcuccuacaucgcgcucgacagcggguacggcaagugggacugcaucaugaccuccuaccaguaccugaucauccagaacaccacgugggaggaccacugccaguucagccgccccucccccaucggguaccugggccuccugagccagcggacccgcgacaucuacaucagccggcgccugcucggcaccuucaccuggacgcuguccgacagcgaggggaaggacaccccgggcggguacugccugacccgguggaugcucaucgaggccgagcugaagugcuucggcaacaccgccgucgccaagugcaacgagaagcacgacgaggaguucugcgacaugcugcgccucuucgacuucaacaagcaggccauccagcggcugaagacggaggcgcagauguccauccagcugaucaacaaggccgugaacgcccucaucaacgaccagcugaucaugaagaaccaccuccgcgacaucauggggauccccuacugcaacuacagcaaguacugcuaccugaaccacaccaccaccggcaagacgucccugcccaagugcugccuggugagcaacggcuccuaccucaacgagacccacuucagcgacgacaucgagcagcaggccgacaacaugaucaccgagaugcugcagaaggaguacauggagcggcaggggaagacgccccugggccucgucgaccuguucguguucuccaccagcuucuaccugaucuccaucuuccugcaccucgugaagaucccgacccaccgccacaucgucggcaagagcugccccaagccccaccggcugaaccacauggggaucugcuccugcgggcuguacaagcagcccggcgugccggugcgcuggaagcggugaggacuaguaauaaggaaacuguaugaaugucugugggcaggaagugaagagauccuucuguaaagguuuuuggaauuaugucugcugaauaauaaacuuuuuugaaauaauaaaucugguagaaaaaugagaucucaaaggcucuuuucagagccaccaaaaaaaaaaaaaaaaaaaaaaaaaaaaaaaaaaaaaaaaaaaaaaaaaaaaaaaaaaaaaaaaagaauu

SEQ ID NO: 39166 - RNA, 1781 nt, Artificial Sequence
  mRNA product Design b-4 (hSL-A64-N5) comprising derived and/or modified sequence from LASV(G502-SLE-2009;Clade IV)__AIT17126__GPCmut11 (opt1)
aggagagucccgcagucggcguccagcggcucugcuuguucgugugugugucguugcaggccuuauucaagcuuaccaugggccagaucgugaccuucuuccaggaggucccccacgugaucgaggaggugaugaacaucguccugaucgcccucagcauccuggccgugcugaaggggcucuacaacuucgcgaccugcggccugguggggcugcucacguuccugcugcucugcggccgcuccugcaccaccgggcuguacaagggcgucuacgagcugcagacccucgagcugaacauggagacgcugaacaugaccaugccgcucagcugcaccaagaacaacucccaccacuacaucauggugggcaacgagaccgggcuggagcugacgcucaccaacaccagcaucaucaaccacaaguucugcaaccuguccgacgcccacaagaagaaccuguacgaccacgcccucaugagcaucaucuccaccuuccaccugagcauccccaacuucaaccaguacgaggccauguccugcgacuucaacggcgggaagaucagcgugcaguacaaccugucccacagcuacgccggcgacgcggccgaccacugcgggacggucgccaacggcgugcuccagaccuucaugcggauggccuggggcggguccuacaucgcgcuggacagcggccgcgggcggugggacugcaucaugaccuccuaccaguaccugaucauccagaacaccacgugggaggaccacugccaguucagccgccccucccccaucggcuaccucggccugcugagccagcggacccgcgacaucuacaucucccggcgccuccuggggaccuucaccuggacgcugagcgacagcgagggcaaggacacccccgggggcuacugccucacccgguggaugcugaucgaggccgagcugaagugcuucgggaacaccgccguggccaagugcaacgagaagcacgacgaggaguucugcgacaugcuccgccuguucgacuucaacaagcaggccauccagcggcugaaggcggaggcccagauguccauccagcucaucaacaaggccgucaacgcccugaucaacgaccagcuggugaugaagaaccaccuccgcgacaucaugggcauccccuacugcaacuacagccgguacugcuaccugaaccacacgaccaccggccgcaccucccugcccaagugcugccucgugagcaacggguccuaccugaacgagacgcacuucagcgacgacaucgagcagcaggccgacaacaugaucaccgagaugcugcagaaggaguacauggagcggcagggcaagaccccgcucgggcuggucgaccuguucguguucuccaccagcuucuaccugaucuccaucuuccuccaccuggugaagaucccgacgcaccgccacaucgucggcaagagcugccccaagccccaccggcugaaccacauggggaucugcuccugcggccucuacaagcagcccggcgugccggugaaguggaagcgcugaggacuaguaauaaggaaacuguaugaaugucugugggcaggaagugaagagauccuucuguaaagguuuuuggaauuaugucugcugaauaauaaacuuuuuugaaauaauaaaucugguagaaaaaugagaucucaaaggcucuuuucagagccaccaaaaaaaaaaaaaaaaaaaaaaaaaaaaaaaaaaaaaaaaaaaaaaaaaaaaaaaaaaaaaaaaagaauu

SEQ ID NO: 39167 - RNA, 1781 nt, Artificial Sequence
  mRNA product Design b-4 (hSL-A64-N5) comprising derived and/or modified sequence from LASV(G733-SLE-2010;Clade IV)__AIT17154__GPCmut11 (opt1)
aggagagucccgcagucggcguccagcggcucugcuuguucgugugugugucguugcaggccuuauucaagcuuaccaugggccagaucgugaccuucuuccaggaggucccccacgugaucgaggaggugaugaacaucguccugaucgcccucagcauccuggccgugcugaaggggcucuacaacuucgcgaccugcggcaucguggggcuggucuccuuccugcuccugugcggccgcagcugcacgaccucccuguacaaggggguguacgagcuccagacccuggagcugaacauggagacccucaacaugacgaugccgcugagcugcaccaagaacaacucccaccacuacaucauggugggcaacgagaccggccuggagcucacccugacgaacaccagcaucaucaaccacaaguucugcaaccuguccgacgcccacaagaagaaccucuacgaccacgcccugaugagcaucaucuccaccuuccaccugagcauccccaacuucaaccaguacgaggccauguccugcgacuucaacgggggcaagaucagcguccaguacaaccucucccacagcuacgccggggacgcggccaaccacugcggcaccaucgccaacggggugcugcagacguucaugcggauggccuggggcggcuccuacaucgcgcuggacagcgggcgcgaccggugggacugcaucaugaccuccuaccaguaccucaucauccagaacaccaccugggaggaccacugccaguucagccgccccucccccaucggcuaccuggggcugcucagccagcggacgcgcgacaucuacaucagccggcgccugcugggcaccuucaccuggacccucuccgacagcgagggcaaggacacgcccgggggcuacugccugacccgguggaugcugaucgaggccgagcucaagugcuucgggaacaccgccguggccaagugcaacgagaagcacgacgaggaguucugcgacaugcugcgccuguucgacuucaacaagcaggccauccagcggcucaaggcggaggcccagauguccauccagcugaucaacaaggccgucaacgcccugaucaacgaccagcucaucaugaagaaccaccuccgcgacaucaugggcauccccuacugcaacuacagcaaguacugcuaccugaaccacaccacgaccgggaagaccucccugcccaagugcugccuggugagcaacggcuccuaccugaacgagacccacuucagcgacgacaucgagcagcaggccgacaacaugaucacggagaugcuccagaaggaguacauggagcggcagggcaagaccccgcuggggcugguggaccucuucgucuucuccaccagcuucuaccugaucuccaucuuccugcaccuggugaagaucccgacccaccgccacguggucggcaagagcugccccaagccccaccggcucaaccacauggggaucugcuccugcggccuguacgggcagcccggcgugccggugaaguggaagcgcugaggacuaguaauaaggaaacuguaugaaugucugugggcaggaagugaagagauccuucuguaaagguuuuuggaauuaugucugcugaauaauaaacuuuuuugaaauaauaaaucugguagaaaaaugagaucucaaaggcucuuuucagagccaccaaaaaaaaaaaaaaaaaaaaaaaaaaaaaaaaaaaaaaaaaaaaaaaaaaaaaaaaaaaaaaaaagaauu

SEQ ID NO: 39168 - RNA, 1781 nt, Artificial Sequence
  mRNA product Design b-4 (hSL-A64-N5) comprising derived and/or modified sequence from MOPV/LASV reassortant(IGS-1;Clade IV)__AFY05576__GPCmut11 (opt1)
aggagagucccgcagucggcguccagcggcucugcuuguucgugugugugucguugcaggccuuauucaagcuuaccaugggccagaucgugaccuucuuccaggaggucccccacgugaucgaggaggugaugaacaucguccugaucgcccucagcgugcuggccgugcugaaggggcucuacaacuucgcgaccugcggccuggucgggcuggugacguuccuccugcugugcggccgcuccugcaccaccagccucuacaaggggguguacgagcugcagacccuggagcucaacauggagacgcugaacaugaccaugccgcuguccugcaccaagaacaacagccaccacuacaucauggucggcaacgagaccggccucgagcugacgcugaccaacaccuccaucaucaaccacaaguucugcaaccucagcgacgcccacaagaagaaccuguacgaccacgcccugauguccaucaucagcaccuuccaccucuccauccccaacuucaaccaguacgaggccaugagcugcgacuucaacgggggcaagaucuccgugcaguacaaccugagccacuccuacgccggggacgcggccaaccacugcggcacgguggccaacgggguccugcagaccuucaugcggauggccuggggcggcagcuacaucgcgcucgacuccgggcgcggcaacugggacugcaucaugaccagcuaccaguaccugaucauccagaacaccacgugggaggaccacugccaguucucccggcccagccccaucggguaccugggccuccugucccagcgcacccgggacaucuacaucagccgccggcugcucggcaccuucaccuggacgcugagcgacuccgagggggaggacaccccgggcggguacugccugacccgcuggaugcucaucgaggccgagcugaagugcuucggcaacaccgccguggccaagugcaacgagaagcacgacgaggaguucugcgacaugcugcggcuguucgacuucaacaagcaggccauccagcgccugaaggcggaggcccagaugagcauccagcugaucaacaaggccgugaacgcccucaucaacgaccagcugaucaugaagaaccaccuccgggacaucauggggauccccuacugcaacuacuccaaguacugcuaccucaaccacacgaccaccggccgcaccagccugcccaagugcugccuggucuccaacggcagcuaccucaacgagacgcacuucuccgacgacaucgagcagcaggccgacaacaugaucaccgagaugcugcagaaggaguacauggagcggcaggggaagacgccccugggccucguggaccuguucguguucagcaccuccuucuaccugaucagcaucuuccugcaccucgucaagaucccgacccaccgccacaucguggggaaguccugccccaagccccaccggcugaaccacaugggcaucugcagcugcgggcuguacaagcagcccggcgugccggucaaguggaagcgcugaggacuaguaauaaggaaacuguaugaaugucugugggcaggaagugaagagauccuucuguaaagguuuuuggaauuaugucugcugaauaauaaacuuuuuugaaauaauaaaucugguagaaaaaugagaucucaaaggcucuuuucagagccaccaaaaaaaaaaaaaaaaaaaaaaaaaaaaaaaaaaaaaaaaaaaaaaaaaaaaaaaaaaaaaaaaagaauu

SEQ ID NO: 39169 - RNA, 1781 nt, Artificial Sequence
  mRNA product Design b-4 (hSL-A64-N5) comprising derived and/or modified sequence from LASV(LM765-SLE-2012;Clade IV)__AIT17814__GPCmut11 (opt1)
aggagagucccgcagucggcguccagcggcucugcuuguucgugugugugucguugcaggccuuauucaagcuuaccaugggccagaucgugaccuucuuccaggaggucccccacgugaucgaggaggugaugaacaucguccugaucgcccucagcauccuggccgugcugaaggggcucuacaacuucgcgaccugcggccugguggggcuggucacguuccuccugcugugcggccgcuccugcaccaccagccucuacaaggggguguacgagcugcagacccuggagcucaacauggagacgcugaacaugaccaugccgcuguccugcaccaagaacaacagccaccacuacaucauggugggcaacgagaccggccucgagcugacgcugaccaacaccuccaucaucgaccacaaguucugcaaccucagcgacgcccaccggaagaaccuguacgaccacgcccugauguccaucaucagcaccuuccaccucuccauccccaacuucaaccaguacgaggccaugagcugcgacuucaacgggggcaagaucuccguccaguacaaccugagccacuccuacgccaaggacgcggccgaccacugcgggacgguggccaacggcgugcugcagaccuucaugcgcauggccuggggcgggagcuacaucgcgcucgacuccggccgggggcgcugggacugcaucaugaccagcuaccaguaccugaucauccagaacaccacgugggaggaccacugccaguucucccggcccagccccaucggcuaccuggggcuccugucccagcgcacccgggacaucuacaucagccgccggcugcucggcaccuucaccuggacgcugagcgacuccgagggcaaggacacccccgggggcuacugccugacccgcuggaugcucaucgaggccgagcugaagugcuucgggaacaccgccgucgccaagugcaacgagaagcacgacgaggaguucugcgacaugcugcggcuguucgacuucaacaagcaggccauccagcgccugaaggcggaggcccagaugagcauccagcugaucaacaaggccgugaacgcccucaucaacgaccagcugaucaugaagaaccaccuccgggacaucaugggcauccccuacugcaacuacuccaaguacugcuaccucaaccacacgaccaccgggaagaccagccugcccaagugcugccugguguccaacggcagcuaccucaacgagacgcacuucuccgacgacaucgagcagcaggccgacaacaugaucaccgagaugcugcagaaggaguacauggagcgccagggcaagaccccgcuggggcucgucgaccuguucguguucagcaccuccuucuaccugaucagcaucuuccugcaccucgugaagaucccgacgcaccggcacaucgucggcaagcccugccccaagccccaccgccugaaccacauggggaucugcuccugcggccuguacaagcagccgggggugcccgugaaguggaagcggugaggacuaguaauaaggaaacuguaugaaugucugugggcaggaagugaagagauccuucuguaaagguuuuuggaauuaugucugcugaauaauaaacuuuuuugaaauaauaaaucugguagaaaaaugagaucucaaaggcucuuuucagagccaccaaaaaaaaaaaaaaaaaaaaaaaaaaaaaaaaaaaaaaaaaaaaaaaaaaaaaaaaaaaaaaaaagaauu

SEQ ID NO: 39170 - RNA, 1781 nt, Artificial Sequence
  mRNA product Design b-4 (hSL-A64-N5) comprising derived and/or modified sequence from LASV(LM776-SLE-2012;Clade IV)__AIT17824__GPCmut11 (opt1)
aggagagucccgcagucggcguccagcggcucugcuuguucgugugugugucguugcaggccuuauucaagcuuaccaugggccagaucgugaccuucuuccaggaggucccccacgugaucgaggaggugaugaacaucguccugaucgcccucagcauccuggccgugcugaaggggcucuacaacuucgcgaccugcggccugguggggcuggucacguuccuccugcugugcggccgcuccugcaccaccagcguguacaaggggguguacgagcuccagacccuggagcugaacauggagacgcucaacaugaccaugccgcuguccugcaccaagaacaacagccaccacuacaucauggucggcaacgagaccggccuggagcucacgcugaccaacaccuccaucaucaaccacaaguucugcaaccugagcgacgcccacaagaagaaccucuacgaccacgcccugauguccaucaucagcaccuuccaccuguccauccccaacuucaaccaguacgaggccaugagcugcgacuucaacgggggcaagaucuccgugcaguacaaccucagccacuccuacgccggggacgcggccaaccacugcggcacgguggccaacgggguccugcagaccuucaugcggauggccuggggcggcagcuacaucgcgcuggacuccgggcacggcaagugggacugcaucaugaccagcuaccaguaccucaucauccagaacaccacgugggaggaccacugccaguucucccgccccagccccaucggguaccugggccugcucucccagcggacccgcgacaucuacaucagccggcgccugcugggcaccuucaccuggacgcucagcgacuccgaggggaaggacaccccgggcggguacugccugacccgguggaugcugaucgaggccgagcucaagugcuucggcaacaccgccguggccaagugcaacgagaagcacgacgaggaguucugcgacaugcugcgccuguucgacuucaacaagcaggccauccagcggcucaaggcggaggcccagaugagcauccagcugaucaacaaggccgugaacgcccugaucaacgaccagcucaucaugaagaaccaccuccgcgacaucauggggauccccuacugcaacuacuccaaguacugcuaccugaaccacacgaccaccggcaagaccagccugcccaagugcugccuggucuccaacggcagcuaccugaacgagacgcacuucuccgacgacaucgagcagcaggccgacaacaugaucaccgagaugcuccagaaggaguacauggagcggcaggggaagacgccccugggccugguggaccucuucguguucagcaccuccuucuaccugaucagcaucuuccugcaccuggucaagaucccgacccaccgccacaucguggggaaguccugccccaagccccaccggcucaaccacaugggcaucugcagcugcgggcuguacaagcagcccggcgugccgguccgcuggaagcggugaggacuaguaauaaggaaacuguaugaaugucugugggcaggaagugaagagauccuucuguaaagguuuuuggaauuaugucugcugaauaauaaacuuuuuugaaauaauaaaucugguagaaaaaugagaucucaaaggcucuuuucagagccaccaaaaaaaaaaaaaaaaaaaaaaaaaaaaaaaaaaaaaaaaaaaaaaaaaaaaaaaaaaaaaaaaagaauu

SEQ ID NO: 39171 - RNA, 1781 nt, Artificial Sequence
  mRNA product Design b-4 (hSL-A64-N5) comprising derived and/or modified sequence from LASV(Mad39;Clade IV)__ANH09722__GPCmut11 (opt1)
aggagagucccgcagucggcguccagcggcucugcuuguucgugugugugucguugcaggccuuauucaagcuuaccaugggccagaucgugaccuucuuccaggaggucccccacgugaucgaggaggugaugaacaucguccugaucgcccucagcauccuggccgugcugaaggggcucuacaacguggcgaccugcggccugaucgggcuggucacguuccuccugcugugcggccgcuccugcaccaccacccucuacaaggggguguacgagcugcaggcccuggagcucaacauggagacgcugaacaugaccaugccgcugagcugcaccaagaacaacucccaccacuacauccgggugggcaacgagaccggccucgagcugacgcugaccaacaccagccucaucaaccacaaguucugcaaccuguccgacgcccacaagaagaaccuguacgaccacgcccucaugagcaucaucuccaccuuccaccugagcauccccaacuucaaccaguacgaggccauguccugcgacuucaacgacgggaagaucagcguccaguacaaccugucccacacguacgcgggcgacaccgccaaccacugcgggaccguggccaacggcgugcuccagaccuucaugcgcauggccuggggcgggagcuacaucgcgcuggacuccggccgcgggggcugggacugcaucaugacgagcuaccaguaccugaucauccagaacaccaccugggaggaccacugccaguucucccggcccagccccaucggguaccucggccugcugucccagcggacccgcgacaucuacaucagccggcgccuccugggcacguucaccuggacccuguccgacagcgaggggaaggacaccccgggcggguacugccucacgcgguggaugcugaucgaggccgagcugaagugcuucggcaacaccgccgucgccaagugcaacgagaagcacgacgaggaguucugcgacaugcuccgccuguucgacuucaacaagcaggccauccagcggcugaaggcggaggcccagaugagcauccagcucaucaacaaggccgugaacgcccugaucaacgaccagcugaucaugaagaaccaccuccgcgacaucauggggauccccuacugcaacuacuccaaguacugcuaccugaaccacaccgugaccggcaagacgagccugcccaagugcugccucgucuccaacggcagcuaccugaacgagacccacuucuccgacgacaucgagcagcaggccgacaacaugaucaccgagaugcugcagaaggaguacauggagcggcaggggaagacgccccucggccugguggaccuguucguguucagcaccuccuucuaccugaucagcaucuuccuccaccuggucaagaucccgacccaccgccacgugguggggaagcccugccccaagccccaccggcugaaccacaugggcaucugcuccugcggguucuacaagcagccgggcguccccgugcgcuggaagcggugaggacuaguaauaaggaaacuguaugaaugucugugggcaggaagugaagagauccuucuguaaagguuuuuggaauuaugucugcugaauaauaaacuuuuuugaaauaauaaaucugguagaaaaaugagaucucaaaggcucuuuucagagccaccaaaaaaaaaaaaaaaaaaaaaaaaaaaaaaaaaaaaaaaaaaaaaaaaaaaaaaaaaaaaaaaaagaauu

SEQ ID NO: 39172 - RNA, 1781 nt, Artificial Sequence
  mRNA product Design b-4 (hSL-A64-N5) comprising derived and/or modified sequence from LASV(Z0947-SLE-2011;Clade IV)__AIT17840__GPCmut11 (opt1)
aggagagucccgcagucggcguccagcggcucugcuuguucgugugugugucguugcaggccuuauucaagcuuaccaugggccagaucgugaccuucuuccaggaggucccccacgugaucgaggaggugaugaacaucguccugaucgcccucagcauccuggccgugcugaaggggcucuacaacuucgcgaccugcggccugguggggcuggucacguuccuccugcugugcggccgcuccugcaccaucagccucuacaaggggguguacgagcugcagacccuggagcucaacauggagacccugaacaugacgaugccgcuguccugcaccaagaacaacagccaccacuacaucauggugggcaacgagaccggccucgagcugacccugacgaacaccuccaucaucaaccacaaguucugcaaccucagcgacgcccacaagaagaaccuguacgaccacgcccugauguccaucaucagcaccuuccaccucuccauccccaacuucaaccaguacgaggccaugagcugcgacuucaacgggggcaagaucuccguccaguacaaccugagccacuccuacgccggggacgcggccaaccacugcggcaccguggccaacggggugcugcagacguucaugcggauggccuggggcggcagcuacaucgcgcucgacuccgggcgcgaccggugggacugcaucaugaccagcuaccaguaccugaucauccagaacaccaccugggaggaccacugccaguucucccgccccagccccaucggcuaccuggggcuccugucccagcggacgcgcgacaucuacaucagccggcgccugcucggcaccuucaccuggacccugagcgacuccgagggcaaggacacgcccgggggcuacugccugacccgguggaugcucaucgaggccgagcugaagugcuucgggaacaccgccgucgccaagugcaacgagaagcacgacgaggaguucugcgacaugcugcgccucuucgacuucaacaagcaggccauccagcggcugaaggcggaggcccagaugagcauccagcugaucaacaaggccgugaacgcccucaucaacgaccagcugaucaugaagaaccaccuccgcgacaucaugggcauccccuacugcaacuacuccaaguacugcuaccugaaccacaccacgaccgggaagaccagccugcccaagugcugccugguguccaacggcagcuaccucaacgagacccacuucuccgacgacaucgagcagcaggccgacaacaugaucacggagaugcugcagaaggaguacauggagcggcagggcaagaccccgcuggggcucgucgaccuguucguguucagcaccuccuucuaccugaucagcaucuuccugcaccucgugaagaucccgacccaccgccacaucgucggcaagcccugccccaagccccaccggcugaaccacauggggaucugcuccugcggccuguacaagcagccgggggugcccgugaaguggaagcgcugaggacuaguaauaaggaaacuguaugaaugucugugggcaggaagugaagagauccuucuguaaagguuuuuggaauuaugucugcugaauaauaaacuuuuuugaaauaauaaaucugguagaaaaaugagaucucaaaggcucuuuucagagccaccaaaaaaaaaaaaaaaaaaaaaaaaaaaaaaaaaaaaaaaaaaaaaaaaaaaaaaaaaaaaaaaaagaauu

SEQ ID NO: 39173 - RNA, 1781 nt, Artificial Sequence
  mRNA product Design b-4 (hSL-A64-N5) comprising derived and/or modified sequence from LASV(Josiah;Clade IV)__NP_694870__GPCmut11 (opt1)
aggagagucccgcagucggcguccagcggcucugcuuguucgugugugugucguugcaggccuuauucaagcuuaccaugggccagaucgugaccuucuuccaggaggucccccacgugaucgaggaggugaugaacaucguccugaucgcccucagcgugcuggccgugcugaaggggcucuacaacuucgcgaccugcggccuggucgggcuggugacguuccuccugcugugcggccgcuccugcaccaccagccucuacaaggggguguacgagcugcagacccuggagcucaacauggagacgcugaacaugaccaugccgcuguccugcaccaagaacaacagccaccacuacaucauggucggcaacgagaccggccucgagcugacgcugaccaacaccuccaucaucaaccacaaguucugcaaccucagcgacgcccacaagaagaaccuguacgaccacgcccugauguccaucaucagcaccuuccaccucuccauccccaacuucaaccaguacgaggccaugagcugcgacuucaacgggggcaagaucuccgugcaguacaaccugagccacuccuacgccggggacgcggccaaccacugcggcacgguggccaacgggguccugcagaccuucaugcggauggccuggggcggcagcuacaucgcgcucgacuccgggcgcggcaacugggacugcaucaugaccagcuaccaguaccugaucauccagaacaccacgugggaggaccacugccaguucucccggcccagccccaucggguaccugggccuccugucccagcgcacccgggacaucuacaucagccgccggcugcucggcaccuucaccuggacgcugagcgacuccgaggggaaggacaccccgggcggguacugccugacccgcuggaugcucaucgaggccgagcugaagugcuucggcaacaccgccguggccaagugcaacgagaagcacgacgaggaguucugcgacaugcugcggcuguucgacuucaacaagcaggccauccagcgccugaaggcggaggcccagaugagcauccagcugaucaacaaggccgugaacgcccucaucaacgaccagcugaucaugaagaaccaccuccgggacaucauggggauccccuacugcaacuacuccaaguacugcuaccucaaccacacgaccaccggccgcaccagccugcccaagugcugccuggucuccaacggcagcuaccucaacgagacgcacuucuccgacgacaucgagcagcaggccgacaacaugaucaccgagaugcugcagaaggaguacauggagcggcaggggaagacgccccugggccugguggaccucuucguguucagcaccuccuucuaccugaucagcaucuuccugcaccucgucaagaucccgacccaccgccacaucguggggaaguccugccccaagccccaccggcugaaccacaugggcaucugcagcugcgggcuguacaagcagcccggcgugccggucaaguggaagcgcugaggacuaguaauaaggaaacuguaugaaugucugugggcaggaagugaagagauccuucuguaaagguuuuuggaauuaugucugcugaauaauaaacuuuuuugaaauaauaaaucugguagaaaaaugagaucucaaaggcucuuuucagagccaccaaaaaaaaaaaaaaaaaaaaaaaaaaaaaaaaaaaaaaaaaaaaaaaaaaaaaaaaaaaaaaaaagaauu

SEQ ID NO: 39174 - RNA, 1778 nt, Artificial Sequence
  mRNA product Design b-4 (hSL-A64-N5) comprising derived and/or modified sequence from LASV(LP;Clade I)__AAF86701__GPCmut11 (opt1)
aggagagucccgcagucggcguccagcggcucugcuuguucgugugugugucguugcaggccuuauucaagcuuaccaugggccagaucaucaccuucuuccaggaggugccccacgucaucgaggaggugaugaacaucgugcugaucgcccucagccugcuggccauccucaaggggcuguacaacaucgcgaccugcggcaucaucgggcuggucgccuuccucuuccugugcggcaaguccugcagccugacgcucaagggcggguacgagcugcagacccuggagcucaacauggagacccugaacaugaccaugccgcuguccugcacgaagaacagcucccaccacuacauccgcgugggcaacgagaccgggcucgagcugacccugaccaacacgagcaucaucaaccacaaguucugcaaccucuccgacgcccacaagaagaaccuguacgaccacgcccugaugagcaucaucuccaccuuccaccucagcauccccaacuucaaccaguacgaggccauguccugcgacuucaacggcgggaagaucagcgugcaguacaaccugucccacagcuacgcgggcgacgccgccgagcacugcgggaccgucgccaacggcgugcugcagaccuucaugcggauggcguggggcgggcgcuacaucgcccucgacuccggcaaggggaacugggacugcaucaugacgagcuaccaguaccugaucauccagaacaccaccugggaggaccacugccaguucucccggcccagccccaucggcuaccugggccuccugucccagcgcacccgggacaucuacaucagccgccggcugcucgggacguucaccuggacccugagcgacuccgagggcaacgagacccccgggggcuacugccugacgcgcuggaugcucaucgaggccgagcugaagugcuucgggaacaccgccguggccaagugcaacgagaagcacgacgaggaguucugcgacaugcugcggcuguucgacuucaacaagcaggcgauccgccggcugaaggccgaggcccagaugagcauccagcugaucaacaaggccgucaacgcccucaucaacgaccagcugaucaugaagaaccaccuccgcgacaucaugggcauccccuacugcaacuacuccaaguacugcuaccucaaccacaccagcuccggccggaccagccugcccaagugcugccugaucuccaacgggagcuaccucaacgagacgcaguucuccgacgacaucgagcagcaggcggacaacaugaucaccgagaugcugcagaaggaguacaucgagcgccagggcaagaccccgcuggggcugguggacaucuucaucuucagcaccuccuucuaccucaucagcaucuuccugcaccugaucaagaucccgacgcaccggcacaucgugggcaagcccugccccaagccccaccgccucaaccacaugggggucugcuccugcggccuguacaagcacccgggcgugcccaccaaguggaagcggugaggacuaguaauaaggaaacuguaugaaugucugugggcaggaagugaagagauccuucuguaaagguuuuuggaauuaugucugcugaauaauaaacuuuuuugaaauaauaaaucugguagaaaaaugagaucucaaaggcucuuuucagagccaccaaaaaaaaaaaaaaaaaaaaaaaaaaaaaaaaaaaaaaaaaaaaaaaaaaaaaaaaaaaaaaaaagaauu

SEQ ID NO: 39175 - RNA, 1778 nt, Artificial Sequence
  mRNA product Design b-4 (hSL-A64-N5) comprising derived and/or modified sequence from LASV(803213;Clade II)__AAF86703__GPCmut11 (opt1)
aggagagucccgcagucggcguccagcggcucugcuuguucgugugugugucguugcaggccuuauucaagcuuaccaugggccagaucaucaccuucuuccaggaggugccccacgucaucgaggaggugaugaacaucgugcugaucgcccucagccugcuggccauccucaaggggaucuacaacgucgcgaccugcggccuguucgggcugaucuccuuccuccugcugugcggccgcagcugcuccgugacguacaaggggguguacgagcuccagacccuggagcugaacauggccaaccucaacaugaccaugccgcugagcugcaccaagaacaacucccaccacuacaucauggucggcaacgagacgggccuggagcucacccugaccaacaccagcaucaucaaccacaaguucugcaaccuguccgacgcccacaagaagaaccucuacgaccacgcccugaugagcaucaucuccacguuccaccugagcauccccaacuucaaccaguacgaggccauguccugcgacuucaacgggggcaagaucagcgugcaguacaaccucucccacagcuucgcgguggacgccgccaaccacugcgggaccaucgccaacggcguccugcagaccuucaugcggauggcguggggcggguccuacaucgcccuggacagcggcaaggggaacugggacugcaucaugaccuccuaccaguaccucaucauccagaacacgaccugggaggaccacugccaguucagccgccccucccccaucggcuaccuggggcugcucagccagcggacccgcgacaucuacaucagccggcgccugcugggcaccuucacguggacccucuccgacagcgagggcaacgaggcccccgggggcuacugccugacccgguggaugcugaucgaggccgagcucaagugcuucgggaacaccgccguggcgaagugcaacgagaagcacgacgaggaguucugcgacaugcugcgccuguucgacuucaacaagcaggccaucaagcggcucaagacggaggcccagauguccauccagcugaucaacaaggccgugaacgcccugaucaacgaccagcucaucaugaagaaccaccuccgcgacaucaugggcauccccuacugcaacuacagccgguacugcuaccugaaccacaccgucaccgggaagaccucccugccccgcugcugccuggugagcaacggcuccuaccugaacgagacgcacuucagcgacgacaucgagcagcaggcggacaacaugaucaccgagaugcuccagaaggaguacauggaccggcagggcaagaccccgcuggggcugguggaccuguucgucuucuccaccagcuucuaccucaucuccaucuuccugcaccuggugaagaucccgacgcaccgccacaucgugggcaagcccugccccaagccccaccggcucaaccacauggggaucugcagcugcggccuguacaagcacccggggguccccgugaaguggaagcgcugaggacuaguaauaaggaaacuguaugaaugucugugggcaggaagugaagagauccuucuguaaagguuuuuggaauuaugucugcugaauaauaaacuuuuuugaaauaauaaaucugguagaaaaaugagaucucaaaggcucuuuucagagccaccaaaaaaaaaaaaaaaaaaaaaaaaaaaaaaaaaaaaaaaaaaaaaaaaaaaaaaaaaaaaaaaaagaauu

SEQ ID NO: 39176 - RNA, 1778 nt, Artificial Sequence
  mRNA product Design b-4 (hSL-A64-N5) comprising derived and/or modified sequence from LASV(GA391;Clade III)__CAA36645__GPCmut11 (opt1)
aggagagucccgcagucggcguccagcggcucugcuuguucgugugugugucguugcaggccuuauucaagcuuaccaugggccagaucgugaccuucuuccaggaggucccccacgugaucgaggaggugaugaacaucguccugaucgcccucagcauccuggccauccugaaggggcucuacaacguggcgaccugcggccugaucgggcuggugacguuccuccugcuguccggccgcagcugcucccucaucuacaaggggaccuacgagcugcagacccuggagcucaacauggagacccugaacaugacgaugccgcugagcugcaccaagaacaacucccaccacuacauccgggucggcaacgagaccggccucgagcugacccugacgaacaccagcauccucaaccacaaguucugcaaccuguccgacgcccacaagcgcaaccuguacgaccacagccucauguccaucaucagcaccuuccaccuguccauccccaacuucaaccaguacgaggccaugagcugcgacuucaacgggggcaagaucaccgugcaguacaaccugucccacagcuucgccguggacgccgcggggcacugcggcacgcucgccaacgggguccugcagaccuucaugcggauggccuggggcggcuccuacaucgcccuggacagcgggcgcggcaacugggacugcaucaugaccuccuaccaguaccucaucauccagaacaccacgugggacgaccacugccaguucagccggcccucccccaucggguaccugggccugcucagccagcgcacccgggacaucuacaucagccgccggcugcugggcaccuucaccuggacgcucuccgacagcgaggggaacgagaccccgggcggguacugccugacccgcuggaugcugaucgaggcggagcucaagugcuucggcaacaccgccguggccaagugcaacgagaagcacgacgaggaguucugcgacaugcugcggcuguucgacuucaacaagcaggccauccgccggcucaagacggaggcccagauguccauccagcugaucaacaaggcggugaacgcccugaucaacgaccagcucaucaugaagaaccaccuccgcgacaucauggggauccccuacugcaacuacagccgguacugcuaccugaaccacaccuccaccggcaagaccagccugccccgcugcugccugaucuccaacggcagcuaccugaacgagacgaaguucuccgacgacaucgagcagcaggccgacaacaugaucaccgagaugcugcagaaggaguacaucgaccggcaggggaagacgccccucggccuggucgaccuguucguguucagcaccuccuucuaccucaucagcaucuuccugcaccuggugaagaucccgacccaccgccacaucgucgggaagcccugccccaagccccaccggcucaaccacaugggcaucugcuccugcgggcuguacaagcagccgggcgugcccgugcgcuggaagcggugaggacuaguaauaaggaaacuguaugaaugucugugggcaggaagugaagagauccuucuguaaagguuuuuggaauuaugucugcugaauaauaaacuuuuuugaaauaauaaaucugguagaaaaaugagaucucaaaggcucuuuucagagccaccaaaaaaaaaaaaaaaaaaaaaaaaaaaaaaaaaaaaaaaaaaaaaaaaaaaaaaaaaaaaaaaaagaauu

SEQ ID NO: 39177 - RNA, 1781 nt, Artificial Sequence
  mRNA product Design b-4 (hSL-A64-N5) comprising derived and/or modified sequence from LASV(AV;Clade V)__CCA30314__GPCmut11 (opt1)
aggagagucccgcagucggcguccagcggcucugcuuguucgugugugugucguugcaggccuuauucaagcuuaccaugggccagaucgugaccuucuuccaggaggucccccacgugaucgaggaggugaugaacaucguccugaucgcccucagcauccuggccgugcugaaggggcucuacaacaucgcgaccugcggccugaucgggcugaucacguuccuccugcugugcggccgcuccugcagcuccaaccucuacaaggggguguacgagcugcagagccuggaccucaacauggagacccugaacaugaccaugccgcuguccugcaccaagaacaacagccaccacuacauccgggucggcaacgacacgggccucgagcugacccugaccaacaccuccauccucaaccacaaguucugcaaccugagcgacgcccacaagaaggaccuguacgaccacgcccucauguccaucaucagcacguuccaccuguccauccccaacuucaaccaguacgaggccaugagcugcgacuucaacgggggcaagaucuccgugcaguacaaccugagccacuccuacgccaucgacgcggccaaccacugcgggaccguggccaacggcauccuccagaccuucaugcgcauggccuggggcgggagcuacaucgcgcuggacuccggccgggggaacugggacugcaucaugaccagcuaccaguaccugaucauccagaacacgaccugggagaaccacugccaguucucccgccccagccccaucggcuaccucgggcugcugagccagcggacccgcgacaucuacaucucccggcgccuccugggcaccuucacguggacccugagcgacuccgagggcaacgccacccccgggggcuacugccucacccgguggaugcugaucgaggccgagcugaagugcuucgggaacacggccgucgccaagugcaacgagaagcacgacgaggaguucugcgacaugcuccgccuguucgacuucaacaagcaggcgaucagccggcugaaguccgaggcccagaugagcauccagcucaucaacaaggccgugaacgcccugaucaacgaccagcugaucaugaagaaccaccuccgcgacaucaugggcauccccuacugcaacuacuccaaguacugcuaccugaaccacaccaucaccgggaagaccagccugcccaagugcugccucguguccaacggcagcuaccugaacgagacgcacuucuccgacgacaucgagcagcaggccgacaacaugaucaccgagaugcugcagaaggaguacauggagcggcagggcaagaccccgcuggggcucgucgaccuguucguguucagcaccuccuucuaccugaucagcaucuuccuccgccuggugaagaucccgacgcaccggcacaucgucggcaagcccugccccaagccccaccgccugaaccacauggggaucugcuccugcggccucuacaagcagccgggggugcccgugcgguggaagcgcugaggacuaguaauaaggaaacuguaugaaugucugugggcaggaagugaagagauccuucuguaaagguuuuuggaauuaugucugcugaauaauaaacuuuuuugaaauaauaaaucugguagaaaaaugagaucucaaaggcucuuuucagagccaccaaaaaaaaaaaaaaaaaaaaaaaaaaaaaaaaaaaaaaaaaaaaaaaaaaaaaaaaaaaaaaaaagaauu

SEQ ID NO: 39178 - RNA, 1778 nt, Artificial Sequence
  mRNA product Design b-4 (hSL-A64-N5) comprising derived and/or modified sequence from LASV(Togo/2016/7082;Clade VI)__AMR44577__GPCmut11 (opt1)
aggagagucccgcagucggcguccagcggcucugcuuguucgugugugugucguugcaggccuuauucaagcuuaccaugggccagaucaucaccuucuuccaggaggugccccacgucaucgaggaggugaugaacaucgugcugaucgcccucagccugcuggccauccucaagggggucuacaacguggcgaccugcggcaucaucgggcuggugacguuccuguuccucugcggccgcuccugcagccugaucuacaagggguccuacgagcugcagacccucgagcugaacauggagacccugaacaugaccaugccgcucagcugcacgaagaacuccagccaccacuacauccgggucggcaacgagaccggccuggagcugacccucaccaacacguccaucaucaaccacaaguucugcaaccugagcgacgcccacaagcgcaaccuguacgaccacgcccucauguccauccugagcaccuuccaccuguccauccccaacuucaaccaguacgaggccaugagcugcgacuucaacgggggcaagaucuccgugcaguacaaccucagccacgccuacgcgguggacgccgccgagcacugcgggaccgucgccaacggcgugcugcagaccuucaugcggauggcguggggcggguccuacaucgcccuggacagcggccgcgggaacugggacugcaucaugacguccuaccaguaccucaucauccagaacaccaccugggaggaccacugccaguucagccggcccucccccaucggcuaccuggggcugcucagccagcgcacccgggacaucuacaucagccgccggcugcugggcacguucaccuggacccucuccgacagcgagggcaacgagacccccgggggcuacugccugacgcgcuggaugcugaucgaggccgagcucaagugcuucgggaacaccgccguggccaagugcaacgagaagcacgacgaggaguucugcgacaugcugcggcuguucgacuucaacaagcaggcgauccagcgccucaaguccgaggcccagaugagcauccagcugaucaacaaggccgucaacgcccugaucaacgaccagcucaucaugaagaaccaccuccgggacaugaugggcauccccuacugcaacuacuccaaguacugcuaccugaaccacaccagcuccgggcgcaccagccugcccaagugcugccugguguccaacggcagcuaccugaacgagacgcacuucuccgacgacaucgagcagcaggccgacaacaugaucaccgagaugcuccagaaggaguacaucgaccggcagggcaagaccccgcuggggcugguggaccuguucgucuucagcaccuccuucuaccucaucagcaucuuccugcaccugaucaagaucccgacgcaccgccacaucgugggcaagcccugccccaagccccaccggcucaaccacauggggaucugcuccugcggccuguacaagcagccgggggugcccacccgcuggaagcggugaggacuaguaauaaggaaacuguaugaaugucugugggcaggaagugaagagauccuucuguaaagguuuuuggaauuaugucugcugaauaauaaacuuuuuugaaauaauaaaucugguagaaaaaugagaucucaaaggcucuuuucagagccaccaaaaaaaaaaaaaaaaaaaaaaaaaaaaaaaaaaaaaaaaaaaaaaaaaaaaaaaaaaaaaaaaagaauu

SEQ ID NO: 39179 - RNA, 1778 nt, Artificial Sequence
  mRNA product Design b-4 (hSL-A64-N5) comprising derived and/or modified sequence from LASV(KAK-428;Clade n.d. (VII))__ANH09740__GPCmut11 (opt1)
aggagagucccgcagucggcguccagcggcucugcuuguucgugugugugucguugcaggccuuauucaagcuuaccaugggccagaucgugaccuucuuccaggaggucccccacgugaucgaggaggugaugaacaucguccugaucgcccucagccugcuggccauccucaaggggcuguacaacuucgcgaccugcggcgugaucgggcugaucacguuccuccugcugugcggccgcuccugcagcgccaccuacaaggggcaguacgagcuccagacccuggagcugaacauggagucccucaacaugaccaugccgcugagcugcacgaagaacaacucccaccacuacauccgggccggcaacaacaccggccuggagcucacccugaccaacacgagcaucaucucccacaaguucugcaaccugagcgacgcccacaagaagaaccucuacgaccacacccugauguccaucaucaccaccuuccaccugagcauccccaacuucaaccaguacgaggccauguccugcgacuucaacgggggcaagaucagcauccaguacaaccucucccacagcuacgcgggggacgccgcccagcacugcggcacgguggccaacgggguccugcagaccuucaugcgcauggcguggggcggcuccuaccuggcccucgacagcgggcggcgcggcugggacugcaucaucuccagcuaccaguaccugaucauccagaacaccaccugggacgaccacugccaguucucccggcccagccccaucggguaccugggcuucgugagccagaagacgcgcgacaucuacaucucccggcgccuccugggcaccuucaccuggacccugagcgacuccgaggggcacgacaugccgggcggguacugccucacgcgguggaugcugaucgaggccgaccugaagugcuucggcaacaccgccguggccaagugcaacgagaagcacgacgaggaguucugcgacauguggcgccucuucgacuucaacaagcaggcgauccagcggcugaaggccgaggcccagaugaacauccagcugaucaacaaggccgucaacgcccucaucaacgaccagcugaugaugaagaaccaccuccgcgacaucauggggauccccuacugcaacuacagcaaguucugcuaccugaacaacaccaccacgggccggaccucccugccccgcugcugccugaucagcaacggcuccuaccucaacgagacccacuucagcgacgacaucgagcagcaggcggacaacaugaucaccgagaugcugcagaaggaguacauggaccggcaggggaagacgccccugggccucguggaccuguucguguucuccaccagcuucuaccugaucaccaucuuccugcaccucgucaagaucccgacccaccgccacaucguggggaagcccugccccaagccccaccggcugaaccacaugggcaucugcuccugcgggcuguacaagcagccgggcgugcccguccgcuggaagcggugaggacuaguaauaaggaaacuguaugaaugucugugggcaggaagugaagagauccuucuguaaagguuuuuggaauuaugucugcugaauaauaaacuuuuuugaaauaauaaaucugguagaaaaaugagaucucaaaggcucuuuucagagccaccaaaaaaaaaaaaaaaaaaaaaaaaaaaaaaaaaaaaaaaaaaaaaaaaaaaaaaaaaaaaaaaaagaauu

SEQ ID NO: 39180 - RNA, 1778 nt, Artificial Sequence; identical to SEQ ID NO: 39174
  mRNA product Design b-4 (hSL-A64-N5) comprising derived and/or modified sequence from LASV(Pinneo-NIG-1969;Clade I)__AIT17836__GPCmut11 (opt1)

SEQ ID NO: 39181 - RNA, 1778 nt, Artificial Sequence
  mRNA product Design b-4 (hSL-A64-N5) comprising derived and/or modified sequence from LASV(ISTH0009-NIG-2011;Clade II)__AIT17404__GPCmut11 (opt1)
aggagagucccgcagucggcguccagcggcucugcuuguucgugugugugucguugcaggccuuauucaagcuuaccaugggccagaucaucaccuucuuccaggaggugccccacgucaucgaggaggugaugaacaucgugcugaucgcccucagccugcuggccauccucaaggggaucuacaacgucgcgaccugcggccuguucgggcugguguccuuccuccugcugugcggccgcagcugcuccacgaccuacaaggggguguacgagcuccagacccuggagcuggacauggccagccucaacaugaccaugccgcuguccugcacgaagaacaacagccaccacuacaucauggucggcaacgagaccggccuggagcucacccugaccaacacguccaucaucaaccacaaguucugcaaccugagcgacgcccacaagaagaaccucuacgaccacgcccugauguccaucaucagcaccuuccaccuguccauccccaacuucaaccaguacgaggccaugagcugcgacuucaacgggggcaagaucuccgugcaguacaaccucagccacgcguacgccguggacgccgccaaccacugcgggaccaucgcgaacggcguccugcagaccuucaugcggauggccuggggcggguccuacaucgcccuggacagcggcaagggguccugggacugcaucaugacgagcuaccaguaccucaucauccagaacaccaccugggaggaccacugccaguucucccgccccagccccaucggcuaccuggggcugcucagccagcggacccgcgacaucuacaucucccggcgccugcugggcacguucaccuggacccucagcgacuccgagggcaacgagacccccgggggcuacugccugacgcgguggaugcugaucgaggccgagcucaagugcuucgggaacaccgccguggcgaagugcaacgagaagcacgacgaggaguucugcgacaugcugcgccuguucgacuucaacaagcaggccauccggcgccucaagaccgaggcccagaugagcauccagcugaucaacaaggccgugaacgcccugaucaacgaccagcucaucaugaagaaccaccuccgggacaucaugggcaucccguacugcaacuacuccaaguacugcuaccugaaccacaccgucacggggaagaccagccugccccgcugcugccugguguccaacggcagcuaccugaacgagacccacuucuccgacgacaucgagcagcaggcggacaacaugaucaccgagcuccugcagaaggaguacauggaccggcagggcaagacgccccuggggcugguggaccucuucgucuucagcaccuccuucuaccugaucagcaucuuccugcaccucaucaagaucccgacccaccgccacaucaccggcaagcccugccccaagccccaccggcugaaccacauggggaucugcuccugcggccuguacaagcacccgggggugcccgugaaguggaagcgcugaggacuaguaauaaggaaacuguaugaaugucugugggcaggaagugaagagauccuucuguaaagguuuuuggaauuaugucugcugaauaauaaacuuuuuugaaauaauaaaucugguagaaaaaugagaucucaaaggcucuuuucagagccaccaaaaaaaaaaaaaaaaaaaaaaaaaaaaaaaaaaaaaaaaaaaaaaaaaaaaaaaaaaaaaaaaagaauu

SEQ ID NO: 39182 - RNA, 1778 nt, Artificial Sequence
  mRNA product Design b-4 (hSL-A64-N5) comprising derived and/or modified sequence from LASV(ISTH2010-NIG-2012;Clade II)__AIT17482__GPCmut11 (opt1)
aggagagucccgcagucggcguccagcggcucugcuuguucgugugugugucguugcaggccuuauucaagcuuaccaugggccagaucaucaccuucuuccaggaggugccccacgucaucgaggaggugaugaacaucgugcugaucgcccucagccugcuggccauccucaaggggaucuacaacgucgcgaccugcggccuguucgggcugguguccuuccuccugcugugcggccgcagcugcuccacgaccuacaaggggguguacgagcuccagacccuggagcuggacauggccagccucaacaugaccaugccgcuguccugcacgaagaacaacagccaccacuacaucauggucggcaacgagaccggccuggagcucacccugaccaacacguccaucaucaaccacaaguucugcaaccugagcgacgcccacaagaagaaccucuacgaccacgcccugauguccaucaucagcaccuuccaccuguccauccccaacuucaaccaguacgaggccaugagcugcgacuucaacgggggcaagaucuccgugcaguacaaccucagccacgcguacgccguggacgccgccaaccacugcgggaccaucgcgaacggcguccugcagaccuucaugcggauggccuggggcggguccuacaucgcccuggacagcggcaagggguccugggacugcaucaugacgagcuaccaguaccucaucauccagaacaucaccugggaggaccacugccaguucucccgccccagccccaucggcuaccuggggcugcucagccagcggacccgcgacaucuacaucucccggcgccugcugggcaccuucacguggacccucagcgacuccgagggcaacgagacccccgggggcuacugccugacccgguggaugcugaucgaggccgagcucaagugcuucgggaacacggccguggcgaagugcaacgagaagcacgacgaggaguucugcgacaugcugcgccuguucgacuucaacaagcaggccauccggcgccucaagaccgaggcccagaugagcauccagcugaucaacaaggccgugaacgcccugaucaacgaccagcucaucaugaagaaccaccuccgggacaucaugggcauccccuacugcaacuacuccaaguacugcuaccugaaccacaccgucaccgggaagacgagccugccccgcugcugccugguguccaacggcagcuaccugaacgagacccacuucuccgacgacaucgagcagcaggcggacaacaugaucaccgagcuccugcagaaggaguacaucgaccggcagggcaagaccccgcuggggcugguggaccucuucgucuucagcacguccuucuaccugaucagcaucuuccugcaccucgugaagaucccgacccaccgccacguggucggcaagcccugccccaagccccaccggcugaaccacauggggaucugcuccugcggccuguacaagcacccgggggugcccgugaaguggaagcgcugaggacuaguaauaaggaaacuguaugaaugucugugggcaggaagugaagagauccuucuguaaagguuuuuggaauuaugucugcugaauaauaaacuuuuuugaaauaauaaaucugguagaaaaaugagaucucaaaggcucuuuucagagccaccaaaaaaaaaaaaaaaaaaaaaaaaaaaaaaaaaaaaaaaaaaaaaaaaaaaaaaaaaaaaaaaaagaauu

SEQ ID NO: 39183 - RNA, 1778 nt, Artificial Sequence
  mRNA product Design b-4 (hSL-A64-N5) comprising derived and/or modified sequence from LASV(Lassa virus/H.sapiens-wt/NGA/2015/ISTH_0543;Clade II)__AVO03639__GPCmut11 (opt1)
aggagagucccgcagucggcguccagcggcucugcuuguucgugugugugucguugcaggccuuauucaagcuuaccaugggccagaucaucaccuucuuccaggaggugccccacgucaucgaggaggugaugaacaucgugcugaucgcccucagccugcuggccauccucaaggggaucuacaacgucgcgaccugcggccuguucgggcugguguccuuccuccugcugugcggccgcagcugcuccacgaccuacaaggggguguacgagcuccagacccuggagcuggacauggccaaccucaacaugaccaugccgcugagcugcacgaagaacaacucccaccacuacaucauggucggcaacgagaccggccuggagcucacccugaccaacacgagcaucaucaaccacaaguucugcaaccuguccgacgcccacaagaagaaccucuacgaccacgcccugaugagcaucaucuccaccuuccaccugagcauccccaacuucaaccaguacgaggccauguccugcgacuucaacgggggcaagaucagcgugcaguacaaccucucccacaccuacgcgguggacgccgccaaccacugcgggaccaucgccaacggcguccugcagacguucaugcggauggcguggggcgggagcuacaucgcccuggacuccggcaaggggagcugggacugcaucaugaccuccuaccaguaccucgugauccagaacaccaccugggaggaccacugccaguucagccgccccucccccaucggcuaccuggggcugcucagccagcggacgcgcgacaucuacaucagccggcgccugcugggcaccuucaccuggacccucuccgacagcgagggcaacgagacgcccgggggcuacugccugacccgguggaugcugaucgaggccgagcucaagugcuucgggaacaccgccguggccaagugcaacgagaagcacgacgaggaguucugcgacaugcugcgccuguucgacuucaacaagcaggcgauccggcgccucaagaccgaggcccagauguccauccagcugaucaacaaggccgucaacgcccugaucaacgaccagcucaucaugaagaaccaccuccgggacaucaugggcauccccuacugcaacuacagcaaguacugcuaccugaaccacacggugaccgggaagaccucccugccccgcugcugccuggugagcaacggcuccuaccugaacgagacccacuucagcgacgacaucgagcagcaggccgacaacaugaucacggagcuccugcagaaggaguacaucgaccggcagggcaagaccccgcuggggcuggucgaccucuucguguucuccaccagcuucuaccugaucuccaucuuccugcaccucgugaagaucccgacccaccgccacaucacgggcaagcccugccccaagccccaccggcugaaccacauggggaucugcagcugcggccuguacaagcacccggggguccccgugaaguggaagcgcugaggacuaguaauaaggaaacuguaugaaugucugugggcaggaagugaagagauccuucuguaaagguuuuuggaauuaugucugcugaauaauaaacuuuuuugaaauaauaaaucugguagaaaaaugagaucucaaaggcucuuuucagagccaccaaaaaaaaaaaaaaaaaaaaaaaaaaaaaaaaaaaaaaaaaaaaaaaaaaaaaaaaaaaaaaaaagaauu

SEQ ID NO: 39184 - RNA, 1778 nt, Artificial Sequence
  mRNA product Design b-4 (hSL-A64-N5) comprising derived and/or modified sequence from LASV(Lassa virus/H.sapiens-wt/NGA/2016/ISTH_0009;Clade II)__AVO03571__GPCmut11 (opt1)
aggagagucccgcagucggcguccagcggcucugcuuguucgugugugugucguugcaggccuuauucaagcuuaccaugggccagaucaucaccuucuuccaggaggugccccacgucaucgaggaggugaugaacaucgugcugaucgcccucagccugcuggccauccucaaggggaucuacaacgucgcgaccugcggccugcuggggcucguguccuuccugcugcucugcggccgcagcugcuccacgaccuacaaggggguguacgagcugcagacccuggagcucgacauggccagccugaacaugaccaugccgcuguccugcacgaagaacaacagccaccacuacaucauggucggcaacgagaccggccucgagcugacccugaccaacacguccaucaucaaccacaaguucugcaaccucagcgacgcccacaagaagaaccuguacgaccacgcccugauguccaucaucagcaccuuccaccucuccauccccaacuucaaccaguacgaggccaugagcugcgacuucaacgggggccggaucuccgugcaguacaaccugagccacuccuacgcgguggacgccgccaaccacugcgggaccaucgccaacggcguccugcagaccuucaugcgcauggcguggggcgggagcuacaucgcccucgacuccggcaaggggagcugggacugcaucaugacguccuaccaguaccugaucauccagaacaccaccugggaggaccacugccaguucagccggcccagccccaucggcuaccuggggcuccugucccagcgcacccgggacaucuacaucagccgccggcugcucggcacguucaccuggacccuguccgacagcgagggcaacgagacccccgggggcuacugccugacgcgcuggaugcucaucgaggccgagcugaagugcuucgggaacaccgccguggccaagugcaacgagaagcacgacgaggaguucugcgacaugcugcggcuguucgacuucaacaagcaggcgauccgccggcugaagaccgaggcccagauguccauccagcugaucaacaaggccgugaacgcccucaucaacgaccagcugaucaugaagaaccaccuccgcgacaucaugggcaucccguacugcaacuacagcaaguacugcuaccucaaccacaccgucacggggaagaccucccugccccggugcugccuggugagcaacggcuccuaccucaacgagacccacuucagcgacgacaucgagcagcaggccgacaacaugaucaccgagcugcugcagaaggaguacaucgaccgccagggcaagacgccccuggggcucguggaccuguucgucuucuccaccagcuucuaccugaucuccaucuuccuccaccuggugaagaucccgacccaccggcacaucaccggcaagcccugccccaagccccaccgccugaaccacauggggaucugcagcugcggccucuacaaccacccgggggugcccgucaaguggaagcggugaggacuaguaauaaggaaacuguaugaaugucugugggcaggaagugaagagauccuucuguaaagguuuuuggaauuaugucugcugaauaauaaacuuuuuugaaauaauaaaucugguagaaaaaugagaucucaaaggcucuuuucagagccaccaaaaaaaaaaaaaaaaaaaaaaaaaaaaaaaaaaaaaaaaaaaaaaaaaaaaaaaaaaaaaaaaagaauu

SEQ ID NO: 39185 - RNA, 1778 nt, Artificial Sequence
  mRNA product Design b-4 (hSL-A64-N5) comprising derived and/or modified sequence from LASV(Lassa virus/H.sapiens-wt/NGA/2016/ISTH_0017;Clade II)__AVO03567__GPCmut11 (opt1)
aggagagucccgcagucggcguccagcggcucugcuuguucgugugugugucguugcaggccuuauucaagcuuaccaugggccagaucaucaccuucuuccaggaggugccccacgucaucgaggaggugaugaacaucgugcugaucgcccucagccugcuggccauccucaaggggaucuacaacgucgcgaccugcggccuguucgggcugguguccuuccuccugcugugcggccgcagcugcuccacgaccuacaaggggguguacgagcuccagacccuggagcuggacauggccagccucaacaugaccaugccgcuguccugcacgaagaacaacagccaccacuacaucauggucggcaacgagaccggccuggagcucacccugaccaacacguccaucaucaaccacaaguucugcaaccugagcgacgcccacaagaagaaccucuacgaccacgcccugauguccaucaucagcaccuuccaccuguccauccccaacuucaaccaguacgaggccaugagcugcgacuucaacgggggcaagaucuccgugcaguacaaccucagccacaccuacgcgaucgacgccgccaaccacugcgggaccaucgccaacggcgugcugcagacguucaugcggauggcguggggcggguccuacaucgcccuggacagcggcaagggguccugggacugcaucaugaccagcuaccaguaccucaucauccagaacaccaccugggaggaccacugccaguucucccgccccagccccaucggcuaccuggggcugcucagccagcggacgcgcgacaucuacaucucccggcgccugcugggcaccuucaccuggacccucagcgacuccgagggcaacgagacgcccgggggcuacugccugacccgguggaugcugaucgaggccgagcucaagugcuucgggaacaccgccgucgccaagugcaacgagaagcacgacgaggaguucugcgacaugcugcgccuguucgacuucaacaagcaggcgauccggcgccucaagaccgaggcccagaugagcauccagcugaucaacaaggccgugaacgcccugaucaacgaccagcucaucaugaagaaccaccuccgggacaucaugggcauccccuacugcaacuacuccaaguacugcuaccugaaccacacggugaccgggaagaccagccugccccgcugcugccuggucuccaacggcagcuaccugaacgagacccacuucuccgacgacaucgagcagcaggccgacaacaugaucacggagcuccugcagaaggaguacauggaccggcagggcaagaccccgcuggggcugguggaccucuucguguucagcaccuccuucuaccugaucagcaucuuccugcaccucguccgcaucccgacccaccggcacgugaucggcaagcccugccccaagccccaccgccugaaccacauggggaucugcuccugcggccuguacaagcacccgggggugcccgucaaguggaagcggugaggacuaguaauaaggaaacuguaugaaugucugugggcaggaagugaagagauccuucuguaaagguuuuuggaauuaugucugcugaauaauaaacuuuuuugaaauaauaaaucugguagaaaaaugagaucucaaaggcucuuuucagagccaccaaaaaaaaaaaaaaaaaaaaaaaaaaaaaaaaaaaaaaaaaaaaaaaaaaaaaaaaaaaaaaaaagaauu

SEQ ID NO: 39186 - RNA, 1778 nt, Artificial Sequence
  mRNA product Design b-4 (hSL-A64-N5) comprising derived and/or modified sequence from LASV(Lassa virus/H.sapiens-wt/NGA/2018/ISTH_0959;Clade II)__AVV65099__GPCmut11 (opt1)
aggagagucccgcagucggcguccagcggcucugcuuguucgugugugugucguugcaggccuuauucaagcuuaccaugggccagaucaucaccuucuuccaggaggugccccacgucaucgaggaggugaugaacaucgugcugaucgcccucagccugcuggccauccucaaggggaucuacaacgucgugaccugcggccuguucgggcugguguccuuccuccugcugugcggccgcagcugcuccacgaccuacaagggggucuacgagcuccagacccuggagcuggacauggcgagccucaacaugaccaugccgcuguccugcacgaagaacaacagccaccacuacaucauggugggcaacgagaccggccuggagcucacccugaccaacacguccaucaucaaccacaaguucugcaaccugagcgacgcccacaagaagaaccucuacgaccacgcccugauguccaucaucagcaccuuccaccuguccauccccaacuucaaccaguacgaggccaugagcugcgacuucaacgggggcaagaucuccgugcaguacaaccucagccacgccuacgcgaucgacgccgccaaccacugcgggaccaucgccaacggcguccugcagaccuucaugcggauggcguggggcggguccuacaucgcccuggacagcggcaagggguccugggacugcaucaugacgagcuaccaguaccucaucauccagaacaccaccugggaggaccacugccaguucucccgccccagccccaucggcuaccuggggcugcucagccagcggacccgcgacaucuacaucucccggcgccugcugggcacguucaccuggacccucagcgacuccgagggcaacgagacccccgggggcuacugccugacgcgguggaugcugaucgaggccgagcucaagugcuucgggaacaccgccguggccaagugcaacgagaagcacgacgaggaguucugcgacaugcugcgccuguucgacuucaacaagcaggcgauccggcgccucaagaccgaggcccagaugagcauccagcugaucaacaaggccgugaacgcccugaucaacgaccagcucaucaugaagaaccaccuccgggacaucaugggcaucccguacugcaacuacuccaaguacugcuaccugaaccacaccgucacggggaagaccagccugccccgcugcugccugguguccaacggcagcuaccugaacgagacccacuucuccgacgacaucgagcagcaggccgacaacaugaucaccgagcuccugcagaaggaguacaucgaccggcagggcaagacgccccuggggcugguggaccucuucgucuucagcaccuccuucuaccugaucagcaucuuccugcaccucgugaagaucccgacccaccgccacgugaucggcaagcccugccccaagccccaccggcugaaccacauggggaucugcuccugcggccuguacaagcacccggggguccccgugaaguggaagcgcugaggacuaguaauaaggaaacuguaugaaugucugugggcaggaagugaagagauccuucuguaaagguuuuuggaauuaugucugcugaauaauaaacuuuuuugaaauaauaaaucugguagaaaaaugagaucucaaaggcucuuuucagagccaccaaaaaaaaaaaaaaaaaaaaaaaaaaaaaaaaaaaaaaaaaaaaaaaaaaaaaaaaaaaaaaaaagaauu

SEQ ID NO: 39187 - RNA, 1778 nt, Artificial Sequence
  mRNA product Design b-4 (hSL-A64-N5) comprising derived and/or modified sequence from LASV(LASV003-NIG-2008;Clade II)__AIT17580__GPCmut11 (opt1)
aggagagucccgcagucggcguccagcggcucugcuuguucgugugugugucguugcaggccuuauucaagcuuaccaugggccagaucaucaccuucuuccaggaggugccccacgucaucgaggaggugaugaacaucgugcugaucgcccucagccugcuggccauccucaaggggaucuacaacgucgcgaccugcggccuguucgggcugguguccuuccuccugcugugcggccgcagcugcuccacgaccuacaaggggguguacgagcuccagacccuggagcuggacauggccagccucaacaugaccaugccgcuguccugcacgaagaacaacagccaccacuacaucauggucggcaacgagaccggccuggagcucacccugaccaacacguccaucaucaaccacaaguucugcaaccugagcgacgcccacaagaagaaccucuacgaccacgcccugauguccaucaucagcaccuuccaccuguccauccccaacuucaaccaguacgaggccaugagcugcgacuucaacgggggcaagaucuccgugcaguacaaccucagccacaccuacgcgguggacgccgccaaccacugcgggaccaucgccaacggcguccugcagacguucaugcggauggcguggggcggguccuacaucgcccuggacagcggcaagggguccugggacugcaucaugaccagcuaccaguaccucaucauccagaacaccaccugggaggaccacugccaguucucccgccccagccccaucggcuaccuggggcugcucagccagcggacgcgcgacaucuacaucucccggcgccugcugggcaccuucaccuggacccucagcgacuccgagagcaacgagacgccgggcggguacugccugacccgguggaugcugaucgaggccgagcucaagugcuucggcaacaccgccguggccaagugcaacgagaagcacgacgaggaguucugcgacaugcugcgccuguucgacuucaacaagcaggcgauccggcgccucaaggccgaggcccagauguccauccagcugaucaacaaggccgugaacgcccugaucaacgaccagcucaucaugaagaaccaccuccgggacaucauggggauccccuacugcaacuacagcaaguacugcuaccugaaccacaccgucacgggccgcaccucccugccccggugcugccuggugagcaacggguccuaccugaacgagacccacuucagcgacgacaucgagcagcaggcggacaacaugaucaccgagcuccugcagaaggaguacauggaccgccagggcaagacgccccugggccugguggaccucuucgucuucuccaccagcuucuaccugaucuccaucuuccugcaccucgugaagaucccgacccaccggcacgugaucgggaagcccugccccaagccccaccgccugaaccacaugggcaucugcagcugcgggcuguacaagcacccgggcguccccgugaaguggaagcggugaggacuaguaauaaggaaacuguaugaaugucugugggcaggaagugaagagauccuucuguaaagguuuuuggaauuaugucugcugaauaauaaacuuuuuugaaauaauaaaucugguagaaaaaugagaucucaaaggcucuuuucagagccaccaaaaaaaaaaaaaaaaaaaaaaaaaaaaaaaaaaaaaaaaaaaaaaaaaaaaaaaaaaaaaaaaagaauu

SEQ ID NO: 39188 - RNA, 1778 nt, Artificial Sequence
  mRNA product Design b-4 (hSL-A64-N5) comprising derived and/or modified sequence from LASV(LASV035-NIG-2009;Clade II)__AIT17588__GPCmut11 (opt1)
aggagagucccgcagucggcguccagcggcucugcuuguucgugugugugucguugcaggccuuauucaagcuuaccaugggccagaucaucaccuucuuccaggaggugccccacgucaucgaggaggugaugaacaucgugcugaucgcccucagccugcuggccauccucaaggggaucuacaacgucgcgaccugcggccuguucgggcugguguccuuccuccugcugugcggccgcagcugcuccacgaccuacaaggggguguacgagcuccagacccuggagcuggacauggccagccucaacaugaccaugccgcuguccugcacgaagaacaacagccaccacuacaucauggucggcaacgagaccggccuggagcucacccugaccaacacguccaucaucaaccacaaguucugcaaccugagcgacgcccacaagaagaaccucuacgaccacgcccugauguccaucaucagcaccuuccaccuguccauccccaacuucaaccaguacgaggccaugagcugcgacuucaacgggggcaagaucuccgugcaguacaaccucagccacgcguacgccguggacgccgccaaccacugcgggaccaucgcgaacggcguccugcagaccuucaugcggauggccuggggcggguccuacaucgcccuggacagcggcaagggguccugggacugcaucaugacgagcuaccaguaccucaucauccagaacaccaccugggaggaccacugccaguucucccgccccagccccaucggcuaccuggggcugcucagccagcggacccgcgacaucuacaucucccggcgccugcugggcacguucaccuggacccucagcgacuccgagggcaacgagacccccgggggcuacugccugacgcgguggaugcugaucgaggccgagcucaagugcuucgggaacaccgccguggcgaagugcaacgagaagcacgacgaggaguucugcgacaugcugcgccuguucgacuucaacaagcaggccauccggcgccucaaggccgaggcccagaugagcauccagcugaucaacaaggccgugaacgcgcugaucaacgaccagcucaucaugaagaaccaccuccgggacaucaugggcauccccuacugcaacuacuccaaguacugcuaccugaaccacaccgucaccgggaagacgagccugccccgcugcugccugguguccaacggcagcuaccugaacgagacccacuucuccgacgacaucgagcagcaggccgacaacaugaucaccgagcuccugcagaaggaguacaucgaccggcagggcaagaccccgcuggggcugguggaccucuucgucuucagcacguccuucuaccugaucagcaucuuccugcaccucgugaagaucccgacccaccgccacgugaucggcaagcccugccccaagccccaccggcugaaccacauggggaucugcuccugcggccuguacaagcacccggggguccccgugaaguggaagcgcugaggacuaguaauaaggaaacuguaugaaugucugugggcaggaagugaagagauccuucuguaaagguuuuuggaauuaugucugcugaauaauaaacuuuuuugaaauaauaaaucugguagaaaaaugagaucucaaaggcucuuuucagagccaccaaaaaaaaaaaaaaaaaaaaaaaaaaaaaaaaaaaaaaaaaaaaaaaaaaaaaaaaaaaaaaaaagaauu

SEQ ID NO: 39189 - RNA, 1778 nt, Artificial Sequence
  mRNA product Design b-4 (hSL-A64-N5) comprising derived and/or modified sequence from LASV(LASV1000-NIG-2009;Clade II)__AIT17782__GPCmut11 (opt1)
aggagagucccgcagucggcguccagcggcucugcuuguucgugugugugucguugcaggccuuauucaagcuuaccaugggccagaucaucaccuucuuccaggaggugccccacgucaucgaggaggugaugaacaucgugcugaucgcccucagccugcuggccauccucaaggggaucuacaacgucgcgaccugcggccuguucgggcugguguccuuccuccugcugugcggccgcagcugcuccacgaccuacaaggggguguacgagcuccagacccuggagcuggacauggccagccucaacaugaccaugccgcuguccugcacgaagaacaacagccaccacuacaucauggucggcaacgagaccggccuggagcucacccugaccaacacguccaucaucaaccacaaguucugcaaccugagcgacgcccacaagaagaaccucuacgaccacgcccugauguccaucaucagcaccuuccaccuguccauccccaacuucaaccaguacgaggccaugagcugcgacuucaacgggggcaagaucuccgugcaguacaaccucagccacaccuacgcgguggacgccgccaaccacugcgggaccaucgccaacggcguccugcagacguucaugcggauggcguggggcggguccuacaucgcccuggacagcggcaagggguccugggacugcaucaugaccagcuaccaguaccucaucauccagaacaccaccugggaggaccacugccaguucucccgccccagccccaucggcuaccuggggcugcucagccagcggacgcgcgacaucuacaucucccggcgccugcugggcaccuucaccuggacccucagcgacuccgagggcaacgagacgcccgggggcuacugccugacccgguggaugcugaucgaggccgagcucaagugcuucgggaacaccgccguggccaagugcaacgagaagcacgacgaggaguucugcgacaugcugcgccuguucgacuucaacaagcaggcgaucaagcggcucaagaccgaggcccagaugagcauccagcugaucaacaaggccgugaacgcccugaucaacgaccagcucaucaugaagaaccaccuccgcgacaucaugggcauccccuacugcaacuacuccaaguacugcuaccugaaccacacggucaccgggaagaccagccugccccggugcugccugguguccaacggcagcuaccugaacgagacccacuucuccgacgacaucgagcagcaggccgacaacaugaucacggagcuccugcagaaggaguacaucgaccgccagggcaagaccccgcuggggcugguggaccucuucgucuucagcaccuccuucuaccugaucagcaucuuccugcaccucgugaagaucccgacccaccggcacguggucggcaagcccugccccaagccccaccgccugaaccacauggggaucugcuccugcggccuguacaagcacccgggggugcccgugaaguggaagcggugaggacuaguaauaaggaaacuguaugaaugucugugggcaggaagugaagagauccuucuguaaagguuuuuggaauuaugucugcugaauaauaaacuuuuuugaaauaauaaaucugguagaaaaaugagaucucaaaggcucuuuucagagccaccaaaaaaaaaaaaaaaaaaaaaaaaaaaaaaaaaaaaaaaaaaaaaaaaaaaaaaaaaaaaaaaaagaauu

SEQ ID NO: 39190 - RNA, 1778 nt, Artificial Sequence
  mRNA product Design b-4 (hSL-A64-N5) comprising derived and/or modified sequence from LASV(LASV221-NIG-2010;Clade II)__AIT17624__GPCmut11 (opt1)
aggagagucccgcagucggcguccagcggcucugcuuguucgugugugugucguugcaggccuuauucaagcuuaccaugggccagaucaucaccuucuuccaggaggugccccacgucaucgaggaggugaugaacaucgugcugaucgcccucagccugcuggccauccucaaggggaucuacaacgucgcgaccugcggccuguucgggcugguguccuuccuccugcugugcggccgcagcugcuccacgaccuacaaggggguguacgagcuccagacccuggagcuggacauggccagccucaacaugaccaugccgcuguccugcacgaagaacaacagccaccacuacaucauggucggcaacgagaccggccuggagcucacccugaccaacacguccaucaucaaccacaaguucugcaaccugagcgacgcccacaagaagaaccucuacgaccacgcccugauguccaucaucagcaccuuccaccuguccauccccaacuucaaccaguacgaggccaugagcugcgacuucaacgggggcaagaucuccgugcaguacaaccucagccacaccuacgcgaucgacgccgccaaccacugcgggaccaucgccaacggcgugcugcagacguucaugcggauggcguggggcggguccuacaucgcccuggacagcggcaagggguccugggacugcaucaugaccagcuaccaguaccucaucauccagaacaccaccugggaggaccacugccaguucucccgccccagccccaucggcuaccuggggcugcucagccagcggacgcgcgacaucuacaucucccggcgccugcugggcaccuucaccuggacccucagcgacuccgagggcaacgagacgcccgggggcuacugccugacccgguggaugcugaucgaggccgagcucaagugcuucgggaacaccgccgucgccaagugcaacgagaagcacgacgaggaguucugcgacaugcugcgccuguucgacuucaacaagcaggcgauccggcgccucaagaccgaggcccagaugagcauccagcugaucaacaaggccgugaacgcccugaucaacgaccagcucaucaugaagaaccaccuccgggacaucaugggcauccccuacugcaacuacuccaaguacugcuaccugaaccacacggugaccgggaagaccagccugccccgcugcugccuggucuccaacggcagcuaccugaacgagacccacuucuccgacgacaucgagcagcaggccgacaacaugaucacggagaugcuccagaaggaguacauggaccggcagggcaagaccccgcuggggcugguggaccuguucguguucagcaccuccuucuaccucaucagcaucuuccugcaccuggucaagaucccgacccaccgccacgugaucggcaagcccugccccaagccccaccggcucaaccacauggggaucugcuccugcggccuguacaagcacccgggggugcccgucaaguggaagcgcugaggacuaguaauaaggaaacuguaugaaugucugugggcaggaagugaagagauccuucuguaaagguuuuuggaauuaugucugcugaauaauaaacuuuuuugaaauaauaaaucugguagaaaaaugagaucucaaaggcucuuuucagagccaccaaaaaaaaaaaaaaaaaaaaaaaaaaaaaaaaaaaaaaaaaaaaaaaaaaaaaaaaaaaaaaaaagaauu

SEQ ID NO: 39191 - RNA, 1778 nt, Artificial Sequence
  mRNA product Design b-4 (hSL-A64-N5) comprising derived and/or modified sequence from LASV(LASV237-NIG-2010;Clade II)__AIT17638__GPCmut11 (opt1)
aggagagucccgcagucggcguccagcggcucugcuuguucgugugugugucguugcaggccuuauucaagcuuaccaugggccagaucaucaccuucuuccaggaggugccccacgucaucgaggaggugaugaacaucgugcugaucgcccucagccugcuggccauccucaaggggaucuacaacgucgcgaccugcggccuguucgggcugguguccuuccuccugcugugcggccgcagcugcuccacgaccuacaaggggguguacgagcuccagacccuggagcuggacauggccagccucaacaugaccaugccgcuguccugcacgaagaacaacagccaccacuacaucauggucggcaacgagaccggccuggagcucacccugaccaacacguccaucaucaaccacaaguucugcaaccugagcgacgcccacaagaaggaccucuacgaccacgcccugauguccaucaucagcaccuuccaccuguccauccccaacuucaaccaguacgaggccaugagcugcgacuucaacgggggcaagaucuccgugcaguacaaccucagccacaccuacgcgguggacgccgccaaccacugcgggaccaucgccaacggcguccugcagacguucaugcggauggcguggggcggguccuacaucgcccuggacagcggcaagggguccugggacugcaucaugaccagcuaccaguaccucaucauccagaacaccaccugggaggaccacugccaguucucccgccccagccccaucggcuaccuggggcugcucagccagcggacgcgcgacaucuacaucucccggcgccugcugggcaccuucaccuggacccucagcgacuccgagggcaacgagacgcccgggggcuacugccugacccgguggaugcugaucgaggccgagcucaagugcuucgggaacaccgccguggccaagugcaacgagaagcacgacgaggaguucugcgacaugcugcgccuguucgacuucaacaagcaggcgauccggcgccucaagaccgaggcccagaugagcauccagcugaucaacaaggccgugaacgcccugaucaacgaccagcucaucaugaagaaccaccuccgggacaucaugggcauccccuacugcaacuacuccaaguacugcuaccugaaccacacggucaccgggaagaccagccugccccgcugcugccugguguccaacggcagcuaccugaacgagacccacuucuccgacgacaucgagcagcaggccgacaacaugaucacggagcuccugcagaaggaguacauggaccggcagggcaagaccccgcuggggcugguggaccucuucgucuucagcaccuccuucuaccugaucagcaucuuccugcaccucaucaagaucccgacccaccgccacaucacgggcaagcccugccccaagccccaccggcugaaccacauggggaucugcuccugcggccuguacaagcacccgggggugcccgugaaguggaagcgcugaggacuaguaauaaggaaacuguaugaaugucugugggcaggaagugaagagauccuucuguaaagguuuuuggaauuaugucugcugaauaauaaacuuuuuugaaauaauaaaucugguagaaaaaugagaucucaaaggcucuuuucagagccaccaaaaaaaaaaaaaaaaaaaaaaaaaaaaaaaaaaaaaaaaaaaaaaaaaaaaaaaaaaaaaaaaagaauu

SEQ ID NO: 39192 - RNA, 1778 nt, Artificial Sequence
  mRNA product Design b-4 (hSL-A64-N5) comprising derived and/or modified sequence from LASV(LASV253-NIG-2011;Clade II)__AIT17670__GPCmut11 (opt1)
aggagagucccgcagucggcguccagcggcucugcuuguucgugugugugucguugcaggccuuauucaagcuuaccaugggccagaucaucaccuucuuccaggaggugccccacgucaucgaggaggugaugaacaucgugcugaucgcccucagccugcuggccauccucaaggggaucuacaacgucgcgaccugcggccuguucgggcugguguccuuccuccugcugugcggccgcagcugcuccacgaccuacaaggggguguacgagcuccagacccuggagcuggacauggccagccucaacaugaccaugccgcuguccugcacgaagaacaacagccaccacuacaucauggucggcaacgagaccggccuggagcucacccugaccaacacguccaucaucaaccacaaguucugcaaccugagcgacgcccacaagaagaaccucuacgaccacgcccugauguccaucaucagcaccuuccaccuguccauccccaacuucaaccaguacgaggccaugagcugcgacuucaacgggggcaagaucuccgugcaguacaaccucagccacaccuacgcgguggacgccgccaaccacugcgggaccaucgccaacggcguccugcagacguucaugcggauggcguggggcggguccuacaucgcccuggacagcggcaagggguccugggacugcaucaugaccagcuaccaguaccucaucauccagaacaccaccugggaggaccacugccaguucucccgccccagccccaucggcuaccuggggcugcucagccagcggacgcgcgacaucuacaucucccggcgccugcugggcaccuucaccuggacccucagcgacuccgagggcaacgagacgcccgggggcuacugccugacccgguggaugcugaucgaggccgagcucaagugcuucgggaacaccgccguggccaagugcaacgagaagcacgacgaggaguucugcgacaugcugcgccuguucgacuucaacaagcaggcgauccggcgccucaaggccgaggcccagaugagcauccagcugaucaacaaggccgugaacgcccugaucaacgaccagcucaucaugaagaaccaccuccgggacaucaugggcaucccguacugcaacuacuccaaguacugcuaccugaaccacaccgucacggggcgcaccagccugccccggugcugccugguguccaacggcagcuaccugaacgagacccacuucuccgacgacaucgagcagcaggcggacaacaugaucaccgagcuccugcagaaggaguacaucgaccgccagggcaagacgccccuggggcugguggaccucuucgucuucagcaccuccuucuaccugaucagcaucuuccugcaccucgugaagaucccgacccaccggcacaucaucggcaagcccugccccaagccccaccgccugaaccacauggggaucugcuccugcggccuguacaagcacccgggggugcccgucaaguggaagcggugaggacuaguaauaaggaaacuguaugaaugucugugggcaggaagugaagagauccuucuguaaagguuuuuggaauuaugucugcugaauaauaaacuuuuuugaaauaauaaaucugguagaaaaaugagaucucaaaggcucuuuucagagccaccaaaaaaaaaaaaaaaaaaaaaaaaaaaaaaaaaaaaaaaaaaaaaaaaaaaaaaaaaaaaaaaaagaauu

SEQ ID NO: 39193 - RNA, 1778 nt, Artificial Sequence
  mRNA product Design b-4 (hSL-A64-N5) comprising derived and/or modified sequence from LASV(LASV254-NIG-2011;Clade II)__AIT17674__GPCmut11 (opt1)
aggagagucccgcagucggcguccagcggcucugcuuguucgugugugugucguugcaggccuuauucaagcuuaccaugggccagaucaucaccuucuuccaggaggugccccacgucaucgaggaggugaugaacaucgugcugaucgcccucagccugcuggccauccucaaggggaucuacaacgucgcgaccugcggccuguucgggcugguguccuuccuccugcugugcggccgcagcugcuccacgaccuacaaggggguguacgagcuccagacccuggagcuggacaugaccaaccucaacaugacgaugccgcugagcugcaccaagaacaacucccaccacuacaucauggucggcaacgagaccggccuggagcucacccugacgaacaccagcaucaucaaccacaaguucugcaaccuguccgacgcccacaagaagaaccucuacaaccacgcccugaugagcaucaucuccaccuuccaccugagcauccccaacuucaaccaguacgaggccauguccugcgacuucaacgggggcaagaucagcgugcaguacaaccucucccacagcuacgccguggacgcggccaaccacugcgggaccaucgccaacggcguccugcagacguucaugcggauggccuggggcggguccuacaucgcgcuggacagcggcaaggggaacugggacugcaucaugaccuccuaccaguaccucaucauccagaacaccaccugggaggaccacugccaguucagccgccccucccccaucggcuaccuggggcugcucagccagcggacgcgcgacaucuacaucagccggcgccugcugggcaccuucaccuggacccucuccgacagcgagggcaacgagacgcccgggggcuacugccugacccgguggaugcugaucgaggccgagcucaagugcuucgggaacaccgccguggccaagugcaacgagaagcacgacgaggaguucugcgacaugcugcgccuguucgacuucaacaagcaggccauccggcgccucaagaccgaggcgcaggccaacauccagcugaucaacaaggccgugaacgcccugaucaacgaccagcucaucaugaagaaccaccuccgggacaucaugggcauccccuacugcaacuacuccaaguacugcuaccugaaccacacggucaccgggaagaccagccugccccgcugcugccugguguccaacggcagcuaccugaacgagacccacuucuccgacgacaucgagcagcaggccgacaacaugaucacggagcuccugcagaaggaguacauggaccggcagggcaagaccccgcuggggcugguggaccucuucgucuucagcaccuccuucuaccugaucagcaucuuccugcaccucgugaagaucccgacccaccgccacgugaucggcaagcccugccccaagccccaccggcugaaccacauggggaucugcuccugcggccuguacaagcacccggggguccccgugaaguggaagcgcugaggacuaguaauaaggaaacuguaugaaugucugugggcaggaagugaagagauccuucuguaaagguuuuuggaauuaugucugcugaauaauaaacuuuuuugaaauaauaaaucugguagaaaaaugagaucucaaaggcucuuuucagagccaccaaaaaaaaaaaaaaaaaaaaaaaaaaaaaaaaaaaaaaaaaaaaaaaaaaaaaaaaaaaaaaaaagaauu

SEQ ID NO: 39194 - RNA, 1778 nt, Artificial Sequence
  mRNA product Design b-4 (hSL-A64-N5) comprising derived and/or modified sequence from LASV(Nig08-A19;Clade III)__ADU56618__GPCmut11 (opt1)
aggagagucccgcagucggcguccagcggcucugcuuguucgugugugugucguugcaggccuuauucaagcuuaccaugggccagaucgugaccuucuuccaggaggucccccacgugaucgaggaggugaugaacaucguccugaucgcccucagcauccuggccauccugaaggggcucuacaacaucgcgaccugcggccugaucgggcuggugacguuccuccugcuguccggccgcagcugcuccaugaccuacaaggggguguacgagcuccagacccuggagcugaacaugaacacccucaacaugacgaugccgcugagcugcaccaagaacaacucccaccacuacaucauggucggcaacgagaccggccuggagcucacccugacgaacaccagccugcuccaccacaaguucugcaaccuguccgacgcccacaagaagaaccuguacgaccacacccucaugagcaucaucuccaccuuccaccugagcauccccaacuucaaccaguacgaggccauguccugcgacuucaacgggggcaagaucacggugcaguacaaccugagccacuccuacgccaucgacgccgcgaaccacugcgggaccguggccaacggcguccuccagaccuucaugcggauggccuggggcgggagcuacaucgcccuggacuccggccgcgggaagugggacugcaucaugaccagcuaccaguaccugaucauccagaacacgaccugggaggaccacugccaguucucccggcccagccccaucggcuaccucgggcugcugucccagcgcacccgggacaucuacaucagccgccggcuccugggcaccuucacguggacccugagcgacuccgagggcaacgagacccccgggggcuacugccucacccgcuggaugcugaucgaggcggagcugaagugcuucgggaacacggccguggccaagugcaacgagaagcacgacgaggaguucugcgacaugcuccggcuguucgacuucaacaagcaggccauccgccggcugaaggccgaggcgcagaugagcauccagcucaucaacaaggccgugaacgcccugaucaacgaccagcugaucaugaagaaccaccuccgcgacaucaugggcauccccuacugcaacuacuccaaguacugcuaccugaaccacaccagcaccgggcggaccucccugccccgcugcugccucgucagcaacggcuccuaccugaacgagacgcacuucagcgacgacaucgagcagcaggccgacaacaugaucaccgagaugcugcagaaggaguaccuggaccggcagggcaagaccccgcucgggcugguggaccuguucguguucuccaccagcuucuaccucaucuccaucuuccugcaccuggucaagaucccgacgcaccgccacaucgugggcaagcccugccccaagccccaccggcucaaccacauggggaucugcagcugcggccuguacaagcagccgggggugcccguccgcuggaagcggugaggacuaguaauaaggaaacuguaugaaugucugugggcaggaagugaagagauccuucuguaaagguuuuuggaauuaugucugcugaauaauaaacuuuuuugaaauaauaaaucugguagaaaaaugagaucucaaaggcucuuuucagagccaccaaaaaaaaaaaaaaaaaaaaaaaaaaaaaaaaaaaaaaaaaaaaaaaaaaaaaaaaaaaaaaaaagaauu

SEQ ID NO: 39195 - RNA, 1781 nt, Artificial Sequence
  mRNA product Design b-4 (hSL-A64-N5) comprising derived and/or modified sequence from LASV(G1180-SLE-2010;Clade IV)__AIT17168__GPCmut11 (opt1)
aggagagucccgcagucggcguccagcggcucugcuuguucgugugugugucguugcaggccuuauucaagcuuaccaugggccagaucgugaccuucuuccaggaggucccccacgugaucgaggaggugaugaacaucguccugaucgcccucagcauccuggccgugcugaaggggcucuacaacuucgcgaccugcggccugguggggcugcucaccuuccugcugcucugcggccgcuccugcaccgccagccgguacaagggggucuacgagcugcagacccuggagcucaacauggagacccugaacaugacgaugccgcuguccugcaccaagaacaacagccaccacuacaucauggugggcaacgagaccggccucgagcugacccugacgaacaccuccaucaucaaccacaaguucugcaaccucagcgacgcccacaagaagaaccuguacgaccacgcccugauguccaucaucagcaccuuccaccucuccauccccaacuucaaccaguacgaggccaugagcugcgacuucaacgggggcaagaucuccgugcaguacaaccugagccacuccuacgcgggggacgccgccaaccacugcggcaccgucgccaacggggugcugcagacguucaugcgcauggcguggggcggcagcuacaucgcccucgacuccgggcacggcagcugggacugcaucaugaccuccuaccaguaccugaucauccagaacaccaccugggaggaccacugccaguucagccggcccucccccaucggguaccugggccuccugagccagcgcacgcgggacaucuacaucagccgccggcugcucggcaccuucaccuggacccuguccgacagcgaggggaaggacacgccgggcggguacugccugacccgcuggaugcucaucgaggccgagcugaagugcuucggcaacaccgccguggccaagugcaacgagaagcacgacgaggaguucugcgacaugcugcggcuguucgacuucaacaagcaggcgauccagcgccugaaggccgaggcccagauguccauccagcugaucaacaaggccgucaacgcccucaucaacgaccagcugaucaugaagaaccaccuccgggacaucauggggauccccuacugcaacuacagcaaguacugcuaccucaaccacaccacgaccggcaagaccucccugcccaagugcugccuggugagcaacggcuccuaccucaacgagacccacuucagcgacgacaucgagcagcaggcggacaacaugaucacggagaugcugcagaaggaguacauggagcgccaggggaagacgccccugggccugguggaccucuucgucuucuccaccagcuucuaccugaucuccaucuuccugcaccucgugaagaucccgacccaccggcacaucgugggcaagagcugccccaagccccaccgccugaaccacauggggaucugcuccugcgggcuguacaagcagcccggcgucccggugaaguggaagcggugaggacuaguaauaaggaaacuguaugaaugucugugggcaggaagugaagagauccuucuguaaagguuuuuggaauuaugucugcugaauaauaaacuuuuuugaaauaauaaaucugguagaaaaaugagaucucaaaggcucuuuucagagccaccaaaaaaaaaaaaaaaaaaaaaaaaaaaaaaaaaaaaaaaaaaaaaaaaaaaaaaaaaaaaaaaaagaauu

SEQ ID NO: 39196 - RNA, 1781 nt, Artificial Sequence
  mRNA product Design b-4 (hSL-A64-N5) comprising derived and/or modified sequence from LASV(G1442-SLE-2011;Clade IV)__AIT17180__GPCmut11 (opt1)
aggagagucccgcagucggcguccagcggcucugcuuguucgugugugugucguugcaggccuuauucaagcuuaccaugggccagaucgugaccuucuuccaggaggucccccacgugaucgaggaggugaugaacaucguccugaucgcccucagcauccuggccgugcugaaggggcucuacaacguggcgaccugcggccugaucgggcuggucacguuccuccugcugugcggccgcuccugcaccaccacccucuacaaggggguguacgagcugcagacgcuggagcucaacauggagacccugaacaugaccaugccgcugagcugcaccaagaacaacucccaccacuacauccgggugggcaacgagacgggccucgagcugacccugaccaacaccagcaucaucaaccacaaguucugcaaccucuccgacgcccacaagaagaaccuguacgaccacgcccugaugagcaucaucuccacguuccaccucagcauccccaacuucaaccaguacgaggccauguccugcgacuucaacgggggcaagaucagcguccaguacaaccugucccacagcuacgccggggacgcggccaaccacugcggcaccguggccaacggggugcugcagaccuucaugcgcauggccuggggcggcuccuacaucgcgcucgacagcgggcggggcaacugggacugcaucaugaccuccuaccaguaccugaucauccagaacacgaccugggacgaccacugccaguucagccgccccucccccaucggguaccugggccuccugagccagcggacccgcgacgucuacaucucccggcgccugcucggcaccuucacguggacccugagcgacagcgaggggaaggacaccccgggcggguacugccugacccgguggaugcucaucgaggccgagcugaagugcuucggcaacacggccguggccaagugcaacgagaagcacgacgaggaguucugcgacaugcugcgccucuucgacuucaacaagcaggccauccagcggcugaaggcggaggcccagauguccauccagcugaucaacaaggccgugaacgcccucaucaacgaccagcugaucaugaagaaccaccuccgcgacaucauggggauccccuacugcaacuacagcaaguacugcuaccugaacaacaccgccaccggcaagaccucccugcccaagugcugccugaucagcaacggcuccuaccucaacgagacgcacuucagcgacgacaucgagcaggaggcggacaacaugaucaccgagaugcugcagaaggaguacauggagcggcaggggaagacgccccugggccuggucgaccucuucguguucuccaccagcuucuaccugaucuccaucuuccugcaccucgugaagaucccgacccaccgccacaucgucggcaagagcugccccaagccccaccggcugaaccacauggggaucugcuccugcgggcuguacaagcagcccggcgugccggugcgcuggaagcggugaggacuaguaauaaggaaacuguaugaaugucugugggcaggaagugaagagauccuucuguaaagguuuuuggaauuaugucugcugaauaauaaacuuuuuugaaauaauaaaucugguagaaaaaugagaucucaaaggcucuuuucagagccaccaaaaaaaaaaaaaaaaaaaaaaaaaaaaaaaaaaaaaaaaaaaaaaaaaaaaaaaaaaaaaaaaagaauu

SEQ ID NO: 39197 - RNA, 1781 nt, Artificial Sequence
  mRNA product Design b-4 (hSL-A64-N5) comprising derived and/or modified sequence from LASV(G3010-SLE-2013;Clade IV)__AIT17344__GPCmut11 (opt1)
aggagagucccgcagucggcguccagcggcucugcuuguucgugugugugucguugcaggccuuauucaagcuuaccaugggccagaucgugaccuucuuccaggaggucccccacgugaucgaggaggugaugaacaucguccugaucgcccucagcauccuggccgugcugaaggggcucuacaacuucgcgaccugcggccugguggggcuggucacguuccuccugcugugcggccgcuccugcaccaccagccucuacaaggggguguacgagcugcagacccuggagcucaacauggagacgcugaacaugaccaugccgcuguccugcaccaagaacaacagccaccacuacaucauggugggcaacgagaccggccucgagcugacgcugaccaacaccuccaucaucaaccacaaguucugcaaccucagcgacgcccacaagaagaaccuguacaaccacgcccugauguccaucaucagcaccuuccaccucuccauccccaacuucaaccaguacgaggccaugagcugcgacuucaacgggggcaagaucuccguccaguacaaccugagccacuccuacgccggggacgcggccagccacugcggcacgguggccaacggggugcugcagaccuucaugcggauggccuggggcggcuccuacaucgcgcucgacagcggguacggcaagugggacugcaucaugaccuccuaccaguaccugaucauccagaacaccacgugggaggaccacugccaguucagccgccccucccccaucggguaccugggccuccugagccagcggacccgcgacaucuacaucagccggcgccugcucggcaccuucaccuggacgcuguccgacagcgaggggaaggacaccccgggcggguacugccugacccgguggaugcucaucgaggccgagcugaagugcuucggcaacaccgccgucgccaagugcaacgagaagcacgacgaggaguucugcgacaugcugcgccucuucgacuucaacaagcaggccauccagcggcugaagacggaggcgcagauguccauccagcugaucaacaaggccgugaacgcccucaucaacgaccagcugaucaugaagaaccaccuccgcgacaucauggggauccccuacugcaacuacagcaaguacugcuaccugaaccacaccaccaccggcaagacgucccugcccaagugcugccuggugagcaacggcuccuaccucaacgagacccacuucagcgacgacaucgagcagcaggccgacaacaugaucaccgagaugcugcagaaggaguacauggagcggcaggggaagacgccccugggccuggucgaccucuucguguucuccaccagcuucuaccugaucuccaucuuccugcaccucgugaagaucccgacccaccgccacaucgucggcaagagcugccccaagccccaccggcugaaccacauggggaucugcuccugcgggcuguacaagcagcccggcgugccggugcgcuggaagcggugaggacuaguaauaaggaaacuguaugaaugucugugggcaggaagugaagagauccuucuguaaagguuuuuggaauuaugucugcugaauaauaaacuuuuuugaaauaauaaaucugguagaaaaaugagaucucaaaggcucuuuucagagccaccaaaaaaaaaaaaaaaaaaaaaaaaaaaaaaaaaaaaaaaaaaaaaaaaaaaaaaaaaaaaaaaaagaauu

SEQ ID NO: 39198 - RNA, 1781 nt, Artificial Sequence
  mRNA product Design b-4 (hSL-A64-N5) comprising derived and/or modified sequence from LASV(G502-SLE-2009;Clade IV)__AIT17126__GPCmut11 (opt1)
aggagagucccgcagucggcguccagcggcucugcuuguucgugugugugucguugcaggccuuauucaagcuuaccaugggccagaucgugaccuucuuccaggaggucccccacgugaucgaggaggugaugaacaucguccugaucgcccucagcauccuggccgugcugaaggggcucuacaacuucgcgaccugcggccugguggggcugcucacguuccugcugcucugcggccgcuccugcaccaccgggcuguacaagggcgucuacgagcugcagacccucgagcugaacauggagacgcugaacaugaccaugccgcucagcugcaccaagaacaacucccaccacuacaucauggugggcaacgagaccgggcuggagcugacgcucaccaacaccagcaucaucaaccacaaguucugcaaccuguccgacgcccacaagaagaaccuguacgaccacgcccucaugagcaucaucuccaccuuccaccugagcauccccaacuucaaccaguacgaggccauguccugcgacuucaacggcgggaagaucagcgugcaguacaaccugucccacagcuacgccggcgacgcggccgaccacugcgggacggucgccaacggcgugcuccagaccuucaugcggauggccuggggcggguccuacaucgcgcuggacagcggccgcgggcggugggacugcaucaugaccuccuaccaguaccugaucauccagaacaccacgugggaggaccacugccaguucagccgccccucccccaucggcuaccucggccugcugagccagcggacccgcgacaucuacaucucccggcgccuccuggggaccuucaccuggacgcugagcgacagcgagggcaaggacacccccgggggcuacugccucacccgguggaugcugaucgaggccgagcugaagugcuucgggaacaccgccguggccaagugcaacgagaagcacgacgaggaguucugcgacaugcuccgccuguucgacuucaacaagcaggccauccagcggcugaaggcggaggcccagauguccauccagcucaucaacaaggccgucaacgcccugaucaacgaccagcuggugaugaagaaccaccuccgcgacaucaugggcauccccuacugcaacuacagccgguacugcuaccugaaccacacgaccaccggccgcaccucccugcccaagugcugccucgugagcaacggguccuaccugaacgagacgcacuucagcgacgacaucgagcagcaggccgacaacaugaucaccgagaugcugcagaaggaguacauggagcggcagggcaagaccccgcuggggcucgucgaccuguucguguucuccaccagcuucuaccugaucuccaucuuccuccaccuggugaagaucccgacgcaccgccacaucgucggcaagagcugccccaagccccaccggcugaaccacauggggaucugcuccugcggccucuacaagcagcccggcgugccggugaaguggaagcgcugaggacuaguaauaaggaaacuguaugaaugucugugggcaggaagugaagagauccuucuguaaagguuuuuggaauuaugucugcugaauaauaaacuuuuuugaaauaauaaaucugguagaaaaaugagaucucaaaggcucuuuucagagccaccaaaaaaaaaaaaaaaaaaaaaaaaaaaaaaaaaaaaaaaaaaaaaaaaaaaaaaaaaaaaaaaaagaauu

SEQ ID NO: 39199 - RNA, 1781 nt, Artificial Sequence
  mRNA product Design b-4 (hSL-A64-N5) comprising derived and/or modified sequence from LASV(G733-SLE-2010;Clade IV)__AIT17154__GPCmut11 (opt1)
aggagagucccgcagucggcguccagcggcucugcuuguucgugugugugucguugcaggccuuauucaagcuuaccaugggccagaucgugaccuucuuccaggaggucccccacgugaucgaggaggugaugaacaucguccugaucgcccucagcauccuggccgugcugaaggggcucuacaacuucgcgaccugcggcaucguggggcuggucuccuuccugcuccugugcggccgcagcugcacgaccucccuguacaaggggguguacgagcuccagacccuggagcugaacauggagacccucaacaugacgaugccgcugagcugcaccaagaacaacucccaccacuacaucauggugggcaacgagaccggccuggagcucacccugacgaacaccagcaucaucaaccacaaguucugcaaccuguccgacgcccacaagaagaaccucuacgaccacgcccugaugagcaucaucuccaccuuccaccugagcauccccaacuucaaccaguacgaggccauguccugcgacuucaacgggggcaagaucagcguccaguacaaccucucccacagcuacgccggggacgcggccaaccacugcggcaccaucgccaacggggugcugcagacguucaugcggauggccuggggcggcuccuacaucgcgcuggacagcgggcgcgaccggugggacugcaucaugaccuccuaccaguaccucaucauccagaacaccaccugggaggaccacugccaguucagccgccccucccccaucggcuaccuggggcugcucagccagcggacgcgcgacaucuacaucagccggcgccugcugggcaccuucaccuggacccucuccgacagcgagggcaaggacacgcccgggggcuacugccugacccgguggaugcugaucgaggccgagcucaagugcuucgggaacaccgccguggccaagugcaacgagaagcacgacgaggaguucugcgacaugcugcgccuguucgacuucaacaagcaggccauccagcggcucaaggcggaggcccagauguccauccagcugaucaacaaggccgucaacgcccugaucaacgaccagcucaucaugaagaaccaccuccgcgacaucaugggcauccccuacugcaacuacagcaaguacugcuaccugaaccacaccacgaccgggaagaccucccugcccaagugcugccuggugagcaacggcuccuaccugaacgagacccacuucagcgacgacaucgagcagcaggccgacaacaugaucacggagaugcuccagaaggaguacauggagcggcagggcaagaccccgcuggggcugguggaccuguucgucuucuccaccagcuucuaccucaucuccaucuuccugcaccuggugaagaucccgacccaccgccacguggucggcaagagcugccccaagccccaccggcucaaccacauggggaucugcuccugcggccuguacgggcagcccggcgugccggugaaguggaagcgcugaggacuaguaauaaggaaacuguaugaaugucugugggcaggaagugaagagauccuucuguaaagguuuuuggaauuaugucugcugaauaauaaacuuuuuugaaauaauaaaucugguagaaaaaugagaucucaaaggcucuuuucagagccaccaaaaaaaaaaaaaaaaaaaaaaaaaaaaaaaaaaaaaaaaaaaaaaaaaaaaaaaaaaaaaaaaagaauu

SEQ ID NO: 39200 - RNA, 1781 nt, Artificial Sequence
  mRNA product Design b-4 (hSL-A64-N5) comprising derived and/or modified sequence from MOPV/LASV reassortant(IGS-1;Clade IV)__AFY05576__GPCmut11 (opt1)
aggagagucccgcagucggcguccagcggcucugcuuguucgugugugugucguugcaggccuuauucaagcuuaccaugggccagaucgugaccuucuuccaggaggucccccacgugaucgaggaggugaugaacaucguccugaucgcccucagcgugcuggccgugcugaaggggcucuacaacuucgcgaccugcggccuggucgggcuggugacguuccuccugcugugcggccgcuccugcaccaccagccucuacaaggggguguacgagcugcagacccuggagcucaacauggagacgcugaacaugaccaugccgcuguccugcaccaagaacaacagccaccacuacaucauggucggcaacgagaccggccucgagcugacgcugaccaacaccuccaucaucaaccacaaguucugcaaccucagcgacgcccacaagaagaaccuguacgaccacgcccugauguccaucaucagcaccuuccaccucuccauccccaacuucaaccaguacgaggccaugagcugcgacuucaacgggggcaagaucuccgugcaguacaaccugagccacuccuacgccggggacgcggccaaccacugcggcacgguggccaacgggguccugcagaccuucaugcggauggccuggggcggcagcuacaucgcgcucgacuccgggcgcggcaacugggacugcaucaugaccagcuaccaguaccugaucauccagaacaccacgugggaggaccacugccaguucucccggcccagccccaucggguaccugggccuccugucccagcgcacccgggacaucuacaucagccgccggcugcucggcaccuucaccuggacgcugagcgacuccgagggggaggacaccccgggcggguacugccugacccgcuggaugcucaucgaggccgagcugaagugcuucggcaacaccgccguggccaagugcaacgagaagcacgacgaggaguucugcgacaugcugcggcuguucgacuucaacaagcaggccauccagcgccugaaggcggaggcccagaugagcauccagcugaucaacaaggccgugaacgcccucaucaacgaccagcugaucaugaagaaccaccuccgggacaucauggggauccccuacugcaacuacuccaaguacugcuaccucaaccacacgaccaccggccgcaccagccugcccaagugcugccuggucuccaacggcagcuaccucaacgagacgcacuucuccgacgacaucgagcagcaggccgacaacaugaucaccgagaugcugcagaaggaguacauggagcggcaggggaagacgccccugggccugguggaccucuucguguucagcaccuccuucuaccugaucagcaucuuccugcaccucgucaagaucccgacccaccgccacaucguggggaaguccugccccaagccccaccggcugaaccacaugggcaucugcagcugcgggcuguacaagcagcccggcgugccggucaaguggaagcgcugaggacuaguaauaaggaaacuguaugaaugucugugggcaggaagugaagagauccuucuguaaagguuuuuggaauuaugucugcugaauaauaaacuuuuuugaaauaauaaaucugguagaaaaaugagaucucaaaggcucuuuucagagccaccaaaaaaaaaaaaaaaaaaaaaaaaaaaaaaaaaaaaaaaaaaaaaaaaaaaaaaaaaaaaaaaaagaauu

SEQ ID NO: 39201 - RNA, 1781 nt, Artificial Sequence
  mRNA product Design b-4 (hSL-A64-N5) comprising derived and/or modified sequence from LASV(LM765-SLE-2012;Clade IV)__AIT17814__GPCmut11 (opt1)
aggagagucccgcagucggcguccagcggcucugcuuguucgugugugugucguugcaggccuuauucaagcuuaccaugggccagaucgugaccuucuuccaggaggucccccacgugaucgaggaggugaugaacaucguccugaucgcccucagcauccuggccgugcugaaggggcucuacaacuucgcgaccugcggccugguggggcuggucacguuccuccugcugugcggccgcuccugcaccaccagccucuacaaggggguguacgagcugcagacccuggagcucaacauggagacgcugaacaugaccaugccgcuguccugcaccaagaacaacagccaccacuacaucauggugggcaacgagaccggccucgagcugacgcugaccaacaccuccaucaucgaccacaaguucugcaaccucagcgacgcccaccggaagaaccuguacgaccacgcccugauguccaucaucagcaccuuccaccucuccauccccaacuucaaccaguacgaggccaugagcugcgacuucaacgggggcaagaucuccguccaguacaaccugagccacuccuacgccaaggacgcggccgaccacugcgggacgguggccaacggcgugcugcagaccuucaugcgcauggccuggggcgggagcuacaucgcgcucgacuccggccgggggcgcugggacugcaucaugaccagcuaccaguaccugaucauccagaacaccacgugggaggaccacugccaguucucccggcccagccccaucggcuaccuggggcuccugucccagcgcacccgggacaucuacaucagccgccggcugcucggcaccuucaccuggacgcugagcgacuccgagggcaaggacacccccgggggcuacugccugacccgcuggaugcucaucgaggccgagcugaagugcuucgggaacaccgccgucgccaagugcaacgagaagcacgacgaggaguucugcgacaugcugcggcuguucgacuucaacaagcaggccauccagcgccugaaggcggaggcccagaugagcauccagcugaucaacaaggccgugaacgcccucaucaacgaccagcugaucaugaagaaccaccuccgggacaucaugggcauccccuacugcaacuacuccaaguacugcuaccucaaccacacgaccaccgggaagaccagccugcccaagugcugccugguguccaacggcagcuaccucaacgagacgcacuucuccgacgacaucgagcagcaggccgacaacaugaucaccgagaugcugcagaaggaguacauggagcgccagggcaagaccccgcuggggcuggucgaccucuucguguucagcaccuccuucuaccugaucagcaucuuccugcaccucgugaagaucccgacgcaccggcacaucgucggcaagcccugccccaagccccaccgccugaaccacauggggaucugcuccugcggccuguacaagcagccgggggugcccgugaaguggaagcggugaggacuaguaauaaggaaacuguaugaaugucugugggcaggaagugaagagauccuucuguaaagguuuuuggaauuaugucugcugaauaauaaacuuuuuugaaauaauaaaucugguagaaaaaugagaucucaaaggcucuuuucagagccaccaaaaaaaaaaaaaaaaaaaaaaaaaaaaaaaaaaaaaaaaaaaaaaaaaaaaaaaaaaaaaaaaagaauu

SEQ ID NO: 39202 - RNA, 1781 nt, Artificial Sequence
  mRNA product Design b-4 (hSL-A64-N5) comprising derived and/or modified sequence from LASV(LM776-SLE-2012;Clade IV)__AIT17824__GPCmut11 (opt1)
aggagagucccgcagucggcguccagcggcucugcuuguucgugugugugucguugcaggccuuauucaagcuuaccaugggccagaucgugaccuucuuccaggaggucccccacgugaucgaggaggugaugaacaucguccugaucgcccucagcauccuggccgugcugaaggggcucuacaacuucgcgaccugcggccugguggggcuggucacguuccuccugcugugcggccgcuccugcaccaccagcguguacaaggggguguacgagcuccagacccuggagcugaacauggagacgcucaacaugaccaugccgcuguccugcaccaagaacaacagccaccacuacaucauggucggcaacgagaccggccuggagcucacgcugaccaacaccuccaucaucaaccacaaguucugcaaccugagcgacgcccacaagaagaaccucuacgaccacgcccugauguccaucaucagcaccuuccaccuguccauccccaacuucaaccaguacgaggccaugagcugcgacuucaacgggggcaagaucuccgugcaguacaaccucagccacuccuacgccggggacgcggccaaccacugcggcacgguggccaacgggguccugcagaccuucaugcggauggccuggggcggcagcuacaucgcgcuggacuccgggcacggcaagugggacugcaucaugaccagcuaccaguaccucaucauccagaacaccacgugggaggaccacugccaguucucccgccccagccccaucggguaccugggccugcucucccagcggacccgcgacaucuacaucagccggcgccugcugggcaccuucaccuggacgcucagcgacuccgaggggaaggacaccccgggcggguacugccugacccgguggaugcugaucgaggccgagcucaagugcuucggcaacaccgccguggccaagugcaacgagaagcacgacgaggaguucugcgacaugcugcgccuguucgacuucaacaagcaggccauccagcggcucaaggcggaggcccagaugagcauccagcugaucaacaaggccgugaacgcccugaucaacgaccagcucaucaugaagaaccaccuccgcgacaucauggggauccccuacugcaacuacuccaaguacugcuaccugaaccacacgaccaccggcaagaccagccugcccaagugcugccuggucuccaacggcagcuaccugaacgagacgcacuucuccgacgacaucgagcagcaggccgacaacaugaucaccgagaugcuccagaaggaguacauggagcggcaggggaagacgccccugggccugguggaccuguucguguucagcaccuccuucuaccucaucagcaucuuccugcaccuggucaagaucccgacccaccgccacaucguggggaaguccugccccaagccccaccggcucaaccacaugggcaucugcagcugcgggcuguacaagcagcccggcgugccgguccgcuggaagcggugaggacuaguaauaaggaaacuguaugaaugucugugggcaggaagugaagagauccuucuguaaagguuuuuggaauuaugucugcugaauaauaaacuuuuuugaaauaauaaaucugguagaaaaaugagaucucaaaggcucuuuucagagccaccaaaaaaaaaaaaaaaaaaaaaaaaaaaaaaaaaaaaaaaaaaaaaaaaaaaaaaaaaaaaaaaaagaauu

SEQ ID NO: 39203 - RNA, 1781 nt, Artificial Sequence
  mRNA product Design b-4 (hSL-A64-N5) comprising derived and/or modified sequence from LASV(Mad39;Clade IV)__ANH09722__GPCmut11 (opt1)
aggagagucccgcagucggcguccagcggcucugcuuguucgugugugugucguugcaggccuuauucaagcuuaccaugggccagaucgugaccuucuuccaggaggucccccacgugaucgaggaggugaugaacaucguccugaucgcccucagcauccuggccgugcugaaggggcucuacaacguggcgaccugcggccugaucgggcuggucacguuccuccugcugugcggccgcuccugcaccaccacccucuacaaggggguguacgagcugcaggcccuggagcucaacauggagacgcugaacaugaccaugccgcugagcugcaccaagaacaacucccaccacuacauccgggugggcaacgagaccggccucgagcugacgcugaccaacaccagccucaucaaccacaaguucugcaaccuguccgacgcccacaagaagaaccuguacgaccacgcccucaugagcaucaucuccaccuuccaccugagcauccccaacuucaaccaguacgaggccauguccugcgacuucaacgacgggaagaucagcguccaguacaaccugucccacacguacgcgggcgacaccgccaaccacugcgggaccguggccaacggcgugcuccagaccuucaugcgcauggccuggggcgggagcuacaucgcgcuggacuccggccgcgggggcugggacugcaucaugacgagcuaccaguaccugaucauccagaacaccaccugggaggaccacugccaguucucccggcccagccccaucggguaccucggccugcugucccagcggacccgcgacaucuacaucagccggcgccuccugggcacguucaccuggacccuguccgacagcgaggggaaggacaccccgggcggguacugccucacgcgguggaugcugaucgaggccgagcugaagugcuucggcaacaccgccgucgccaagugcaacgagaagcacgacgaggaguucugcgacaugcuccgccuguucgacuucaacaagcaggccauccagcggcugaaggcggaggcccagaugagcauccagcucaucaacaaggccgugaacgcccugaucaacgaccagcugaucaugaagaaccaccuccgcgacaucauggggauccccuacugcaacuacuccaaguacugcuaccugaaccacaccgugaccggcaagacgagccugcccaagugcugccucgucuccaacggcagcuaccugaacgagacccacuucuccgacgacaucgagcagcaggccgacaacaugaucaccgagaugcugcagaaggaguacauggagcggcaggggaagacgccccugggccucguggaccuguucguguucagcaccuccuucuaccugaucagcaucuuccuccaccuggucaagaucccgacccaccgccacgugguggggaagcccugccccaagccccaccggcugaaccacaugggcaucugcuccugcggguucuacaagcagccgggcguccccgugcgcuggaagcggugaggacuaguaauaaggaaacuguaugaaugucugugggcaggaagugaagagauccuucuguaaagguuuuuggaauuaugucugcugaauaauaaacuuuuuugaaauaauaaaucugguagaaaaaugagaucucaaaggcucuuuucagagccaccaaaaaaaaaaaaaaaaaaaaaaaaaaaaaaaaaaaaaaaaaaaaaaaaaaaaaaaaaaaaaaaaagaauu

SEQ ID NO: 39204 - RNA, 1781 nt, Artificial Sequence
  mRNA product Design b-4 (hSL-A64-N5) comprising derived and/or modified sequence from LASV(Z0947-SLE-2011;Clade IV)__AIT17840__GPCmut11 (opt1)
aggagagucccgcagucggcguccagcggcucugcuuguucgugugugugucguugcaggccuuauucaagcuuaccaugggccagaucgugaccuucuuccaggaggucccccacgugaucgaggaggugaugaacaucguccugaucgcccucagcauccuggccgugcugaaggggcucuacaacuucgcgaccugcggccugguggggcuggucacguuccuccugcugugcggccgcuccugcaccaucagccucuacaaggggguguacgagcugcagacccuggagcucaacauggagacccugaacaugacgaugccgcuguccugcaccaagaacaacagccaccacuacaucauggugggcaacgagaccggccucgagcugacccugacgaacaccuccaucaucaaccacaaguucugcaaccucagcgacgcccacaagaagaaccuguacgaccacgcccugauguccaucaucagcaccuuccaccucuccauccccaacuucaaccaguacgaggccaugagcugcgacuucaacgggggcaagaucuccguccaguacaaccugagccacuccuacgccggggacgcggccaaccacugcggcaccguggccaacggggugcugcagacguucaugcggauggccuggggcggcagcuacaucgcgcucgacuccgggcgcgaccggugggacugcaucaugaccagcuaccaguaccugaucauccagaacaccaccugggaggaccacugccaguucucccgccccagccccaucggcuaccuggggcuccugucccagcggacgcgcgacaucuacaucagccggcgccugcucggcaccuucaccuggacccugagcgacuccgagggcaaggacacgcccgggggcuacugccugacccgguggaugcucaucgaggccgagcugaagugcuucgggaacaccgccgucgccaagugcaacgagaagcacgacgaggaguucugcgacaugcugcgccucuucgacuucaacaagcaggccauccagcggcugaaggcggaggcccagaugagcauccagcugaucaacaaggccgugaacgcccucaucaacgaccagcugaucaugaagaaccaccuccgcgacaucaugggcauccccuacugcaacuacuccaaguacugcuaccugaaccacaccacgaccgggaagaccagccugcccaagugcugccugguguccaacggcagcuaccucaacgagacccacuucuccgacgacaucgagcagcaggccgacaacaugaucacggagaugcugcagaaggaguacauggagcggcagggcaagaccccgcuggggcuggucgaccucuucguguucagcaccuccuucuaccugaucagcaucuuccugcaccucgugaagaucccgacccaccgccacaucgucggcaagcccugccccaagccccaccggcugaaccacauggggaucugcuccugcggccuguacaagcagccgggggugcccgugaaguggaagcgcugaggacuaguaauaaggaaacuguaugaaugucugugggcaggaagugaagagauccuucuguaaagguuuuuggaauuaugucugcugaauaauaaacuuuuuugaaauaauaaaucugguagaaaaaugagaucucaaaggcucuuuucagagccaccaaaaaaaaaaaaaaaaaaaaaaaaaaaaaaaaaaaaaaaaaaaaaaaaaaaaaaaaaaaaaaaaagaauu

SEQ ID NO: 39205 - RNA, 1781 nt, Artificial Sequence
  mRNA product Design b-4 (hSL-A64-N5) comprising derived and/or modified sequence from LASV(Josiah;Clade IV)__NP_694870__GPCmut11 (opt4)
aggagagucccgcagucggcguccagcggcucugcuuguucgugugugugucguugcaggccuuauucaagcuuaccaugggccagaucgugaccuucuuccaggaggugccccacgugaucgaggaggugaugaacaucgugcugaucgcccugagcgugcuggccgugcugaagggccuguacaacuucgccaccugcggccuggugggccuggugaccuuccugcugcugugcggcagaagcugcaccaccagccuguacaagggcguguacgagcugcagacccuggagcugaacauggagacccugaacaugaccaugccccugagcugcaccaagaacaacagccaccacuacaucauggugggcaacgagaccggccuggagcugacccugaccaacaccagcaucaucaaccacaaguucugcaaccugagcgacgcccacaagaagaaccuguacgaccacgcccugaugagcaucaucagcaccuuccaccugagcauccccaacuucaaccaguacgaggccaugagcugcgacuucaacggcggcaagaucagcgugcaguacaaccugagccacagcuacgccggcgacgccgccaaccacugcggcaccguggccaacggcgugcugcagaccuucaugagaauggccuggggcggcagcuacaucgcccuggacagcggcagaggcaacugggacugcaucaugaccagcuaccaguaccugaucauccagaacaccaccugggaggaccacugccaguucagcagacccagccccaucggcuaccugggccugcugagccagagaaccagagacaucuacaucagcagaagacugcugggcaccuucaccuggacccugagcgacagcgagggcaaggacacccccggcggcuacugccugaccagauggaugcugaucgaggccgagcugaagugcuucggcaacaccgccguggccaagugcaacgagaagcacgacgaggaguucugcgacaugcugagacuguucgacuucaacaagcaggccauccagagacugaaggccgaggcccagaugagcauccagcugaucaacaaggccgugaacgcccugaucaacgaccagcugaucaugaagaaccaccugagagacaucaugggcauccccuacugcaacuacagcaaguacugcuaccugaaccacaccaccaccggcagaaccagccugcccaagugcugccuggugagcaacggcagcuaccugaacgagacccacuucagcgacgacaucgagcagcaggccgacaacaugaucaccgagaugcugcagaaggaguacauggagagacagggcaagaccccccugggccugguggaccuguucguguucagcaccagcuucuaccugaucagcaucuuccugcaccuggugaagauccccacccacagacacaucgugggcaagagcugccccaagccccacagacugaaccacaugggcaucugcagcugcggccuguacaagcagcccggcgugcccgugaaguggaagagaugaggacuaguaauaaggaaacuguaugaaugucugugggcaggaagugaagagauccuucuguaaagguuuuuggaauuaugucugcugaauaauaaacuuuuuugaaauaauaaaucugguagaaaaaugagaucucaaaggcucuuuucagagccaccaaaaaaaaaaaaaaaaaaaaaaaaaaaaaaaaaaaaaaaaaaaaaaaaaaaaaaaaaaaaaaaaagaauu

SEQ ID NO: 39206 - RNA, 1778 nt, Artificial Sequence
  mRNA product Design b-4 (hSL-A64-N5) comprising derived and/or modified sequence from LASV(LP;Clade I)__AAF86701__GPCmut11 (opt4)
aggagagucccgcagucggcguccagcggcucugcuuguucgugugugugucguugcaggccuuauucaagcuuaccaugggccagaucaucaccuucuuccaggaggugccccacgugaucgaggaggugaugaacaucgugcugaucgcccugagccugcuggccauccugaagggccuguacaacaucgccaccugcggcaucaucggccugguggccuuccuguuccugugcggcaagagcugcagccugacccugaagggcggcuacgagcugcagacccuggagcugaacauggagacccugaacaugaccaugccccugagcugcaccaagaacagcagccaccacuacaucagagugggcaacgagaccggccuggagcugacccugaccaacaccagcaucaucaaccacaaguucugcaaccugagcgacgcccacaagaagaaccuguacgaccacgcccugaugagcaucaucagcaccuuccaccugagcauccccaacuucaaccaguacgaggccaugagcugcgacuucaacggcggcaagaucagcgugcaguacaaccugagccacagcuacgccggcgacgccgccgagcacugcggcaccguggccaacggcgugcugcagaccuucaugagaauggccuggggcggcagauacaucgcccuggacagcggcaagggcaacugggacugcaucaugaccagcuaccaguaccugaucauccagaacaccaccugggaggaccacugccaguucagcagacccagccccaucggcuaccugggccugcugagccagagaaccagagacaucuacaucagcagaagacugcugggcaccuucaccuggacccugagcgacagcgagggcaacgagacccccggcggcuacugccugaccagauggaugcugaucgaggccgagcugaagugcuucggcaacaccgccguggccaagugcaacgagaagcacgacgaggaguucugcgacaugcugagacuguucgacuucaacaagcaggccaucagaagacugaaggccgaggcccagaugagcauccagcugaucaacaaggccgugaacgcccugaucaacgaccagcugaucaugaagaaccaccugagagacaucaugggcauccccuacugcaacuacagcaaguacugcuaccugaaccacaccagcagcggcagaaccagccugcccaagugcugccugaucagcaacggcagcuaccugaacgagacccaguucagcgacgacaucgagcagcaggccgacaacaugaucaccgagaugcugcagaaggaguacaucgagagacagggcaagaccccccugggccugguggacaucuucaucuucagcaccagcuucuaccugaucagcaucuuccugcaccugaucaagauccccacccacagacacaucgugggcaagcccugccccaagccccacagacugaaccacaugggcgugugcagcugcggccuguacaagcaccccggcgugcccaccaaguggaagagaugaggacuaguaauaaggaaacuguaugaaugucugugggcaggaagugaagagauccuucuguaaagguuuuuggaauuaugucugcugaauaauaaacuuuuuugaaauaauaaaucugguagaaaaaugagaucucaaaggcucuuuucagagccaccaaaaaaaaaaaaaaaaaaaaaaaaaaaaaaaaaaaaaaaaaaaaaaaaaaaaaaaaaaaaaaaaagaauu

SEQ ID NO: 39207 - RNA, 1778 nt, Artificial Sequence
  mRNA product Design b-4 (hSL-A64-N5) comprising derived and/or modified sequence from LASV(803213;Clade II)__AAF86703__GPCmut11 (opt4)
aggagagucccgcagucggcguccagcggcucugcuuguucgugugugugucguugcaggccuuauucaagcuuaccaugggccagaucaucaccuucuuccaggaggugccccacgugaucgaggaggugaugaacaucgugcugaucgcccugagccugcuggccauccugaagggcaucuacaacguggccaccugcggccuguucggccugaucagcuuccugcugcugugcggcagaagcugcagcgugaccuacaagggcguguacgagcugcagacccuggagcugaacauggccaaccugaacaugaccaugccccugagcugcaccaagaacaacagccaccacuacaucauggugggcaacgagaccggccuggagcugacccugaccaacaccagcaucaucaaccacaaguucugcaaccugagcgacgcccacaagaagaaccuguacgaccacgcccugaugagcaucaucagcaccuuccaccugagcauccccaacuucaaccaguacgaggccaugagcugcgacuucaacggcggcaagaucagcgugcaguacaaccugagccacagcuucgccguggacgccgccaaccacugcggcaccaucgccaacggcgugcugcagaccuucaugagaauggccuggggcggcagcuacaucgcccuggacagcggcaagggcaacugggacugcaucaugaccagcuaccaguaccugaucauccagaacaccaccugggaggaccacugccaguucagcagacccagccccaucggcuaccugggccugcugagccagagaaccagagacaucuacaucagcagaagacugcugggcaccuucaccuggacccugagcgacagcgagggcaacgaggcccccggcggcuacugccugaccagauggaugcugaucgaggccgagcugaagugcuucggcaacaccgccguggccaagugcaacgagaagcacgacgaggaguucugcgacaugcugagacuguucgacuucaacaagcaggccaucaagagacugaagaccgaggcccagaugagcauccagcugaucaacaaggccgugaacgcccugaucaacgaccagcugaucaugaagaaccaccugagagacaucaugggcauccccuacugcaacuacagcagauacugcuaccugaaccacaccgugaccggcaagaccagccugcccagaugcugccuggugagcaacggcagcuaccugaacgagacccacuucagcgacgacaucgagcagcaggccgacaacaugaucaccgagaugcugcagaaggaguacauggacagacagggcaagaccccccugggccugguggaccuguucguguucagcaccagcuucuaccugaucagcaucuuccugcaccuggugaagauccccacccacagacacaucgugggcaagcccugccccaagccccacagacugaaccacaugggcaucugcagcugcggccuguacaagcaccccggcgugcccgugaaguggaagagaugaggacuaguaauaaggaaacuguaugaaugucugugggcaggaagugaagagauccuucuguaaagguuuuuggaauuaugucugcugaauaauaaacuuuuuugaaauaauaaaucugguagaaaaaugagaucucaaaggcucuuuucagagccaccaaaaaaaaaaaaaaaaaaaaaaaaaaaaaaaaaaaaaaaaaaaaaaaaaaaaaaaaaaaaaaaaagaauu

SEQ ID NO: 39208 - RNA, 1778 nt, Artificial Sequence
  mRNA product Design b-4 (hSL-A64-N5) comprising derived and/or modified sequence from LASV(GA391;Clade III)__CAA36645__GPCmut11 (opt4)
aggagagucccgcagucggcguccagcggcucugcuuguucgugugugugucguugcaggccuuauucaagcuuaccaugggccagaucgugaccuucuuccaggaggugccccacgugaucgaggaggugaugaacaucgugcugaucgcccugagcauccuggccauccugaagggccuguacaacguggccaccugcggccugaucggccuggugaccuuccugcugcugagcggcagaagcugcagccugaucuacaagggcaccuacgagcugcagacccuggagcugaacauggagacccugaacaugaccaugccccugagcugcaccaagaacaacagccaccacuacaucagagugggcaacgagaccggccuggagcugacccugaccaacaccagcauccugaaccacaaguucugcaaccugagcgacgcccacaagagaaaccuguacgaccacagccugaugagcaucaucagcaccuuccaccugagcauccccaacuucaaccaguacgaggccaugagcugcgacuucaacggcggcaagaucaccgugcaguacaaccugagccacagcuucgccguggacgccgccggccacugcggcacccuggccaacggcgugcugcagaccuucaugagaauggccuggggcggcagcuacaucgcccuggacagcggcagaggcaacugggacugcaucaugaccagcuaccaguaccugaucauccagaacaccaccugggacgaccacugccaguucagcagacccagccccaucggcuaccugggccugcugagccagagaaccagagacaucuacaucagcagaagacugcugggcaccuucaccuggacccugagcgacagcgagggcaacgagacccccggcggcuacugccugaccagauggaugcugaucgaggccgagcugaagugcuucggcaacaccgccguggccaagugcaacgagaagcacgacgaggaguucugcgacaugcugagacuguucgacuucaacaagcaggccaucagaagacugaagaccgaggcccagaugagcauccagcugaucaacaaggccgugaacgcccugaucaacgaccagcugaucaugaagaaccaccugagagacaucaugggcauccccuacugcaacuacagcagauacugcuaccugaaccacaccagcaccggcaagaccagccugcccagaugcugccugaucagcaacggcagcuaccugaacgagaccaaguucagcgacgacaucgagcagcaggccgacaacaugaucaccgagaugcugcagaaggaguacaucgacagacagggcaagaccccccugggccugguggaccuguucguguucagcaccagcuucuaccugaucagcaucuuccugcaccuggugaagauccccacccacagacacaucgugggcaagcccugccccaagccccacagacugaaccacaugggcaucugcagcugcggccuguacaagcagcccggcgugcccgugagauggaagagaugaggacuaguaauaaggaaacuguaugaaugucugugggcaggaagugaagagauccuucuguaaagguuuuuggaauuaugucugcugaauaauaaacuuuuuugaaauaauaaaucugguagaaaaaugagaucucaaaggcucuuuucagagccaccaaaaaaaaaaaaaaaaaaaaaaaaaaaaaaaaaaaaaaaaaaaaaaaaaaaaaaaaaaaaaaaaagaauu

SEQ ID NO: 39209 - RNA, 1781 nt, Artificial Sequence
  mRNA product Design b-4 (hSL-A64-N5) comprising derived and/or modified sequence from LASV(AV;Clade V)__CCA30314__GPCmut11 (opt4)
aggagagucccgcagucggcguccagcggcucugcuuguucgugugugugucguugcaggccuuauucaagcuuaccaugggccagaucgugaccuucuuccaggaggugccccacgugaucgaggaggugaugaacaucgugcugaucgcccugagcauccuggccgugcugaagggccuguacaacaucgccaccugcggccugaucggccugaucaccuuccugcugcugugcggcagaagcugcagcagcaaccuguacaagggcguguacgagcugcagagccuggaccugaacauggagacccugaacaugaccaugccccugagcugcaccaagaacaacagccaccacuacaucagagugggcaacgacaccggccuggagcugacccugaccaacaccagcauccugaaccacaaguucugcaaccugagcgacgcccacaagaaggaccuguacgaccacgcccugaugagcaucaucagcaccuuccaccugagcauccccaacuucaaccaguacgaggccaugagcugcgacuucaacggcggcaagaucagcgugcaguacaaccugagccacagcuacgccaucgacgccgccaaccacugcggcaccguggccaacggcauccugcagaccuucaugagaauggccuggggcggcagcuacaucgcccuggacagcggcagaggcaacugggacugcaucaugaccagcuaccaguaccugaucauccagaacaccaccugggagaaccacugccaguucagcagacccagccccaucggcuaccugggccugcugagccagagaaccagagacaucuacaucagcagaagacugcugggcaccuucaccuggacccugagcgacagcgagggcaacgccacccccggcggcuacugccugaccagauggaugcugaucgaggccgagcugaagugcuucggcaacaccgccguggccaagugcaacgagaagcacgacgaggaguucugcgacaugcugagacuguucgacuucaacaagcaggccaucagcagacugaagagcgaggcccagaugagcauccagcugaucaacaaggccgugaacgcccugaucaacgaccagcugaucaugaagaaccaccugagagacaucaugggcauccccuacugcaacuacagcaaguacugcuaccugaaccacaccaucaccggcaagaccagccugcccaagugcugccuggugagcaacggcagcuaccugaacgagacccacuucagcgacgacaucgagcagcaggccgacaacaugaucaccgagaugcugcagaaggaguacauggagagacagggcaagaccccccugggccugguggaccuguucguguucagcaccagcuucuaccugaucagcaucuuccugagacuggugaagauccccacccacagacacaucgugggcaagcccugccccaagccccacagacugaaccacaugggcaucugcagcugcggccuguacaagcagcccggcgugcccgugagauggaagagaugaggacuaguaauaaggaaacuguaugaaugucugugggcaggaagugaagagauccuucuguaaagguuuuuggaauuaugucugcugaauaauaaacuuuuuugaaauaauaaaucugguagaaaaaugagaucucaaaggcucuuuucagagccaccaaaaaaaaaaaaaaaaaaaaaaaaaaaaaaaaaaaaaaaaaaaaaaaaaaaaaaaaaaaaaaaaagaauu

SEQ ID NO: 39210 - RNA, 1778 nt, Artificial Sequence
  mRNA product Design b-4 (hSL-A64-N5) comprising derived and/or modified sequence from LASV(Togo/2016/7082;Clade VI)__AMR44577__GPCmut11 (opt4)
aggagagucccgcagucggcguccagcggcucugcuuguucgugugugugucguugcaggccuuauucaagcuuaccaugggccagaucaucaccuucuuccaggaggugccccacgugaucgaggaggugaugaacaucgugcugaucgcccugagccugcuggccauccugaagggcguguacaacguggccaccugcggcaucaucggccuggugaccuuccuguuccugugcggcagaagcugcagccugaucuacaagggcagcuacgagcugcagacccuggagcugaacauggagacccugaacaugaccaugccccugagcugcaccaagaacagcagccaccacuacaucagagugggcaacgagaccggccuggagcugacccugaccaacaccagcaucaucaaccacaaguucugcaaccugagcgacgcccacaagagaaaccuguacgaccacgcccugaugagcauccugagcaccuuccaccugagcauccccaacuucaaccaguacgaggccaugagcugcgacuucaacggcggcaagaucagcgugcaguacaaccugagccacgccuacgccguggacgccgccgagcacugcggcaccguggccaacggcgugcugcagaccuucaugagaauggccuggggcggcagcuacaucgcccuggacagcggcagaggcaacugggacugcaucaugaccagcuaccaguaccugaucauccagaacaccaccugggaggaccacugccaguucagcagacccagccccaucggcuaccugggccugcugagccagagaaccagagacaucuacaucagcagaagacugcugggcaccuucaccuggacccugagcgacagcgagggcaacgagacccccggcggcuacugccugaccagauggaugcugaucgaggccgagcugaagugcuucggcaacaccgccguggccaagugcaacgagaagcacgacgaggaguucugcgacaugcugagacuguucgacuucaacaagcaggccauccagagacugaagagcgaggcccagaugagcauccagcugaucaacaaggccgugaacgcccugaucaacgaccagcugaucaugaagaaccaccugagagacaugaugggcauccccuacugcaacuacagcaaguacugcuaccugaaccacaccagcagcggcagaaccagccugcccaagugcugccuggugagcaacggcagcuaccugaacgagacccacuucagcgacgacaucgagcagcaggccgacaacaugaucaccgagaugcugcagaaggaguacaucgacagacagggcaagaccccccugggccugguggaccuguucguguucagcaccagcuucuaccugaucagcaucuuccugcaccugaucaagauccccacccacagacacaucgugggcaagcccugccccaagccccacagacugaaccacaugggcaucugcagcugcggccuguacaagcagcccggcgugcccaccagauggaagagaugaggacuaguaauaaggaaacuguaugaaugucugugggcaggaagugaagagauccuucuguaaagguuuuuggaauuaugucugcugaauaauaaacuuuuuugaaauaauaaaucugguagaaaaaugagaucucaaaggcucuuuucagagccaccaaaaaaaaaaaaaaaaaaaaaaaaaaaaaaaaaaaaaaaaaaaaaaaaaaaaaaaaaaaaaaaaagaauu

SEQ ID NO: 39211 - RNA, 1778 nt, Artificial Sequence
  mRNA product Design b-4 (hSL-A64-N5) comprising derived and/or modified sequence from LASV(KAK-428;Clade n.d. (VII))__ANH09740__GPCmut11 (opt4)
aggagagucccgcagucggcguccagcggcucugcuuguucgugugugugucguugcaggccuuauucaagcuuaccaugggccagaucgugaccuucuuccaggaggugccccacgugaucgaggaggugaugaacaucgugcugaucgcccugagccugcuggccauccugaagggccuguacaacuucgccaccugcggcgugaucggccugaucaccuuccugcugcugugcggcagaagcugcagcgccaccuacaagggccaguacgagcugcagacccuggagcugaacauggagagccugaacaugaccaugccccugagcugcaccaagaacaacagccaccacuacaucagagccggcaacaacaccggccuggagcugacccugaccaacaccagcaucaucagccacaaguucugcaaccugagcgacgcccacaagaagaaccuguacgaccacacccugaugagcaucaucaccaccuuccaccugagcauccccaacuucaaccaguacgaggccaugagcugcgacuucaacggcggcaagaucagcauccaguacaaccugagccacagcuacgccggcgacgccgcccagcacugcggcaccguggccaacggcgugcugcagaccuucaugagaauggccuggggcggcagcuaccuggcccuggacagcggcagaagaggcugggacugcaucaucagcagcuaccaguaccugaucauccagaacaccaccugggacgaccacugccaguucagcagacccagccccaucggcuaccugggcuucgugagccagaagaccagagacaucuacaucagcagaagacugcugggcaccuucaccuggacccugagcgacagcgagggccacgacaugcccggcggcuacugccugaccagauggaugcugaucgaggccgaccugaagugcuucggcaacaccgccguggccaagugcaacgagaagcacgacgaggaguucugcgacauguggagacuguucgacuucaacaagcaggccauccagagacugaaggccgaggcccagaugaacauccagcugaucaacaaggccgugaacgcccugaucaacgaccagcugaugaugaagaaccaccugagagacaucaugggcauccccuacugcaacuacagcaaguucugcuaccugaacaacaccaccaccggcagaaccagccugcccagaugcugccugaucagcaacggcagcuaccugaacgagacccacuucagcgacgacaucgagcagcaggccgacaacaugaucaccgagaugcugcagaaggaguacauggacagacagggcaagaccccccugggccugguggaccuguucguguucagcaccagcuucuaccugaucaccaucuuccugcaccuggugaagauccccacccacagacacaucgugggcaagcccugccccaagccccacagacugaaccacaugggcaucugcagcugcggccuguacaagcagcccggcgugcccgugagauggaagagaugaggacuaguaauaaggaaacuguaugaaugucugugggcaggaagugaagagauccuucuguaaagguuuuuggaauuaugucugcugaauaauaaacuuuuuugaaauaauaaaucugguagaaaaaugagaucucaaaggcucuuuucagagccaccaaaaaaaaaaaaaaaaaaaaaaaaaaaaaaaaaaaaaaaaaaaaaaaaaaaaaaaaaaaaaaaaagaauu

SEQ ID NO: 39212 - RNA, 1778 nt, Artificial Sequence; identical to SEQ ID NO: 39206
  mRNA product Design b-4 (hSL-A64-N5) comprising derived and/or modified sequence from LASV(Pinneo-NIG-1969;Clade I)__AIT17836__GPCmut11 (opt4)

SEQ ID NO: 39213 - RNA, 1778 nt, Artificial Sequence
  mRNA product Design b-4 (hSL-A64-N5) comprising derived and/or modified sequence from LASV(ISTH0009-NIG-2011;Clade II)__AIT17404__GPCmut11 (opt4)
aggagagucccgcagucggcguccagcggcucugcuuguucgugugugugucguugcaggccuuauucaagcuuaccaugggccagaucaucaccuucuuccaggaggugccccacgugaucgaggaggugaugaacaucgugcugaucgcccugagccugcuggccauccugaagggcaucuacaacguggccaccugcggccuguucggccuggugagcuuccugcugcugugcggcagaagcugcagcaccaccuacaagggcguguacgagcugcagacccuggagcuggacauggccagccugaacaugaccaugccccugagcugcaccaagaacaacagccaccacuacaucauggugggcaacgagaccggccuggagcugacccugaccaacaccagcaucaucaaccacaaguucugcaaccugagcgacgcccacaagaagaaccuguacgaccacgcccugaugagcaucaucagcaccuuccaccugagcauccccaacuucaaccaguacgaggccaugagcugcgacuucaacggcggcaagaucagcgugcaguacaaccugagccacgccuacgccguggacgccgccaaccacugcggcaccaucgccaacggcgugcugcagaccuucaugagaauggccuggggcggcagcuacaucgcccuggacagcggcaagggcagcugggacugcaucaugaccagcuaccaguaccugaucauccagaacaccaccugggaggaccacugccaguucagcagacccagccccaucggcuaccugggccugcugagccagagaaccagagacaucuacaucagcagaagacugcugggcaccuucaccuggacccugagcgacagcgagggcaacgagacccccggcggcuacugccugaccagauggaugcugaucgaggccgagcugaagugcuucggcaacaccgccguggccaagugcaacgagaagcacgacgaggaguucugcgacaugcugagacuguucgacuucaacaagcaggccaucagaagacugaagaccgaggcccagaugagcauccagcugaucaacaaggccgugaacgcccugaucaacgaccagcugaucaugaagaaccaccugagagacaucaugggcauccccuacugcaacuacagcaaguacugcuaccugaaccacaccgugaccggcaagaccagccugcccagaugcugccuggugagcaacggcagcuaccugaacgagacccacuucagcgacgacaucgagcagcaggccgacaacaugaucaccgagcugcugcagaaggaguacauggacagacagggcaagaccccccugggccugguggaccuguucguguucagcaccagcuucuaccugaucagcaucuuccugcaccugaucaagauccccacccacagacacaucaccggcaagcccugccccaagccccacagacugaaccacaugggcaucugcagcugcggccuguacaagcaccccggcgugcccgugaaguggaagagaugaggacuaguaauaaggaaacuguaugaaugucugugggcaggaagugaagagauccuucuguaaagguuuuuggaauuaugucugcugaauaauaaacuuuuuugaaauaauaaaucugguagaaaaaugagaucucaaaggcucuuuucagagccaccaaaaaaaaaaaaaaaaaaaaaaaaaaaaaaaaaaaaaaaaaaaaaaaaaaaaaaaaaaaaaaaaagaauu

SEQ ID NO: 39214 - RNA, 1778 nt, Artificial Sequence
  mRNA product Design b-4 (hSL-A64-N5) comprising derived and/or modified sequence from LASV(ISTH2010-NIG-2012;Clade II)__AIT17482__GPCmut11 (opt4)
aggagagucccgcagucggcguccagcggcucugcuuguucgugugugugucguugcaggccuuauucaagcuuaccaugggccagaucaucaccuucuuccaggaggugccccacgugaucgaggaggugaugaacaucgugcugaucgcccugagccugcuggccauccugaagggcaucuacaacguggccaccugcggccuguucggccuggugagcuuccugcugcugugcggcagaagcugcagcaccaccuacaagggcguguacgagcugcagacccuggagcuggacauggccagccugaacaugaccaugccccugagcugcaccaagaacaacagccaccacuacaucauggugggcaacgagaccggccuggagcugacccugaccaacaccagcaucaucaaccacaaguucugcaaccugagcgacgcccacaagaagaaccuguacgaccacgcccugaugagcaucaucagcaccuuccaccugagcauccccaacuucaaccaguacgaggccaugagcugcgacuucaacggcggcaagaucagcgugcaguacaaccugagccacgccuacgccguggacgccgccaaccacugcggcaccaucgccaacggcgugcugcagaccuucaugagaauggccuggggcggcagcuacaucgcccuggacagcggcaagggcagcugggacugcaucaugaccagcuaccaguaccugaucauccagaacaucaccugggaggaccacugccaguucagcagacccagccccaucggcuaccugggccugcugagccagagaaccagagacaucuacaucagcagaagacugcugggcaccuucaccuggacccugagcgacagcgagggcaacgagacccccggcggcuacugccugaccagauggaugcugaucgaggccgagcugaagugcuucggcaacaccgccguggccaagugcaacgagaagcacgacgaggaguucugcgacaugcugagacuguucgacuucaacaagcaggccaucagaagacugaagaccgaggcccagaugagcauccagcugaucaacaaggccgugaacgcccugaucaacgaccagcugaucaugaagaaccaccugagagacaucaugggcauccccuacugcaacuacagcaaguacugcuaccugaaccacaccgugaccggcaagaccagccugcccagaugcugccuggugagcaacggcagcuaccugaacgagacccacuucagcgacgacaucgagcagcaggccgacaacaugaucaccgagcugcugcagaaggaguacaucgacagacagggcaagaccccccugggccugguggaccuguucguguucagcaccagcuucuaccugaucagcaucuuccugcaccuggugaagauccccacccacagacacguggugggcaagcccugccccaagccccacagacugaaccacaugggcaucugcagcugcggccuguacaagcaccccggcgugcccgugaaguggaagagaugaggacuaguaauaaggaaacuguaugaaugucugugggcaggaagugaagagauccuucuguaaagguuuuuggaauuaugucugcugaauaauaaacuuuuuugaaauaauaaaucugguagaaaaaugagaucucaaaggcucuuuucagagccaccaaaaaaaaaaaaaaaaaaaaaaaaaaaaaaaaaaaaaaaaaaaaaaaaaaaaaaaaaaaaaaaaagaauu

SEQ ID NO: 39215 - RNA, 1778 nt, Artificial Sequence
  mRNA product Design b-4 (hSL-A64-N5) comprising derived and/or modified sequence from LASV(Lassa virus/H.sapiens-wt/NGA/2015/ISTH_0543;Clade II)__AVO03639__GPCmut11 (opt4)
aggagagucccgcagucggcguccagcggcucugcuuguucgugugugugucguugcaggccuuauucaagcuuaccaugggccagaucaucaccuucuuccaggaggugccccacgugaucgaggaggugaugaacaucgugcugaucgcccugagccugcuggccauccugaagggcaucuacaacguggccaccugcggccuguucggccuggugagcuuccugcugcugugcggcagaagcugcagcaccaccuacaagggcguguacgagcugcagacccuggagcuggacauggccaaccugaacaugaccaugccccugagcugcaccaagaacaacagccaccacuacaucauggugggcaacgagaccggccuggagcugacccugaccaacaccagcaucaucaaccacaaguucugcaaccugagcgacgcccacaagaagaaccuguacgaccacgcccugaugagcaucaucagcaccuuccaccugagcauccccaacuucaaccaguacgaggccaugagcugcgacuucaacggcggcaagaucagcgugcaguacaaccugagccacaccuacgccguggacgccgccaaccacugcggcaccaucgccaacggcgugcugcagaccuucaugagaauggccuggggcggcagcuacaucgcccuggacagcggcaagggcagcugggacugcaucaugaccagcuaccaguaccuggugauccagaacaccaccugggaggaccacugccaguucagcagacccagccccaucggcuaccugggccugcugagccagagaaccagagacaucuacaucagcagaagacugcugggcaccuucaccuggacccugagcgacagcgagggcaacgagacccccggcggcuacugccugaccagauggaugcugaucgaggccgagcugaagugcuucggcaacaccgccguggccaagugcaacgagaagcacgacgaggaguucugcgacaugcugagacuguucgacuucaacaagcaggccaucagaagacugaagaccgaggcccagaugagcauccagcugaucaacaaggccgugaacgcccugaucaacgaccagcugaucaugaagaaccaccugagagacaucaugggcauccccuacugcaacuacagcaaguacugcuaccugaaccacaccgugaccggcaagaccagccugcccagaugcugccuggugagcaacggcagcuaccugaacgagacccacuucagcgacgacaucgagcagcaggccgacaacaugaucaccgagcugcugcagaaggaguacaucgacagacagggcaagaccccccugggccugguggaccuguucguguucagcaccagcuucuaccugaucagcaucuuccugcaccuggugaagauccccacccacagacacaucaccggcaagcccugccccaagccccacagacugaaccacaugggcaucugcagcugcggccuguacaagcaccccggcgugcccgugaaguggaagagaugaggacuaguaauaaggaaacuguaugaaugucugugggcaggaagugaagagauccuucuguaaagguuuuuggaauuaugucugcugaauaauaaacuuuuuugaaauaauaaaucugguagaaaaaugagaucucaaaggcucuuuucagagccaccaaaaaaaaaaaaaaaaaaaaaaaaaaaaaaaaaaaaaaaaaaaaaaaaaaaaaaaaaaaaaaaaagaauu

SEQ ID NO: 39216 - RNA, 1778 nt, Artificial Sequence
  mRNA product Design b-4 (hSL-A64-N5) comprising derived and/or modified sequence from LASV(Lassa virus/H.sapiens-wt/NGA/2016/ISTH_0009;Clade II)__AVO03571__GPCmut11 (opt4)
aggagagucccgcagucggcguccagcggcucugcuuguucgugugugugucguugcaggccuuauucaagcuuaccaugggccagaucaucaccuucuuccaggaggugccccacgugaucgaggaggugaugaacaucgugcugaucgcccugagccugcuggccauccugaagggcaucuacaacguggccaccugcggccugcugggccuggugagcuuccugcugcugugcggcagaagcugcagcaccaccuacaagggcguguacgagcugcagacccuggagcuggacauggccagccugaacaugaccaugccccugagcugcaccaagaacaacagccaccacuacaucauggugggcaacgagaccggccuggagcugacccugaccaacaccagcaucaucaaccacaaguucugcaaccugagcgacgcccacaagaagaaccuguacgaccacgcccugaugagcaucaucagcaccuuccaccugagcauccccaacuucaaccaguacgaggccaugagcugcgacuucaacggcggcagaaucagcgugcaguacaaccugagccacagcuacgccguggacgccgccaaccacugcggcaccaucgccaacggcgugcugcagaccuucaugagaauggccuggggcggcagcuacaucgcccuggacagcggcaagggcagcugggacugcaucaugaccagcuaccaguaccugaucauccagaacaccaccugggaggaccacugccaguucagcagacccagccccaucggcuaccugggccugcugagccagagaaccagagacaucuacaucagcagaagacugcugggcaccuucaccuggacccugagcgacagcgagggcaacgagacccccggcggcuacugccugaccagauggaugcugaucgaggccgagcugaagugcuucggcaacaccgccguggccaagugcaacgagaagcacgacgaggaguucugcgacaugcugagacuguucgacuucaacaagcaggccaucagaagacugaagaccgaggcccagaugagcauccagcugaucaacaaggccgugaacgcccugaucaacgaccagcugaucaugaagaaccaccugagagacaucaugggcauccccuacugcaacuacagcaaguacugcuaccugaaccacaccgugaccggcaagaccagccugcccagaugcugccuggugagcaacggcagcuaccugaacgagacccacuucagcgacgacaucgagcagcaggccgacaacaugaucaccgagcugcugcagaaggaguacaucgacagacagggcaagaccccccugggccugguggaccuguucguguucagcaccagcuucuaccugaucagcaucuuccugcaccuggugaagauccccacccacagacacaucaccggcaagcccugccccaagccccacagacugaaccacaugggcaucugcagcugcggccuguacaaccaccccggcgugcccgugaaguggaagagaugaggacuaguaauaaggaaacuguaugaaugucugugggcaggaagugaagagauccuucuguaaagguuuuuggaauuaugucugcugaauaauaaacuuuuuugaaauaauaaaucugguagaaaaaugagaucucaaaggcucuuuucagagccaccaaaaaaaaaaaaaaaaaaaaaaaaaaaaaaaaaaaaaaaaaaaaaaaaaaaaaaaaaaaaaaaaagaauu

SEQ ID NO: 39217 - RNA, 1778 nt, Artificial Sequence
  mRNA product Design b-4 (hSL-A64-N5) comprising derived and/or modified sequence from LASV(Lassa virus/H.sapiens-wt/NGA/2016/ISTH_0017;Clade II)__AVO03567__GPCmut11 (opt4)
aggagagucccgcagucggcguccagcggcucugcuuguucgugugugugucguugcaggccuuauucaagcuuaccaugggccagaucaucaccuucuuccaggaggugccccacgugaucgaggaggugaugaacaucgugcugaucgcccugagccugcuggccauccugaagggcaucuacaacguggccaccugcggccuguucggccuggugagcuuccugcugcugugcggcagaagcugcagcaccaccuacaagggcguguacgagcugcagacccuggagcuggacauggccagccugaacaugaccaugccccugagcugcaccaagaacaacagccaccacuacaucauggugggcaacgagaccggccuggagcugacccugaccaacaccagcaucaucaaccacaaguucugcaaccugagcgacgcccacaagaagaaccuguacgaccacgcccugaugagcaucaucagcaccuuccaccugagcauccccaacuucaaccaguacgaggccaugagcugcgacuucaacggcggcaagaucagcgugcaguacaaccugagccacaccuacgccaucgacgccgccaaccacugcggcaccaucgccaacggcgugcugcagaccuucaugagaauggccuggggcggcagcuacaucgcccuggacagcggcaagggcagcugggacugcaucaugaccagcuaccaguaccugaucauccagaacaccaccugggaggaccacugccaguucagcagacccagccccaucggcuaccugggccugcugagccagagaaccagagacaucuacaucagcagaagacugcugggcaccuucaccuggacccugagcgacagcgagggcaacgagacccccggcggcuacugccugaccagauggaugcugaucgaggccgagcugaagugcuucggcaacaccgccguggccaagugcaacgagaagcacgacgaggaguucugcgacaugcugagacuguucgacuucaacaagcaggccaucagaagacugaagaccgaggcccagaugagcauccagcugaucaacaaggccgugaacgcccugaucaacgaccagcugaucaugaagaaccaccugagagacaucaugggcauccccuacugcaacuacagcaaguacugcuaccugaaccacaccgugaccggcaagaccagccugcccagaugcugccuggugagcaacggcagcuaccugaacgagacccacuucagcgacgacaucgagcagcaggccgacaacaugaucaccgagcugcugcagaaggaguacauggacagacagggcaagaccccccugggccugguggaccuguucguguucagcaccagcuucuaccugaucagcaucuuccugcaccuggugagaauccccacccacagacacgugaucggcaagcccugccccaagccccacagacugaaccacaugggcaucugcagcugcggccuguacaagcaccccggcgugcccgugaaguggaagagaugaggacuaguaauaaggaaacuguaugaaugucugugggcaggaagugaagagauccuucuguaaagguuuuuggaauuaugucugcugaauaauaaacuuuuuugaaauaauaaaucugguagaaaaaugagaucucaaaggcucuuuucagagccaccaaaaaaaaaaaaaaaaaaaaaaaaaaaaaaaaaaaaaaaaaaaaaaaaaaaaaaaaaaaaaaaaagaauu

SEQ ID NO: 39218 - RNA, 1778 nt, Artificial Sequence
  mRNA product Design b-4 (hSL-A64-N5) comprising derived and/or modified sequence from LASV(Lassa virus/H.sapiens-wt/NGA/2018/ISTH_0959;Clade II)__AVV65099__GPCmut11 (opt4)
aggagagucccgcagucggcguccagcggcucugcuuguucgugugugugucguugcaggccuuauucaagcuuaccaugggccagaucaucaccuucuuccaggaggugccccacgugaucgaggaggugaugaacaucgugcugaucgcccugagccugcuggccauccugaagggcaucuacaacguggugaccugcggccuguucggccuggugagcuuccugcugcugugcggcagaagcugcagcaccaccuacaagggcguguacgagcugcagacccuggagcuggacauggccagccugaacaugaccaugccccugagcugcaccaagaacaacagccaccacuacaucauggugggcaacgagaccggccuggagcugacccugaccaacaccagcaucaucaaccacaaguucugcaaccugagcgacgcccacaagaagaaccuguacgaccacgcccugaugagcaucaucagcaccuuccaccugagcauccccaacuucaaccaguacgaggccaugagcugcgacuucaacggcggcaagaucagcgugcaguacaaccugagccacgccuacgccaucgacgccgccaaccacugcggcaccaucgccaacggcgugcugcagaccuucaugagaauggccuggggcggcagcuacaucgcccuggacagcggcaagggcagcugggacugcaucaugaccagcuaccaguaccugaucauccagaacaccaccugggaggaccacugccaguucagcagacccagccccaucggcuaccugggccugcugagccagagaaccagagacaucuacaucagcagaagacugcugggcaccuucaccuggacccugagcgacagcgagggcaacgagacccccggcggcuacugccugaccagauggaugcugaucgaggccgagcugaagugcuucggcaacaccgccguggccaagugcaacgagaagcacgacgaggaguucugcgacaugcugagacuguucgacuucaacaagcaggccaucagaagacugaagaccgaggcccagaugagcauccagcugaucaacaaggccgugaacgcccugaucaacgaccagcugaucaugaagaaccaccugagagacaucaugggcauccccuacugcaacuacagcaaguacugcuaccugaaccacaccgugaccggcaagaccagccugcccagaugcugccuggugagcaacggcagcuaccugaacgagacccacuucagcgacgacaucgagcagcaggccgacaacaugaucaccgagcugcugcagaaggaguacaucgacagacagggcaagaccccccugggccugguggaccuguucguguucagcaccagcuucuaccugaucagcaucuuccugcaccuggugaagauccccacccacagacacgugaucggcaagcccugccccaagccccacagacugaaccacaugggcaucugcagcugcggccuguacaagcaccccggcgugcccgugaaguggaagagaugaggacuaguaauaaggaaacuguaugaaugucugugggcaggaagugaagagauccuucuguaaagguuuuuggaauuaugucugcugaauaauaaacuuuuuugaaauaauaaaucugguagaaaaaugagaucucaaaggcucuuuucagagccaccaaaaaaaaaaaaaaaaaaaaaaaaaaaaaaaaaaaaaaaaaaaaaaaaaaaaaaaaaaaaaaaaagaauu

SEQ ID NO: 39219 - RNA, 1778 nt, Artificial Sequence
  mRNA product Design b-4 (hSL-A64-N5) comprising derived and/or modified sequence from LASV(LASV003-NIG-2008;Clade II)__AIT17580__GPCmut11 (opt4)
aggagagucccgcagucggcguccagcggcucugcuuguucgugugugugucguugcaggccuuauucaagcuuaccaugggccagaucaucaccuucuuccaggaggugccccacgugaucgaggaggugaugaacaucgugcugaucgcccugagccugcuggccauccugaagggcaucuacaacguggccaccugcggccuguucggccuggugagcuuccugcugcugugcggcagaagcugcagcaccaccuacaagggcguguacgagcugcagacccuggagcuggacauggccagccugaacaugaccaugccccugagcugcaccaagaacaacagccaccacuacaucauggugggcaacgagaccggccuggagcugacccugaccaacaccagcaucaucaaccacaaguucugcaaccugagcgacgcccacaagaagaaccuguacgaccacgcccugaugagcaucaucagcaccuuccaccugagcauccccaacuucaaccaguacgaggccaugagcugcgacuucaacggcggcaagaucagcgugcaguacaaccugagccacaccuacgccguggacgccgccaaccacugcggcaccaucgccaacggcgugcugcagaccuucaugagaauggccuggggcggcagcuacaucgcccuggacagcggcaagggcagcugggacugcaucaugaccagcuaccaguaccugaucauccagaacaccaccugggaggaccacugccaguucagcagacccagccccaucggcuaccugggccugcugagccagagaaccagagacaucuacaucagcagaagacugcugggcaccuucaccuggacccugagcgacagcgagagcaacgagacccccggcggcuacugccugaccagauggaugcugaucgaggccgagcugaagugcuucggcaacaccgccguggccaagugcaacgagaagcacgacgaggaguucugcgacaugcugagacuguucgacuucaacaagcaggccaucagaagacugaaggccgaggcccagaugagcauccagcugaucaacaaggccgugaacgcccugaucaacgaccagcugaucaugaagaaccaccugagagacaucaugggcauccccuacugcaacuacagcaaguacugcuaccugaaccacaccgugaccggcagaaccagccugcccagaugcugccuggugagcaacggcagcuaccugaacgagacccacuucagcgacgacaucgagcagcaggccgacaacaugaucaccgagcugcugcagaaggaguacauggacagacagggcaagaccccccugggccugguggaccuguucguguucagcaccagcuucuaccugaucagcaucuuccugcaccuggugaagauccccacccacagacacgugaucggcaagcccugccccaagccccacagacugaaccacaugggcaucugcagcugcggccuguacaagcaccccggcgugcccgugaaguggaagagaugaggacuaguaauaaggaaacuguaugaaugucugugggcaggaagugaagagauccuucuguaaagguuuuuggaauuaugucugcugaauaauaaacuuuuuugaaauaauaaaucugguagaaaaaugagaucucaaaggcucuuuucagagccaccaaaaaaaaaaaaaaaaaaaaaaaaaaaaaaaaaaaaaaaaaaaaaaaaaaaaaaaaaaaaaaaaagaauu

SEQ ID NO: 39220 - RNA, 1778 nt, Artificial Sequence
  mRNA product Design b-4 (hSL-A64-N5) comprising derived and/or modified sequence from LASV(LASV035-NIG-2009;Clade II)__AIT17588__GPCmut11 (opt4)
aggagagucccgcagucggcguccagcggcucugcuuguucgugugugugucguugcaggccuuauucaagcuuaccaugggccagaucaucaccuucuuccaggaggugccccacgugaucgaggaggugaugaacaucgugcugaucgcccugagccugcuggccauccugaagggcaucuacaacguggccaccugcggccuguucggccuggugagcuuccugcugcugugcggcagaagcugcagcaccaccuacaagggcguguacgagcugcagacccuggagcuggacauggccagccugaacaugaccaugccccugagcugcaccaagaacaacagccaccacuacaucauggugggcaacgagaccggccuggagcugacccugaccaacaccagcaucaucaaccacaaguucugcaaccugagcgacgcccacaagaagaaccuguacgaccacgcccugaugagcaucaucagcaccuuccaccugagcauccccaacuucaaccaguacgaggccaugagcugcgacuucaacggcggcaagaucagcgugcaguacaaccugagccacgccuacgccguggacgccgccaaccacugcggcaccaucgccaacggcgugcugcagaccuucaugagaauggccuggggcggcagcuacaucgcccuggacagcggcaagggcagcugggacugcaucaugaccagcuaccaguaccugaucauccagaacaccaccugggaggaccacugccaguucagcagacccagccccaucggcuaccugggccugcugagccagagaaccagagacaucuacaucagcagaagacugcugggcaccuucaccuggacccugagcgacagcgagggcaacgagacccccggcggcuacugccugaccagauggaugcugaucgaggccgagcugaagugcuucggcaacaccgccguggccaagugcaacgagaagcacgacgaggaguucugcgacaugcugagacuguucgacuucaacaagcaggccaucagaagacugaaggccgaggcccagaugagcauccagcugaucaacaaggccgugaacgcccugaucaacgaccagcugaucaugaagaaccaccugagagacaucaugggcauccccuacugcaacuacagcaaguacugcuaccugaaccacaccgugaccggcaagaccagccugcccagaugcugccuggugagcaacggcagcuaccugaacgagacccacuucagcgacgacaucgagcagcaggccgacaacaugaucaccgagcugcugcagaaggaguacaucgacagacagggcaagaccccccugggccugguggaccuguucguguucagcaccagcuucuaccugaucagcaucuuccugcaccuggugaagauccccacccacagacacgugaucggcaagcccugccccaagccccacagacugaaccacaugggcaucugcagcugcggccuguacaagcaccccggcgugcccgugaaguggaagagaugaggacuaguaauaaggaaacuguaugaaugucugugggcaggaagugaagagauccuucuguaaagguuuuuggaauuaugucugcugaauaauaaacuuuuuugaaauaauaaaucugguagaaaaaugagaucucaaaggcucuuuucagagccaccaaaaaaaaaaaaaaaaaaaaaaaaaaaaaaaaaaaaaaaaaaaaaaaaaaaaaaaaaaaaaaaaagaauu

SEQ ID NO: 39221 - RNA, 1778 nt, Artificial Sequence
  mRNA product Design b-4 (hSL-A64-N5) comprising derived and/or modified sequence from LASV(LASV1000-NIG-2009;Clade II)__AIT17782__GPCmut11 (opt4)
aggagagucccgcagucggcguccagcggcucugcuuguucgugugugugucguugcaggccuuauucaagcuuaccaugggccagaucaucaccuucuuccaggaggugccccacgugaucgaggaggugaugaacaucgugcugaucgcccugagccugcuggccauccugaagggcaucuacaacguggccaccugcggccuguucggccuggugagcuuccugcugcugugcggcagaagcugcagcaccaccuacaagggcguguacgagcugcagacccuggagcuggacauggccagccugaacaugaccaugccccugagcugcaccaagaacaacagccaccacuacaucauggugggcaacgagaccggccuggagcugacccugaccaacaccagcaucaucaaccacaaguucugcaaccugagcgacgcccacaagaagaaccuguacgaccacgcccugaugagcaucaucagcaccuuccaccugagcauccccaacuucaaccaguacgaggccaugagcugcgacuucaacggcggcaagaucagcgugcaguacaaccugagccacaccuacgccguggacgccgccaaccacugcggcaccaucgccaacggcgugcugcagaccuucaugagaauggccuggggcggcagcuacaucgcccuggacagcggcaagggcagcugggacugcaucaugaccagcuaccaguaccugaucauccagaacaccaccugggaggaccacugccaguucagcagacccagccccaucggcuaccugggccugcugagccagagaaccagagacaucuacaucagcagaagacugcugggcaccuucaccuggacccugagcgacagcgagggcaacgagacccccggcggcuacugccugaccagauggaugcugaucgaggccgagcugaagugcuucggcaacaccgccguggccaagugcaacgagaagcacgacgaggaguucugcgacaugcugagacuguucgacuucaacaagcaggccaucaagagacugaagaccgaggcccagaugagcauccagcugaucaacaaggccgugaacgcccugaucaacgaccagcugaucaugaagaaccaccugagagacaucaugggcauccccuacugcaacuacagcaaguacugcuaccugaaccacaccgugaccggcaagaccagccugcccagaugcugccuggugagcaacggcagcuaccugaacgagacccacuucagcgacgacaucgagcagcaggccgacaacaugaucaccgagcugcugcagaaggaguacaucgacagacagggcaagaccccccugggccugguggaccuguucguguucagcaccagcuucuaccugaucagcaucuuccugcaccuggugaagauccccacccacagacacguggugggcaagcccugccccaagccccacagacugaaccacaugggcaucugcagcugcggccuguacaagcaccccggcgugcccgugaaguggaagagaugaggacuaguaauaaggaaacuguaugaaugucugugggcaggaagugaagagauccuucuguaaagguuuuuggaauuaugucugcugaauaauaaacuuuuuugaaauaauaaaucugguagaaaaaugagaucucaaaggcucuuuucagagccaccaaaaaaaaaaaaaaaaaaaaaaaaaaaaaaaaaaaaaaaaaaaaaaaaaaaaaaaaaaaaaaaaagaauu

SEQ ID NO: 39222 - RNA, 1778 nt, Artificial Sequence
  mRNA product Design b-4 (hSL-A64-N5) comprising derived and/or modified sequence from LASV(LASV221-NIG-2010;Clade II)__AIT17624__GPCmut11 (opt4)
aggagagucccgcagucggcguccagcggcucugcuuguucgugugugugucguugcaggccuuauucaagcuuaccaugggccagaucaucaccuucuuccaggaggugccccacgugaucgaggaggugaugaacaucgugcugaucgcccugagccugcuggccauccugaagggcaucuacaacguggccaccugcggccuguucggccuggugagcuuccugcugcugugcggcagaagcugcagcaccaccuacaagggcguguacgagcugcagacccuggagcuggacauggccagccugaacaugaccaugccccugagcugcaccaagaacaacagccaccacuacaucauggugggcaacgagaccggccuggagcugacccugaccaacaccagcaucaucaaccacaaguucugcaaccugagcgacgcccacaagaagaaccuguacgaccacgcccugaugagcaucaucagcaccuuccaccugagcauccccaacuucaaccaguacgaggccaugagcugcgacuucaacggcggcaagaucagcgugcaguacaaccugagccacaccuacgccaucgacgccgccaaccacugcggcaccaucgccaacggcgugcugcagaccuucaugagaauggccuggggcggcagcuacaucgcccuggacagcggcaagggcagcugggacugcaucaugaccagcuaccaguaccugaucauccagaacaccaccugggaggaccacugccaguucagcagacccagccccaucggcuaccugggccugcugagccagagaaccagagacaucuacaucagcagaagacugcugggcaccuucaccuggacccugagcgacagcgagggcaacgagacccccggcggcuacugccugaccagauggaugcugaucgaggccgagcugaagugcuucggcaacaccgccguggccaagugcaacgagaagcacgacgaggaguucugcgacaugcugagacuguucgacuucaacaagcaggccaucagaagacugaagaccgaggcccagaugagcauccagcugaucaacaaggccgugaacgcccugaucaacgaccagcugaucaugaagaaccaccugagagacaucaugggcauccccuacugcaacuacagcaaguacugcuaccugaaccacaccgugaccggcaagaccagccugcccagaugcugccuggugagcaacggcagcuaccugaacgagacccacuucagcgacgacaucgagcagcaggccgacaacaugaucaccgagaugcugcagaaggaguacauggacagacagggcaagaccccccugggccugguggaccuguucguguucagcaccagcuucuaccugaucagcaucuuccugcaccuggugaagauccccacccacagacacgugaucggcaagcccugccccaagccccacagacugaaccacaugggcaucugcagcugcggccuguacaagcaccccggcgugcccgugaaguggaagagaugaggacuaguaauaaggaaacuguaugaaugucugugggcaggaagugaagagauccuucuguaaagguuuuuggaauuaugucugcugaauaauaaacuuuuuugaaauaauaaaucugguagaaaaaugagaucucaaaggcucuuuucagagccaccaaaaaaaaaaaaaaaaaaaaaaaaaaaaaaaaaaaaaaaaaaaaaaaaaaaaaaaaaaaaaaaaagaauu

SEQ ID NO: 39223 - RNA, 1778 nt, Artificial Sequence
  mRNA product Design b-4 (hSL-A64-N5) comprising derived and/or modified sequence from LASV(LASV237-NIG-2010;Clade II)__AIT17638__GPCmut11 (opt4)
aggagagucccgcagucggcguccagcggcucugcuuguucgugugugugucguugcaggccuuauucaagcuuaccaugggccagaucaucaccuucuuccaggaggugccccacgugaucgaggaggugaugaacaucgugcugaucgcccugagccugcuggccauccugaagggcaucuacaacguggccaccugcggccuguucggccuggugagcuuccugcugcugugcggcagaagcugcagcaccaccuacaagggcguguacgagcugcagacccuggagcuggacauggccagccugaacaugaccaugccccugagcugcaccaagaacaacagccaccacuacaucauggugggcaacgagaccggccuggagcugacccugaccaacaccagcaucaucaaccacaaguucugcaaccugagcgacgcccacaagaaggaccuguacgaccacgcccugaugagcaucaucagcaccuuccaccugagcauccccaacuucaaccaguacgaggccaugagcugcgacuucaacggcggcaagaucagcgugcaguacaaccugagccacaccuacgccguggacgccgccaaccacugcggcaccaucgccaacggcgugcugcagaccuucaugagaauggccuggggcggcagcuacaucgcccuggacagcggcaagggcagcugggacugcaucaugaccagcuaccaguaccugaucauccagaacaccaccugggaggaccacugccaguucagcagacccagccccaucggcuaccugggccugcugagccagagaaccagagacaucuacaucagcagaagacugcugggcaccuucaccuggacccugagcgacagcgagggcaacgagacccccggcggcuacugccugaccagauggaugcugaucgaggccgagcugaagugcuucggcaacaccgccguggccaagugcaacgagaagcacgacgaggaguucugcgacaugcugagacuguucgacuucaacaagcaggccaucagaagacugaagaccgaggcccagaugagcauccagcugaucaacaaggccgugaacgcccugaucaacgaccagcugaucaugaagaaccaccugagagacaucaugggcauccccuacugcaacuacagcaaguacugcuaccugaaccacaccgugaccggcaagaccagccugcccagaugcugccuggugagcaacggcagcuaccugaacgagacccacuucagcgacgacaucgagcagcaggccgacaacaugaucaccgagcugcugcagaaggaguacauggacagacagggcaagaccccccugggccugguggaccuguucguguucagcaccagcuucuaccugaucagcaucuuccugcaccugaucaagauccccacccacagacacaucaccggcaagcccugccccaagccccacagacugaaccacaugggcaucugcagcugcggccuguacaagcaccccggcgugcccgugaaguggaagagaugaggacuaguaauaaggaaacuguaugaaugucugugggcaggaagugaagagauccuucuguaaagguuuuuggaauuaugucugcugaauaauaaacuuuuuugaaauaauaaaucugguagaaaaaugagaucucaaaggcucuuuucagagccaccaaaaaaaaaaaaaaaaaaaaaaaaaaaaaaaaaaaaaaaaaaaaaaaaaaaaaaaaaaaaaaaaagaauu

SEQ ID NO: 39224 - RNA, 1778 nt, Artificial Sequence
  mRNA product Design b-4 (hSL-A64-N5) comprising derived and/or modified sequence from LASV(LASV253-NIG-2011;Clade II)__AIT17670__GPCmut11 (opt4)
aggagagucccgcagucggcguccagcggcucugcuuguucgugugugugucguugcaggccuuauucaagcuuaccaugggccagaucaucaccuucuuccaggaggugccccacgugaucgaggaggugaugaacaucgugcugaucgcccugagccugcuggccauccugaagggcaucuacaacguggccaccugcggccuguucggccuggugagcuuccugcugcugugcggcagaagcugcagcaccaccuacaagggcguguacgagcugcagacccuggagcuggacauggccagccugaacaugaccaugccccugagcugcaccaagaacaacagccaccacuacaucauggugggcaacgagaccggccuggagcugacccugaccaacaccagcaucaucaaccacaaguucugcaaccugagcgacgcccacaagaagaaccuguacgaccacgcccugaugagcaucaucagcaccuuccaccugagcauccccaacuucaaccaguacgaggccaugagcugcgacuucaacggcggcaagaucagcgugcaguacaaccugagccacaccuacgccguggacgccgccaaccacugcggcaccaucgccaacggcgugcugcagaccuucaugagaauggccuggggcggcagcuacaucgcccuggacagcggcaagggcagcugggacugcaucaugaccagcuaccaguaccugaucauccagaacaccaccugggaggaccacugccaguucagcagacccagccccaucggcuaccugggccugcugagccagagaaccagagacaucuacaucagcagaagacugcugggcaccuucaccuggacccugagcgacagcgagggcaacgagacccccggcggcuacugccugaccagauggaugcugaucgaggccgagcugaagugcuucggcaacaccgccguggccaagugcaacgagaagcacgacgaggaguucugcgacaugcugagacuguucgacuucaacaagcaggccaucagaagacugaaggccgaggcccagaugagcauccagcugaucaacaaggccgugaacgcccugaucaacgaccagcugaucaugaagaaccaccugagagacaucaugggcauccccuacugcaacuacagcaaguacugcuaccugaaccacaccgugaccggcagaaccagccugcccagaugcugccuggugagcaacggcagcuaccugaacgagacccacuucagcgacgacaucgagcagcaggccgacaacaugaucaccgagcugcugcagaaggaguacaucgacagacagggcaagaccccccugggccugguggaccuguucguguucagcaccagcuucuaccugaucagcaucuuccugcaccuggugaagauccccacccacagacacaucaucggcaagcccugccccaagccccacagacugaaccacaugggcaucugcagcugcggccuguacaagcaccccggcgugcccgugaaguggaagagaugaggacuaguaauaaggaaacuguaugaaugucugugggcaggaagugaagagauccuucuguaaagguuuuuggaauuaugucugcugaauaauaaacuuuuuugaaauaauaaaucugguagaaaaaugagaucucaaaggcucuuuucagagccaccaaaaaaaaaaaaaaaaaaaaaaaaaaaaaaaaaaaaaaaaaaaaaaaaaaaaaaaaaaaaaaaaagaauu

SEQ ID NO: 39225 - RNA, 1778 nt, Artificial Sequence
  mRNA product Design b-4 (hSL-A64-N5) comprising derived and/or modified sequence from LASV(LASV254-NIG-2011;Clade II)__AIT17674__GPCmut11 (opt4)
aggagagucccgcagucggcguccagcggcucugcuuguucgugugugugucguugcaggccuuauucaagcuuaccaugggccagaucaucaccuucuuccaggaggugccccacgugaucgaggaggugaugaacaucgugcugaucgcccugagccugcuggccauccugaagggcaucuacaacguggccaccugcggccuguucggccuggugagcuuccugcugcugugcggcagaagcugcagcaccaccuacaagggcguguacgagcugcagacccuggagcuggacaugaccaaccugaacaugaccaugccccugagcugcaccaagaacaacagccaccacuacaucauggugggcaacgagaccggccuggagcugacccugaccaacaccagcaucaucaaccacaaguucugcaaccugagcgacgcccacaagaagaaccuguacaaccacgcccugaugagcaucaucagcaccuuccaccugagcauccccaacuucaaccaguacgaggccaugagcugcgacuucaacggcggcaagaucagcgugcaguacaaccugagccacagcuacgccguggacgccgccaaccacugcggcaccaucgccaacggcgugcugcagaccuucaugagaauggccuggggcggcagcuacaucgcccuggacagcggcaagggcaacugggacugcaucaugaccagcuaccaguaccugaucauccagaacaccaccugggaggaccacugccaguucagcagacccagccccaucggcuaccugggccugcugagccagagaaccagagacaucuacaucagcagaagacugcugggcaccuucaccuggacccugagcgacagcgagggcaacgagacccccggcggcuacugccugaccagauggaugcugaucgaggccgagcugaagugcuucggcaacaccgccguggccaagugcaacgagaagcacgacgaggaguucugcgacaugcugagacuguucgacuucaacaagcaggccaucagaagacugaagaccgaggcccaggccaacauccagcugaucaacaaggccgugaacgcccugaucaacgaccagcugaucaugaagaaccaccugagagacaucaugggcauccccuacugcaacuacagcaaguacugcuaccugaaccacaccgugaccggcaagaccagccugcccagaugcugccuggugagcaacggcagcuaccugaacgagacccacuucagcgacgacaucgagcagcaggccgacaacaugaucaccgagcugcugcagaaggaguacauggacagacagggcaagaccccccugggccugguggaccuguucguguucagcaccagcuucuaccugaucagcaucuuccugcaccuggugaagauccccacccacagacacgugaucggcaagcccugccccaagccccacagacugaaccacaugggcaucugcagcugcggccuguacaagcaccccggcgugcccgugaaguggaagagaugaggacuaguaauaaggaaacuguaugaaugucugugggcaggaagugaagagauccuucuguaaagguuuuuggaauuaugucugcugaauaauaaacuuuuuugaaauaauaaaucugguagaaaaaugagaucucaaaggcucuuuucagagccaccaaaaaaaaaaaaaaaaaaaaaaaaaaaaaaaaaaaaaaaaaaaaaaaaaaaaaaaaaaaaaaaaagaauu

SEQ ID NO: 39226 - RNA, 1778 nt, Artificial Sequence
  mRNA product Design b-4 (hSL-A64-N5) comprising derived and/or modified sequence from LASV(Nig08-A19;Clade III)__ADU56618__GPCmut11 (opt4)
aggagagucccgcagucggcguccagcggcucugcuuguucgugugugugucguugcaggccuuauucaagcuuaccaugggccagaucgugaccuucuuccaggaggugccccacgugaucgaggaggugaugaacaucgugcugaucgcccugagcauccuggccauccugaagggccuguacaacaucgccaccugcggccugaucggccuggugaccuuccugcugcugagcggcagaagcugcagcaugaccuacaagggcguguacgagcugcagacccuggagcugaacaugaacacccugaacaugaccaugccccugagcugcaccaagaacaacagccaccacuacaucauggugggcaacgagaccggccuggagcugacccugaccaacaccagccugcugcaccacaaguucugcaaccugagcgacgcccacaagaagaaccuguacgaccacacccugaugagcaucaucagcaccuuccaccugagcauccccaacuucaaccaguacgaggccaugagcugcgacuucaacggcggcaagaucaccgugcaguacaaccugagccacagcuacgccaucgacgccgccaaccacugcggcaccguggccaacggcgugcugcagaccuucaugagaauggccuggggcggcagcuacaucgcccuggacagcggcagaggcaagugggacugcaucaugaccagcuaccaguaccugaucauccagaacaccaccugggaggaccacugccaguucagcagacccagccccaucggcuaccugggccugcugagccagagaaccagagacaucuacaucagcagaagacugcugggcaccuucaccuggacccugagcgacagcgagggcaacgagacccccggcggcuacugccugaccagauggaugcugaucgaggccgagcugaagugcuucggcaacaccgccguggccaagugcaacgagaagcacgacgaggaguucugcgacaugcugagacuguucgacuucaacaagcaggccaucagaagacugaaggccgaggcccagaugagcauccagcugaucaacaaggccgugaacgcccugaucaacgaccagcugaucaugaagaaccaccugagagacaucaugggcauccccuacugcaacuacagcaaguacugcuaccugaaccacaccagcaccggcagaaccagccugcccagaugcugccuggugagcaacggcagcuaccugaacgagacccacuucagcgacgacaucgagcagcaggccgacaacaugaucaccgagaugcugcagaaggaguaccuggacagacagggcaagaccccccugggccugguggaccuguucguguucagcaccagcuucuaccugaucagcaucuuccugcaccuggugaagauccccacccacagacacaucgugggcaagcccugccccaagccccacagacugaaccacaugggcaucugcagcugcggccuguacaagcagcccggcgugcccgugagauggaagagaugaggacuaguaauaaggaaacuguaugaaugucugugggcaggaagugaagagauccuucuguaaagguuuuuggaauuaugucugcugaauaauaaacuuuuuugaaauaauaaaucugguagaaaaaugagaucucaaaggcucuuuucagagccaccaaaaaaaaaaaaaaaaaaaaaaaaaaaaaaaaaaaaaaaaaaaaaaaaaaaaaaaaaaaaaaaaagaauu

SEQ ID NO: 39227 - RNA, 1781 nt, Artificial Sequence
  mRNA product Design b-4 (hSL-A64-N5) comprising derived and/or modified sequence from LASV(G1180-SLE-2010;Clade IV)__AIT17168__GPCmut11 (opt4)
aggagagucccgcagucggcguccagcggcucugcuuguucgugugugugucguugcaggccuuauucaagcuuaccaugggccagaucgugaccuucuuccaggaggugccccacgugaucgaggaggugaugaacaucgugcugaucgcccugagcauccuggccgugcugaagggccuguacaacuucgccaccugcggccuggugggccugcugaccuuccugcugcugugcggcagaagcugcaccgccagcagauacaagggcguguacgagcugcagacccuggagcugaacauggagacccugaacaugaccaugccccugagcugcaccaagaacaacagccaccacuacaucauggugggcaacgagaccggccuggagcugacccugaccaacaccagcaucaucaaccacaaguucugcaaccugagcgacgcccacaagaagaaccuguacgaccacgcccugaugagcaucaucagcaccuuccaccugagcauccccaacuucaaccaguacgaggccaugagcugcgacuucaacggcggcaagaucagcgugcaguacaaccugagccacagcuacgccggcgacgccgccaaccacugcggcaccguggccaacggcgugcugcagaccuucaugagaauggccuggggcggcagcuacaucgcccuggacagcggccacggcagcugggacugcaucaugaccagcuaccaguaccugaucauccagaacaccaccugggaggaccacugccaguucagcagacccagccccaucggcuaccugggccugcugagccagagaaccagagacaucuacaucagcagaagacugcugggcaccuucaccuggacccugagcgacagcgagggcaaggacacccccggcggcuacugccugaccagauggaugcugaucgaggccgagcugaagugcuucggcaacaccgccguggccaagugcaacgagaagcacgacgaggaguucugcgacaugcugagacuguucgacuucaacaagcaggccauccagagacugaaggccgaggcccagaugagcauccagcugaucaacaaggccgugaacgcccugaucaacgaccagcugaucaugaagaaccaccugagagacaucaugggcauccccuacugcaacuacagcaaguacugcuaccugaaccacaccaccaccggcaagaccagccugcccaagugcugccuggugagcaacggcagcuaccugaacgagacccacuucagcgacgacaucgagcagcaggccgacaacaugaucaccgagaugcugcagaaggaguacauggagagacagggcaagaccccccugggccugguggaccuguucguguucagcaccagcuucuaccugaucagcaucuuccugcaccuggugaagauccccacccacagacacaucgugggcaagagcugccccaagccccacagacugaaccacaugggcaucugcagcugcggccuguacaagcagcccggcgugcccgugaaguggaagagaugaggacuaguaauaaggaaacuguaugaaugucugugggcaggaagugaagagauccuucuguaaagguuuuuggaauuaugucugcugaauaauaaacuuuuuugaaauaauaaaucugguagaaaaaugagaucucaaaggcucuuuucagagccaccaaaaaaaaaaaaaaaaaaaaaaaaaaaaaaaaaaaaaaaaaaaaaaaaaaaaaaaaaaaaaaaaagaauu

SEQ ID NO: 39228 - RNA, 1781 nt, Artificial Sequence
  mRNA product Design b-4 (hSL-A64-N5) comprising derived and/or modified sequence from LASV(G1442-SLE-2011;Clade IV)__AIT17180__GPCmut11 (opt4)
aggagagucccgcagucggcguccagcggcucugcuuguucgugugugugucguugcaggccuuauucaagcuuaccaugggccagaucgugaccuucuuccaggaggugccccacgugaucgaggaggugaugaacaucgugcugaucgcccugagcauccuggccgugcugaagggccuguacaacguggccaccugcggccugaucggccuggugaccuuccugcugcugugcggcagaagcugcaccaccacccuguacaagggcguguacgagcugcagacccuggagcugaacauggagacccugaacaugaccaugccccugagcugcaccaagaacaacagccaccacuacaucagagugggcaacgagaccggccuggagcugacccugaccaacaccagcaucaucaaccacaaguucugcaaccugagcgacgcccacaagaagaaccuguacgaccacgcccugaugagcaucaucagcaccuuccaccugagcauccccaacuucaaccaguacgaggccaugagcugcgacuucaacggcggcaagaucagcgugcaguacaaccugagccacagcuacgccggcgacgccgccaaccacugcggcaccguggccaacggcgugcugcagaccuucaugagaauggccuggggcggcagcuacaucgcccuggacagcggcagaggcaacugggacugcaucaugaccagcuaccaguaccugaucauccagaacaccaccugggacgaccacugccaguucagcagacccagccccaucggcuaccugggccugcugagccagagaaccagagacguguacaucagcagaagacugcugggcaccuucaccuggacccugagcgacagcgagggcaaggacacccccggcggcuacugccugaccagauggaugcugaucgaggccgagcugaagugcuucggcaacaccgccguggccaagugcaacgagaagcacgacgaggaguucugcgacaugcugagacuguucgacuucaacaagcaggccauccagagacugaaggccgaggcccagaugagcauccagcugaucaacaaggccgugaacgcccugaucaacgaccagcugaucaugaagaaccaccugagagacaucaugggcauccccuacugcaacuacagcaaguacugcuaccugaacaacaccgccaccggcaagaccagccugcccaagugcugccugaucagcaacggcagcuaccugaacgagacccacuucagcgacgacaucgagcaggaggccgacaacaugaucaccgagaugcugcagaaggaguacauggagagacagggcaagaccccccugggccugguggaccuguucguguucagcaccagcuucuaccugaucagcaucuuccugcaccuggugaagauccccacccacagacacaucgugggcaagagcugccccaagccccacagacugaaccacaugggcaucugcagcugcggccuguacaagcagcccggcgugcccgugagauggaagagaugaggacuaguaauaaggaaacuguaugaaugucugugggcaggaagugaagagauccuucuguaaagguuuuuggaauuaugucugcugaauaauaaacuuuuuugaaauaauaaaucugguagaaaaaugagaucucaaaggcucuuuucagagccaccaaaaaaaaaaaaaaaaaaaaaaaaaaaaaaaaaaaaaaaaaaaaaaaaaaaaaaaaaaaaaaaaagaauu

SEQ ID NO: 39229 - RNA, 1781 nt, Artificial Sequence
  mRNA product Design b-4 (hSL-A64-N5) comprising derived and/or modified sequence from LASV(G3010-SLE-2013;Clade IV)__AIT17344__GPCmut11 (opt4)
aggagagucccgcagucggcguccagcggcucugcuuguucgugugugugucguugcaggccuuauucaagcuuaccaugggccagaucgugaccuucuuccaggaggugccccacgugaucgaggaggugaugaacaucgugcugaucgcccugagcauccuggccgugcugaagggccuguacaacuucgccaccugcggccuggugggccuggugaccuuccugcugcugugcggcagaagcugcaccaccagccuguacaagggcguguacgagcugcagacccuggagcugaacauggagacccugaacaugaccaugccccugagcugcaccaagaacaacagccaccacuacaucauggugggcaacgagaccggccuggagcugacccugaccaacaccagcaucaucaaccacaaguucugcaaccugagcgacgcccacaagaagaaccuguacaaccacgcccugaugagcaucaucagcaccuuccaccugagcauccccaacuucaaccaguacgaggccaugagcugcgacuucaacggcggcaagaucagcgugcaguacaaccugagccacagcuacgccggcgacgccgccagccacugcggcaccguggccaacggcgugcugcagaccuucaugagaauggccuggggcggcagcuacaucgcccuggacagcggcuacggcaagugggacugcaucaugaccagcuaccaguaccugaucauccagaacaccaccugggaggaccacugccaguucagcagacccagccccaucggcuaccugggccugcugagccagagaaccagagacaucuacaucagcagaagacugcugggcaccuucaccuggacccugagcgacagcgagggcaaggacacccccggcggcuacugccugaccagauggaugcugaucgaggccgagcugaagugcuucggcaacaccgccguggccaagugcaacgagaagcacgacgaggaguucugcgacaugcugagacuguucgacuucaacaagcaggccauccagagacugaagaccgaggcccagaugagcauccagcugaucaacaaggccgugaacgcccugaucaacgaccagcugaucaugaagaaccaccugagagacaucaugggcauccccuacugcaacuacagcaaguacugcuaccugaaccacaccaccaccggcaagaccagccugcccaagugcugccuggugagcaacggcagcuaccugaacgagacccacuucagcgacgacaucgagcagcaggccgacaacaugaucaccgagaugcugcagaaggaguacauggagagacagggcaagaccccccugggccugguggaccuguucguguucagcaccagcuucuaccugaucagcaucuuccugcaccuggugaagauccccacccacagacacaucgugggcaagagcugccccaagccccacagacugaaccacaugggcaucugcagcugcggccuguacaagcagcccggcgugcccgugagauggaagagaugaggacuaguaauaaggaaacuguaugaaugucugugggcaggaagugaagagauccuucuguaaagguuuuuggaauuaugucugcugaauaauaaacuuuuuugaaauaauaaaucugguagaaaaaugagaucucaaaggcucuuuucagagccaccaaaaaaaaaaaaaaaaaaaaaaaaaaaaaaaaaaaaaaaaaaaaaaaaaaaaaaaaaaaaaaaaagaauu

SEQ ID NO: 39230 - RNA, 1781 nt, Artificial Sequence
  mRNA product Design b-4 (hSL-A64-N5) comprising derived and/or modified sequence from LASV(G502-SLE-2009;Clade IV)__AIT17126__GPCmut11 (opt4)
aggagagucccgcagucggcguccagcggcucugcuuguucgugugugugucguugcaggccuuauucaagcuuaccaugggccagaucgugaccuucuuccaggaggugccccacgugaucgaggaggugaugaacaucgugcugaucgcccugagcauccuggccgugcugaagggccuguacaacuucgccaccugcggccuggugggccugcugaccuuccugcugcugugcggcagaagcugcaccaccggccuguacaagggcguguacgagcugcagacccuggagcugaacauggagacccugaacaugaccaugccccugagcugcaccaagaacaacagccaccacuacaucauggugggcaacgagaccggccuggagcugacccugaccaacaccagcaucaucaaccacaaguucugcaaccugagcgacgcccacaagaagaaccuguacgaccacgcccugaugagcaucaucagcaccuuccaccugagcauccccaacuucaaccaguacgaggccaugagcugcgacuucaacggcggcaagaucagcgugcaguacaaccugagccacagcuacgccggcgacgccgccgaccacugcggcaccguggccaacggcgugcugcagaccuucaugagaauggccuggggcggcagcuacaucgcccuggacagcggcagaggcagaugggacugcaucaugaccagcuaccaguaccugaucauccagaacaccaccugggaggaccacugccaguucagcagacccagccccaucggcuaccugggccugcugagccagagaaccagagacaucuacaucagcagaagacugcugggcaccuucaccuggacccugagcgacagcgagggcaaggacacccccggcggcuacugccugaccagauggaugcugaucgaggccgagcugaagugcuucggcaacaccgccguggccaagugcaacgagaagcacgacgaggaguucugcgacaugcugagacuguucgacuucaacaagcaggccauccagagacugaaggccgaggcccagaugagcauccagcugaucaacaaggccgugaacgcccugaucaacgaccagcuggugaugaagaaccaccugagagacaucaugggcauccccuacugcaacuacagcagauacugcuaccugaaccacaccaccaccggcagaaccagccugcccaagugcugccuggugagcaacggcagcuaccugaacgagacccacuucagcgacgacaucgagcagcaggccgacaacaugaucaccgagaugcugcagaaggaguacauggagagacagggcaagaccccccugggccugguggaccuguucguguucagcaccagcuucuaccugaucagcaucuuccugcaccuggugaagauccccacccacagacacaucgugggcaagagcugccccaagccccacagacugaaccacaugggcaucugcagcugcggccuguacaagcagcccggcgugcccgugaaguggaagagaugaggacuaguaauaaggaaacuguaugaaugucugugggcaggaagugaagagauccuucuguaaagguuuuuggaauuaugucugcugaauaauaaacuuuuuugaaauaauaaaucugguagaaaaaugagaucucaaaggcucuuuucagagccaccaaaaaaaaaaaaaaaaaaaaaaaaaaaaaaaaaaaaaaaaaaaaaaaaaaaaaaaaaaaaaaaaagaauu

SEQ ID NO: 39231 - RNA, 1781 nt, Artificial Sequence
  mRNA product Design b-4 (hSL-A64-N5) comprising derived and/or modified sequence from LASV(G733-SLE-2010;Clade IV)__AIT17154__GPCmut11 (opt4)
aggagagucccgcagucggcguccagcggcucugcuuguucgugugugugucguugcaggccuuauucaagcuuaccaugggccagaucgugaccuucuuccaggaggugccccacgugaucgaggaggugaugaacaucgugcugaucgcccugagcauccuggccgugcugaagggccuguacaacuucgccaccugcggcaucgugggccuggugagcuuccugcugcugugcggcagaagcugcaccaccagccuguacaagggcguguacgagcugcagacccuggagcugaacauggagacccugaacaugaccaugccccugagcugcaccaagaacaacagccaccacuacaucauggugggcaacgagaccggccuggagcugacccugaccaacaccagcaucaucaaccacaaguucugcaaccugagcgacgcccacaagaagaaccuguacgaccacgcccugaugagcaucaucagcaccuuccaccugagcauccccaacuucaaccaguacgaggccaugagcugcgacuucaacggcggcaagaucagcgugcaguacaaccugagccacagcuacgccggcgacgccgccaaccacugcggcaccaucgccaacggcgugcugcagaccuucaugagaauggccuggggcggcagcuacaucgcccuggacagcggcagagacagaugggacugcaucaugaccagcuaccaguaccugaucauccagaacaccaccugggaggaccacugccaguucagcagacccagccccaucggcuaccugggccugcugagccagagaaccagagacaucuacaucagcagaagacugcugggcaccuucaccuggacccugagcgacagcgagggcaaggacacccccggcggcuacugccugaccagauggaugcugaucgaggccgagcugaagugcuucggcaacaccgccguggccaagugcaacgagaagcacgacgaggaguucugcgacaugcugagacuguucgacuucaacaagcaggccauccagagacugaaggccgaggcccagaugagcauccagcugaucaacaaggccgugaacgcccugaucaacgaccagcugaucaugaagaaccaccugagagacaucaugggcauccccuacugcaacuacagcaaguacugcuaccugaaccacaccaccaccggcaagaccagccugcccaagugcugccuggugagcaacggcagcuaccugaacgagacccacuucagcgacgacaucgagcagcaggccgacaacaugaucaccgagaugcugcagaaggaguacauggagagacagggcaagaccccccugggccugguggaccuguucguguucagcaccagcuucuaccugaucagcaucuuccugcaccuggugaagauccccacccacagacacguggugggcaagagcugccccaagccccacagacugaaccacaugggcaucugcagcugcggccuguacggccagcccggcgugcccgugaaguggaagagaugaggacuaguaauaaggaaacuguaugaaugucugugggcaggaagugaagagauccuucuguaaagguuuuuggaauuaugucugcugaauaauaaacuuuuuugaaauaauaaaucugguagaaaaaugagaucucaaaggcucuuuucagagccaccaaaaaaaaaaaaaaaaaaaaaaaaaaaaaaaaaaaaaaaaaaaaaaaaaaaaaaaaaaaaaaaaagaauu

SEQ ID NO: 39232 - RNA, 1781 nt, Artificial Sequence
  mRNA product Design b-4 (hSL-A64-N5) comprising derived and/or modified sequence from MOPV/LASV reassortant(IGS-1;Clade IV)__AFY05576__GPCmut11 (opt4)
aggagagucccgcagucggcguccagcggcucugcuuguucgugugugugucguugcaggccuuauucaagcuuaccaugggccagaucgugaccuucuuccaggaggugccccacgugaucgaggaggugaugaacaucgugcugaucgcccugagcgugcuggccgugcugaagggccuguacaacuucgccaccugcggccuggugggccuggugaccuuccugcugcugugcggcagaagcugcaccaccagccuguacaagggcguguacgagcugcagacccuggagcugaacauggagacccugaacaugaccaugccccugagcugcaccaagaacaacagccaccacuacaucauggugggcaacgagaccggccuggagcugacccugaccaacaccagcaucaucaaccacaaguucugcaaccugagcgacgcccacaagaagaaccuguacgaccacgcccugaugagcaucaucagcaccuuccaccugagcauccccaacuucaaccaguacgaggccaugagcugcgacuucaacggcggcaagaucagcgugcaguacaaccugagccacagcuacgccggcgacgccgccaaccacugcggcaccguggccaacggcgugcugcagaccuucaugagaauggccuggggcggcagcuacaucgcccuggacagcggcagaggcaacugggacugcaucaugaccagcuaccaguaccugaucauccagaacaccaccugggaggaccacugccaguucagcagacccagccccaucggcuaccugggccugcugagccagagaaccagagacaucuacaucagcagaagacugcugggcaccuucaccuggacccugagcgacagcgagggcgaggacacccccggcggcuacugccugaccagauggaugcugaucgaggccgagcugaagugcuucggcaacaccgccguggccaagugcaacgagaagcacgacgaggaguucugcgacaugcugagacuguucgacuucaacaagcaggccauccagagacugaaggccgaggcccagaugagcauccagcugaucaacaaggccgugaacgcccugaucaacgaccagcugaucaugaagaaccaccugagagacaucaugggcauccccuacugcaacuacagcaaguacugcuaccugaaccacaccaccaccggcagaaccagccugcccaagugcugccuggugagcaacggcagcuaccugaacgagacccacuucagcgacgacaucgagcagcaggccgacaacaugaucaccgagaugcugcagaaggaguacauggagagacagggcaagaccccccugggccugguggaccuguucguguucagcaccagcuucuaccugaucagcaucuuccugcaccuggugaagauccccacccacagacacaucgugggcaagagcugccccaagccccacagacugaaccacaugggcaucugcagcugcggccuguacaagcagcccggcgugcccgugaaguggaagagaugaggacuaguaauaaggaaacuguaugaaugucugugggcaggaagugaagagauccuucuguaaagguuuuuggaauuaugucugcugaauaauaaacuuuuuugaaauaauaaaucugguagaaaaaugagaucucaaaggcucuuuucagagccaccaaaaaaaaaaaaaaaaaaaaaaaaaaaaaaaaaaaaaaaaaaaaaaaaaaaaaaaaaaaaaaaaagaauu

SEQ ID NO: 39233 - RNA, 1781 nt, Artificial Sequence
  mRNA product Design b-4 (hSL-A64-N5) comprising derived and/or modified sequence from LASV(LM765-SLE-2012;Clade IV)__AIT17814__GPCmut11 (opt4)
aggagagucccgcagucggcguccagcggcucugcuuguucgugugugugucguugcaggccuuauucaagcuuaccaugggccagaucgugaccuucuuccaggaggugccccacgugaucgaggaggugaugaacaucgugcugaucgcccugagcauccuggccgugcugaagggccuguacaacuucgccaccugcggccuggugggccuggugaccuuccugcugcugugcggcagaagcugcaccaccagccuguacaagggcguguacgagcugcagacccuggagcugaacauggagacccugaacaugaccaugccccugagcugcaccaagaacaacagccaccacuacaucauggugggcaacgagaccggccuggagcugacccugaccaacaccagcaucaucgaccacaaguucugcaaccugagcgacgcccacagaaagaaccuguacgaccacgcccugaugagcaucaucagcaccuuccaccugagcauccccaacuucaaccaguacgaggccaugagcugcgacuucaacggcggcaagaucagcgugcaguacaaccugagccacagcuacgccaaggacgccgccgaccacugcggcaccguggccaacggcgugcugcagaccuucaugagaauggccuggggcggcagcuacaucgcccuggacagcggcagaggcagaugggacugcaucaugaccagcuaccaguaccugaucauccagaacaccaccugggaggaccacugccaguucagcagacccagccccaucggcuaccugggccugcugagccagagaaccagagacaucuacaucagcagaagacugcugggcaccuucaccuggacccugagcgacagcgagggcaaggacacccccggcggcuacugccugaccagauggaugcugaucgaggccgagcugaagugcuucggcaacaccgccguggccaagugcaacgagaagcacgacgaggaguucugcgacaugcugagacuguucgacuucaacaagcaggccauccagagacugaaggccgaggcccagaugagcauccagcugaucaacaaggccgugaacgcccugaucaacgaccagcugaucaugaagaaccaccugagagacaucaugggcauccccuacugcaacuacagcaaguacugcuaccugaaccacaccaccaccggcaagaccagccugcccaagugcugccuggugagcaacggcagcuaccugaacgagacccacuucagcgacgacaucgagcagcaggccgacaacaugaucaccgagaugcugcagaaggaguacauggagagacagggcaagaccccccugggccugguggaccuguucguguucagcaccagcuucuaccugaucagcaucuuccugcaccuggugaagauccccacccacagacacaucgugggcaagcccugccccaagccccacagacugaaccacaugggcaucugcagcugcggccuguacaagcagcccggcgugcccgugaaguggaagagaugaggacuaguaauaaggaaacuguaugaaugucugugggcaggaagugaagagauccuucuguaaagguuuuuggaauuaugucugcugaauaauaaacuuuuuugaaauaauaaaucugguagaaaaaugagaucucaaaggcucuuuucagagccaccaaaaaaaaaaaaaaaaaaaaaaaaaaaaaaaaaaaaaaaaaaaaaaaaaaaaaaaaaaaaaaaaagaauu

SEQ ID NO: 39234 - RNA, 1781 nt, Artificial Sequence
  mRNA product Design b-4 (hSL-A64-N5) comprising derived and/or modified sequence from LASV(LM776-SLE-2012;Clade IV)__AIT17824__GPCmut11 (opt4)
aggagagucccgcagucggcguccagcggcucugcuuguucgugugugugucguugcaggccuuauucaagcuuaccaugggccagaucgugaccuucuuccaggaggugccccacgugaucgaggaggugaugaacaucgugcugaucgcccugagcauccuggccgugcugaagggccuguacaacuucgccaccugcggccuggugggccuggugaccuuccugcugcugugcggcagaagcugcaccaccagcguguacaagggcguguacgagcugcagacccuggagcugaacauggagacccugaacaugaccaugccccugagcugcaccaagaacaacagccaccacuacaucauggugggcaacgagaccggccuggagcugacccugaccaacaccagcaucaucaaccacaaguucugcaaccugagcgacgcccacaagaagaaccuguacgaccacgcccugaugagcaucaucagcaccuuccaccugagcauccccaacuucaaccaguacgaggccaugagcugcgacuucaacggcggcaagaucagcgugcaguacaaccugagccacagcuacgccggcgacgccgccaaccacugcggcaccguggccaacggcgugcugcagaccuucaugagaauggccuggggcggcagcuacaucgcccuggacagcggccacggcaagugggacugcaucaugaccagcuaccaguaccugaucauccagaacaccaccugggaggaccacugccaguucagcagacccagccccaucggcuaccugggccugcugagccagagaaccagagacaucuacaucagcagaagacugcugggcaccuucaccuggacccugagcgacagcgagggcaaggacacccccggcggcuacugccugaccagauggaugcugaucgaggccgagcugaagugcuucggcaacaccgccguggccaagugcaacgagaagcacgacgaggaguucugcgacaugcugagacuguucgacuucaacaagcaggccauccagagacugaaggccgaggcccagaugagcauccagcugaucaacaaggccgugaacgcccugaucaacgaccagcugaucaugaagaaccaccugagagacaucaugggcauccccuacugcaacuacagcaaguacugcuaccugaaccacaccaccaccggcaagaccagccugcccaagugcugccuggugagcaacggcagcuaccugaacgagacccacuucagcgacgacaucgagcagcaggccgacaacaugaucaccgagaugcugcagaaggaguacauggagagacagggcaagaccccccugggccugguggaccuguucguguucagcaccagcuucuaccugaucagcaucuuccugcaccuggugaagauccccacccacagacacaucgugggcaagagcugccccaagccccacagacugaaccacaugggcaucugcagcugcggccuguacaagcagcccggcgugcccgugagauggaagagaugaggacuaguaauaaggaaacuguaugaaugucugugggcaggaagugaagagauccuucuguaaagguuuuuggaauuaugucugcugaauaauaaacuuuuuugaaauaauaaaucugguagaaaaaugagaucucaaaggcucuuuucagagccaccaaaaaaaaaaaaaaaaaaaaaaaaaaaaaaaaaaaaaaaaaaaaaaaaaaaaaaaaaaaaaaaaagaauu

SEQ ID NO: 39235 - RNA, 1781 nt, Artificial Sequence
  mRNA product Design b-4 (hSL-A64-N5) comprising derived and/or modified sequence from LASV(Mad39;Clade IV)__ANH09722__GPCmut11 (opt4)
aggagagucccgcagucggcguccagcggcucugcuuguucgugugugugucguugcaggccuuauucaagcuuaccaugggccagaucgugaccuucuuccaggaggugccccacgugaucgaggaggugaugaacaucgugcugaucgcccugagcauccuggccgugcugaagggccuguacaacguggccaccugcggccugaucggccuggugaccuuccugcugcugugcggcagaagcugcaccaccacccuguacaagggcguguacgagcugcaggcccuggagcugaacauggagacccugaacaugaccaugccccugagcugcaccaagaacaacagccaccacuacaucagagugggcaacgagaccggccuggagcugacccugaccaacaccagccugaucaaccacaaguucugcaaccugagcgacgcccacaagaagaaccuguacgaccacgcccugaugagcaucaucagcaccuuccaccugagcauccccaacuucaaccaguacgaggccaugagcugcgacuucaacgacggcaagaucagcgugcaguacaaccugagccacaccuacgccggcgacaccgccaaccacugcggcaccguggccaacggcgugcugcagaccuucaugagaauggccuggggcggcagcuacaucgcccuggacagcggcagaggcggcugggacugcaucaugaccagcuaccaguaccugaucauccagaacaccaccugggaggaccacugccaguucagcagacccagccccaucggcuaccugggccugcugagccagagaaccagagacaucuacaucagcagaagacugcugggcaccuucaccuggacccugagcgacagcgagggcaaggacacccccggcggcuacugccugaccagauggaugcugaucgaggccgagcugaagugcuucggcaacaccgccguggccaagugcaacgagaagcacgacgaggaguucugcgacaugcugagacuguucgacuucaacaagcaggccauccagagacugaaggccgaggcccagaugagcauccagcugaucaacaaggccgugaacgcccugaucaacgaccagcugaucaugaagaaccaccugagagacaucaugggcauccccuacugcaacuacagcaaguacugcuaccugaaccacaccgugaccggcaagaccagccugcccaagugcugccuggugagcaacggcagcuaccugaacgagacccacuucagcgacgacaucgagcagcaggccgacaacaugaucaccgagaugcugcagaaggaguacauggagagacagggcaagaccccccugggccugguggaccuguucguguucagcaccagcuucuaccugaucagcaucuuccugcaccuggugaagauccccacccacagacacguggugggcaagcccugccccaagccccacagacugaaccacaugggcaucugcagcugcggcuucuacaagcagcccggcgugcccgugagauggaagagaugaggacuaguaauaaggaaacuguaugaaugucugugggcaggaagugaagagauccuucuguaaagguuuuuggaauuaugucugcugaauaauaaacuuuuuugaaauaauaaaucugguagaaaaaugagaucucaaaggcucuuuucagagccaccaaaaaaaaaaaaaaaaaaaaaaaaaaaaaaaaaaaaaaaaaaaaaaaaaaaaaaaaaaaaaaaaagaauu

SEQ ID NO: 39236 - RNA, 1781 nt, Artificial Sequence
  mRNA product Design b-4 (hSL-A64-N5) comprising derived and/or modified sequence from LASV(Z0947-SLE-2011;Clade IV)__AIT17840__GPCmut11 (opt4)
aggagagucccgcagucggcguccagcggcucugcuuguucgugugugugucguugcaggccuuauucaagcuuaccaugggccagaucgugaccuucuuccaggaggugccccacgugaucgaggaggugaugaacaucgugcugaucgcccugagcauccuggccgugcugaagggccuguacaacuucgccaccugcggccuggugggccuggugaccuuccugcugcugugcggcagaagcugcaccaucagccuguacaagggcguguacgagcugcagacccuggagcugaacauggagacccugaacaugaccaugccccugagcugcaccaagaacaacagccaccacuacaucauggugggcaacgagaccggccuggagcugacccugaccaacaccagcaucaucaaccacaaguucugcaaccugagcgacgcccacaagaagaaccuguacgaccacgcccugaugagcaucaucagcaccuuccaccugagcauccccaacuucaaccaguacgaggccaugagcugcgacuucaacggcggcaagaucagcgugcaguacaaccugagccacagcuacgccggcgacgccgccaaccacugcggcaccguggccaacggcgugcugcagaccuucaugagaauggccuggggcggcagcuacaucgcccuggacagcggcagagacagaugggacugcaucaugaccagcuaccaguaccugaucauccagaacaccaccugggaggaccacugccaguucagcagacccagccccaucggcuaccugggccugcugagccagagaaccagagacaucuacaucagcagaagacugcugggcaccuucaccuggacccugagcgacagcgagggcaaggacacccccggcggcuacugccugaccagauggaugcugaucgaggccgagcugaagugcuucggcaacaccgccguggccaagugcaacgagaagcacgacgaggaguucugcgacaugcugagacuguucgacuucaacaagcaggccauccagagacugaaggccgaggcccagaugagcauccagcugaucaacaaggccgugaacgcccugaucaacgaccagcugaucaugaagaaccaccugagagacaucaugggcauccccuacugcaacuacagcaaguacugcuaccugaaccacaccaccaccggcaagaccagccugcccaagugcugccuggugagcaacggcagcuaccugaacgagacccacuucagcgacgacaucgagcagcaggccgacaacaugaucaccgagaugcugcagaaggaguacauggagagacagggcaagaccccccugggccugguggaccuguucguguucagcaccagcuucuaccugaucagcaucuuccugcaccuggugaagauccccacccacagacacaucgugggcaagcccugccccaagccccacagacugaaccacaugggcaucugcagcugcggccuguacaagcagcccggcgugcccgugaaguggaagagaugaggacuaguaauaaggaaacuguaugaaugucugugggcaggaagugaagagauccuucuguaaagguuuuuggaauuaugucugcugaauaauaaacuuuuuugaaauaauaaaucugguagaaaaaugagaucucaaaggcucuuuucagagccaccaaaaaaaaaaaaaaaaaaaaaaaaaaaaaaaaaaaaaaaaaaaaaaaaaaaaaaaaaaaaaaaaagaauu

SEQ ID NO: 39237 - RNA, 1781 nt, Artificial Sequence
  mRNA product Design b-4 (hSL-A64-N5) comprising derived and/or modified sequence from LASV(Josiah;Clade IV)__NP_694870__GPCmut11 (opt5)
aggagagucccgcagucggcguccagcggcucugcuuguucgugugugugucguugcaggccuuauucaagcuuaccaugggccagaucgugaccuucuuucaagaggucccccacguuauugaagaggugaugaacaucgugcugauugcccucagcguccuggcugugcuuaaggggcuguacaauuucgccacaugcggacucguuggccuggugacguuucuucugcucugugggagauccugcaccacaucucuguauaaaggagucuacgaacugcagacccucgagcugaacauggaaacacuuaauaugaccaugccucugagcuguacaaagaacaauucccaucacuauaucauggugggcaacgagaccgggcucgagcugacgcuuaccaauacaucuauuaucaaccauaaauucugcaaucugagcgacgcgcacaagaaaaaccucuacgaucaugcucugauguccaucauuucuaccuuucaccugagcaucccgaauuucaaccaguaugaagccauguccugugacuuuaauggaggcaagauuagcguucaguacaaccucucucacuccuaugccggcgaugcugccaaucauugcgggacaguggcuaacggaguccugcaaaccuucaugcggauggccuggggcgggagcuacaucgcgcuugacucuggacgcggcaacugggauuguauuaugacguccuaccaguaucugaucauucagaauacaaccugggaggaccacugccaguuuagcagacccucuccuaucggguaccucggacugcuuucccaacggacacgcgauaucuauauuagcagacggcugcucggcaccuucaccuggacacuguccgacucugaaggcaaggauacgcccgggggauacugucugacccgcuggaugcucaucgaggccgagcugaaaugcuuuggcaacacagcuguggccaaguguaaugaaaaacaugacgaggaguucugcgauaugcuuagacuguuugacuucaacaagcaggcuauucagcggcucaaagccgaagcgcagaugagcauccaacugauuaauaaggccgugaacgcucuuaucaaugaucagcugaucaugaagaaccaccuccgcgacauuauggggaucccuuauugcaauuacuccaaauauuguuaccugaaccacaccacaaccggaagaacgagccugcccaagugcugucucgucucuaauggcuccuaccugaacgaaacacauuucagcgacgauauugagcagcaagccgacaauaugaucaccgagaugcuucagaaagaauauauggagcggcaggggaagaccccucugggacucguugaucuguuuguguucucuaccagcuuuuaccugauuuccaucuuccuucaccucgugaaaaucccgacacaucgccacauugucggcaagucuugccccaaaccucauagacugaaccacaugggcaucuguagcugcgggcuguauaagcagcccggagugccuguuaaguggaaacggugaggacuaguaauaaggaaacuguaugaaugucugugggcaggaagugaagagauccuucuguaaagguuuuuggaauuaugucugcugaauaauaaacuuuuuugaaauaauaaaucugguagaaaaaugagaucucaaaggcucuuuucagagccaccaaaaaaaaaaaaaaaaaaaaaaaaaaaaaaaaaaaaaaaaaaaaaaaaaaaaaaaaaaaaaaaaagaauu

SEQ ID NO: 39238 - RNA, 1778 nt, Artificial Sequence
  mRNA product Design b-4 (hSL-A64-N5) comprising derived and/or modified sequence from LASV(LP;Clade I)__AAF86701__GPCmut11 (opt5)
aggagagucccgcagucggcguccagcggcucugcuuguucgugugugugucguugcaggccuuauucaagcuuaccaugggccagaucauuaccuucuuucaagaggugccccacgucaucgaagagguuaugaacauugugcugaucgcccucagccugcuugcuauucugaaggggcucuacaauaucgccacaugcggaaucauuggccugguggcguuccuuuuucugugugggaaauccugcucucucacgcugaagggaggcuaugaacugcagacccucgagcugaacauggaaacacuuaauaugaccaugccucugagcuguaccaaaaacuccucucaucacuacaucagagucgggaaugagacaggacucgagcugacacuuaccaacacgagcauuaucaaucauaaguucugcaaccuguccgacgcucacaaaaagaaucucuaugaucaugcccugaugucuauuaucagcaccuuucaccuguccauuccgaacuucaaucaguacgaagccaugagcugugacuuuaacggcggcaagaucucugugcaguauaaucucucccacagcuacgcuggggaugccgcugagcauugcggaacaguugccaacggcgugcugcaaaccuucaugcggauggcguggggagggcgcuauaucgcccuugacucuggcaaagggaauugggauuguauuaugacauccuaccaguaccugaucauucagaacaccacgugggaagaccacugccaguuuagcagacccucuccuaucggauaucucggccugcuuucccaacggacacgcgauauuuacaucagcagacggcugcucggcaccuucacauggacccuguccgacucugaggggaacgagacccccggaggcuauugucugacacgcuggaugcucaucgaagcugagcugaagugcuuugggaauacggccgucgcuaaauguaacgaaaagcaugaugaggaguucugcgacaugcuuagacuguuugauuucaauaaacaggccauucggcgccucaaggcggaagcccagaugagcauccagcugauuaacaaggcugugaaugcccuuaucaacgaccaacugauuaugaaaaaucaccucagagauaucaugggaaucccuuacugcaacuauuccaaguacuguuaucugaaucacaccagcucuggccggacaucccugcccaaaugcugucucauuagcaacgggucuuaccugaaugagacccaguucagcgacgacaucgaacagcaagcugauaacaugauuacagagaugcuucagaaggaauacaucgagcgccagggaaaaaccccucugggccucguugacauuuuuaucuucuccacgucuuuuuaucugauuagcaucuuccugcaucuuaucaagauuccgacacacagacauaucgugggcaaacccugcccuaagccccaccggcucaaucauaugggggucuguuccugcggacuguacaagcacccuggcgugcccaccaaauggaagcgcugaggacuaguaauaaggaaacuguaugaaugucugugggcaggaagugaagagauccuucuguaaagguuuuuggaauuaugucugcugaauaauaaacuuuuuugaaauaauaaaucugguagaaaaaugagaucucaaaggcucuuuucagagccaccaaaaaaaaaaaaaaaaaaaaaaaaaaaaaaaaaaaaaaaaaaaaaaaaaaaaaaaaaaaaaaaaagaauu

SEQ ID NO: 39239 - RNA, 1778 nt, Artificial Sequence
  mRNA product Design b-4 (hSL-A64-N5) comprising derived and/or modified sequence from LASV(803213;Clade II)__AAF86703__GPCmut11 (opt5)
aggagagucccgcagucggcguccagcggcucugcuuguucgugugugugucguugcaggccuuauucaagcuuaccaugggccagaucauuaccuucuuucaagaggugccccacgucaucgaagagguuaugaacauugugcugaucgcccucagccugcuugcuauucugaaggggaucuacaauguggccacaugcggacucuucggccugaucuccuuucuucugcucugugggagaucuugcagcgucacguauaaaggaguguacgaacugcagacccuggagcucaacauggcgaaucugaacaugacaaugccucuuuccuguaccaagaauaacucucaucacuauauuaugguuggcaaugaaacagggcuggagcucacccugacaaacaccagcaucauuaaucauaaauucugcaaccuuuccgacgcucacaagaaaaaucuguacgaucaugcccucaugucuaucauuagcacguuucaccuguccaucccgaacuucaaucaguaugaggccaugagcugugacuuuaacggaggcaagauuucugugcaguacaaucugucccacagcuucgcugucgaugccgcuaaccauugcggcaccaucgccaacggggugcuccaaacauuuaugcggauggcguggggaggcucuuauaucgcccuggacuccgggaagggaaauugggauuguauuaugaccagcuaccaguaccuuaucauucagaacacaaccugggaagaccacugccaguucucucgccccuccccuaucggcuaucuggggcuccugagccaaagaacgcgggauauuuacaucucccgcagacuucugggaacauuuaccuggacacucucugacagcgagggcaaugaagcucccggcggguauugucugacccgguggaugcugaucgaggccgagcucaaaugcuucggaaacaccgcuguugccaaguguaaugaaaaacaugaugaggaauuuugcgacaugcugcgccuuuucgauuucaacaagcaggcgauuaaaagacugaagacagaggcccagauguccauccagcucauuaauaaggcugugaacgcccugaucaaugaccaacuuauuaugaaaaaccaucugcgggauaucaugggcaucccuuacugcaauuauagccgcuacuguuaucucaaccacacggucaccgggaagacaucucugcccagaugcugucugguguccaauggaagcuaccucaacgaaacccacuuuucugacgacauugagcagcaggcugauaauaugaucacagagaugcugcaaaaagaauacauggaccggcagggcaagaccccucuugggcugguggaucucuucgucuuuagcacguccuucuaucugauuucuaucuuucugcaccuuguuaaaauuccgacacaucgccacaucgugggaaagcccugcccuaaaccccauagacucaaccacaugggcauuuguagcugcggccuguacaagcacccuggggugcccgucaaguggaaacggugaggacuaguaauaaggaaacuguaugaaugucugugggcaggaagugaagagauccuucuguaaagguuuuuggaauuaugucugcugaauaauaaacuuuuuugaaauaauaaaucugguagaaaaaugagaucucaaaggcucuuuucagagccaccaaaaaaaaaaaaaaaaaaaaaaaaaaaaaaaaaaaaaaaaaaaaaaaaaaaaaaaaaaaaaaaaagaauu

SEQ ID NO: 39240 - RNA, 1778 nt, Artificial Sequence
  mRNA product Design b-4 (hSL-A64-N5) comprising derived and/or modified sequence from LASV(GA391;Clade III)__CAA36645__GPCmut11 (opt5)
aggagagucccgcagucggcguccagcggcucugcuuguucgugugugugucguugcaggccuuauucaagcuuaccaugggccagaucgugaccuucuuucaagaggucccccacguuauugaagaggugaugaacaucgugcugauugcccucagcauccuggcuauucuuaaggggcuguacaaugucgccacaugcggacucaucggccuggugacguuccuucugcucuccgggagaucuuguagccugaucuauaaaggaaccuacgaacugcagacacucgagcugaacauggaaacccuuaauaugacaaugccucuguccugcaccaagaacaauucucaucacuauauucggguuggcaacgagacagggcucgagcugacccuuacgaauaccagcauccugaaccauaaauuuuguaaucucuccgacgcgcacaagcgcaaccuguacgaucauucucugaugagcauuaucuccacauuccaccucagcauuccgaauuuuaaccaguaugaagcuaugucuugcgacuucaauggaggcaaaaucaccgugcaguacaaccugucccacagcuuugccgucgaugccgcuggccauugugggacacuugccaauggagugcugcaaaccuucaugagaauggcuuggggcgggucuuauauugcccucgacuccggacggggcaacugggauugcaucaugacgagcuaccaguaccugaucauucagaacacaaccugggacgaucacugucaguuuucucgccccuccccuaucggguaucuuggacugcucagccaaagaacacgggacauuuacaucucccgcagacugcugggcaccuucaccuggacacucucugauagcgagggcaaugaaacgcccgggggauauugccugacccgguggaugcuuauugaggcggagcugaaguguuuuggcaacacagccguugcuaagugcaaugaaaaacaugacgaggaguucugugauaugcuccgccuguuugacuucaacaagcaggccaucagacggcuuaaaaccgaagcucagauguccauccagcugauuaauaaggccgugaacgcgcucaucaaugaucaacugauuaugaaaaaccaucugcgcgacaucauggggauuccuuacugcaauuauagcagauacugcuaucucaaccacacaucuaccggaaagacgucccugccccgguguugccuuaucagcaauggcucuuaccugaacgaaacaaaguucagcgacgauaucgagcagcaggccgacaauaugauuaccgagaugcuccaaaaagaauacaucgaucgccaggggaagaccccucugggacuggucgaccuuuuuguguucuccacaucuuuuuaucucauuagcaucuuccugcaccuggugaaaauuccgacccacagacauaucgucggcaagcccuguccuaaaccccaccggcucaaccauaugggcauuugcuccugugggcuguacaagcagccuggaguucccgugagauggaaacgcugaggacuaguaauaaggaaacuguaugaaugucugugggcaggaagugaagagauccuucuguaaagguuuuuggaauuaugucugcugaauaauaaacuuuuuugaaauaauaaaucugguagaaaaaugagaucucaaaggcucuuuucagagccaccaaaaaaaaaaaaaaaaaaaaaaaaaaaaaaaaaaaaaaaaaaaaaaaaaaaaaaaaaaaaaaaaagaauu

SEQ ID NO: 39241 - RNA, 1781 nt, Artificial Sequence
  mRNA product Design b-4 (hSL-A64-N5) comprising derived and/or modified sequence from LASV(AV;Clade V)__CCA30314__GPCmut11 (opt5)
aggagagucccgcagucggcguccagcggcucugcuuguucgugugugugucguugcaggccuuauucaagcuuaccaugggccagaucgugaccuucuuucaagaggucccccacguuauugaagaggugaugaacaucgugcugauugcccucagcauccuggcuguccuuaaggggcuguacaauauugccacaugcggacucaucggccugaucacguuccuucugcucugugggagauccugcucuagcaaccuguauaaaggaguguacgaacugcagucccucgaccugaauauggagacccuuaacaugacaaugccucugucuuguaccaagaauaacagccaucacuauauucggguuggcaaugauacagggcucgaacugacccuuacaaacaccuccauccugaaucauaaauuuugcaaccucucugacgcgcacaagaaagaucuguacgaccaugcucugaugagcauuaucuccacguuccaccucagcauuccgaauuuuaaccaguaugaggccaugucuugugauuucaauggaggcaagaucuccgugcaguacaaccugagccacucuuaugccauugacgcugccaaucauugcggcaccgucgcuaacgggauccuucaaacauuuaugcgcauggccuggggaggcuccuacaucgcgcuggauagcgggagaggaaacugggacuguauuaugaccucuuaccaguaucucaucauucagaauacaaccugggagaaccacugccaguucucccggcccagcccuaucggcuaccuggggcuucugucccaacgcacgagagauauuuauaucucucggcgccuccugggaacauuuaccuggacacugagcgacuccgaaggcaaugccacccccggcggguacugucucaccagauggaugcugaucgaggcugaacuuaagugcuucggaaacacagccguggcuaaauguaaugagaagcaugaugaggaauuuugcgacaugcugcgccucuucgauuuuaacaaacaggccauuagccggcugaagucugaggcgcagauguccauccagcuuauuaauaaagccguuaacgcucugaucaaugaccaacucauuaugaagaaccaccugagagacaucaugggcaucccuuauugcaauuacagcaaguauuguuaccugaaccacacgauuaccgggaaaacaucucuccccaagugcugucuggugagcaauggauccuaccuuaacgaaacccauuucucugaugacaucgagcagcaggccgauaauaugauuacagaaaugcugcaaaaagaguauauggagcggcagggcaagaccccucucgggcuggucgaccuguucguguuuagcacguccuucuaccuuaucagcauuuuucuccgccuggugaaaaucccgacacacagacauauugucggaaagcccugcccuaaaccccaccggcugaaccauaugggcaucuguucuugcggccucuauaagcagccugggguucccgugcgcuggaagagaugaggacuaguaauaaggaaacuguaugaaugucugugggcaggaagugaagagauccuucuguaaagguuuuuggaauuaugucugcugaauaauaaacuuuuuugaaauaauaaaucugguagaaaaaugagaucucaaaggcucuuuucagagccaccaaaaaaaaaaaaaaaaaaaaaaaaaaaaaaaaaaaaaaaaaaaaaaaaaaaaaaaaaaaaaaaaagaauu

SEQ ID NO: 39242 - RNA, 1778 nt, Artificial Sequence
  mRNA product Design b-4 (hSL-A64-N5) comprising derived and/or modified sequence from LASV(Togo/2016/7082;Clade VI)__AMR44577__GPCmut11 (opt5)
aggagagucccgcagucggcguccagcggcucugcuuguucgugugugugucguugcaggccuuauucaagcuuaccaugggccagaucauuaccuucuuucaagaggugccccacgucaucgaagagguuaugaacauugugcugaucgcccucagccugcuugcuauucugaaggggguguacaaugucgccacaugcggaaucaucggccucgugacguuccuguuucuuugugggagauccugcucucugauuuauaaaggaagcuacgaacuccagacccuggagcugaacauggaaacacucaauaugaccaugccucuguccuguacaaagaacucuagccaucacuauauccggguuggcaaugagaccgggcuugagcugacacucaccaacacguccauuaucaaucauaaauucugcaaccugucugacgcgcacaagcgcaaucuuuacgaucaugcucugaugagcauucucuccaccuuucaccugagcaucccgaacuucaaucaguaugaagccaugucuugugacuuuaacggaggcaaaauuuccgugcaguacaaucugagccacgccuaugcugucgaugccgcugagcauugcggcacaguggccaacgggguucuccaaaccuucaugagaauggcguggggaggcucuuacaucgcccuggacuccgggcggggaaauugggauuguaucaugacaagcuaccaguaucuuauuauccagaacaccacgugggaagaccacugccaguuuucucgccccuccccuauuggcuaccuggggcuccugagccaaagaacacgggauaucuauauuucccgcagacuucugggaaccuucacauggacccucucugacagcgagggcaacgagacccccggcggguacugucugacacgguggaugcugaucgaagcugagcucaagugcuuuggaaauacggccguggcuaaguguaacgaaaaacaugaugaggaguucugcgacaugcugcgccuuuuugauuucaauaagcaggccauccagagacugaaauccgaagcgcagaugagcauucaacucaucaacaaggccgucaaugcucugauuaacgaccagcuuaucaugaaaaaucaucugcgggauaugaugggcauuccuuauugcaacuacucuaaguauuguuaccucaaucacaccuccagcgggcgcacaucucugcccaagugcugucuggugagcaacggauccuaccucaaugagacccacuucucugacgacaucgaacagcaagccgauaacaugaucacagagaugcugcagaaagaauauauugacagacagggcaagaccccucuugggcugguggaucucuuugucuucagcacguccuuuuaccugaucagcauuuuccugcaccuuaucaaaauuccgacacaucggcacaucguuggaaagcccugcccuaaaccccaucgccucaaucacaugggcauuuguucuugcggccuguauaagcagccuggggugcccaccagauggaaacggugaggacuaguaauaaggaaacuguaugaaugucugugggcaggaagugaagagauccuucuguaaagguuuuuggaauuaugucugcugaauaauaaacuuuuuugaaauaauaaaucugguagaaaaaugagaucucaaaggcucuuuucagagccaccaaaaaaaaaaaaaaaaaaaaaaaaaaaaaaaaaaaaaaaaaaaaaaaaaaaaaaaaaaaaaaaaagaauu

SEQ ID NO: 39243 - RNA, 1778 nt, Artificial Sequence
  mRNA product Design b-4 (hSL-A64-N5) comprising derived and/or modified sequence from LASV(KAK-428;Clade n.d. (VII))__ANH09740__GPCmut11 (opt5)
aggagagucccgcagucggcguccagcggcucugcuuguucgugugugugucguugcaggccuuauucaagcuuaccaugggccagaucgugaccuucuuucaagaggucccccacguuauugaagaggugaugaacaucgugcugauugcccucagccugcuugcuauccugaaggggcucuacaauuucgccacaugcggagucauuggccugaucacguuucuucugcucugugggagauccugcucugcgaccuauaaaggacaguacgaacugcagacacuggagcucaacauggaaagccugaauaugaccaugccucuuuccuguacaaagaacaauucucaucacuauauccgggcuggcaacaauaccgggcuggagcucacacugaccaacacgagcauuaucucccauaaauucugcaaucuuucugacgcccacaagaaaaaccuguacgaucauacccucaugagcauuaucacaaccuuucaccuguccauuccgaauuucaaccaguaugaggccaugagcugugacuuuaauggaggcaagaucucuauucaauacaaccugucccacagcuaugcuggcgaugccgcucagcauugcgggacaguggccaauggaguucuccagaccuucaugcgcauggcguggggcgggucuuaccuggcccuugacuccggaagacggggcugggauuguaucaucagcucuuaccaguaucugauuauccaaaacacgacaugggacgaucacugccaguuuucccgccccagcccuauuggguaccucggauucgugucccagaagaccagagacaucuauauuucucggcgccugcuuggcacauuuaccuggacccugagcgauuccgaaggccaugacaugcccgggggauacugucucacaagauggaugcugaucgaggcugaucugaaaugcuucggcaacacggccgucgcuaaguguaaugaaaaacacgacgaggaguuuugcgauauguggcgccucuucgacuucaacaagcaggccauccaacggcugaaagcggaagcccagaugaauauucagcuuaucaacaaggcugugaaugcccugauuaacgaccaacucaugaugaagaaucaccugagagauaucauggggauuccuuauugcaacuacagcaaauuuuguuaucuuaauaacaccacaaccggacggacaucucugccccgcugcugucucaucuccaauggcagcuaccugaacgagacccauuucucugacgauaucgaacagcaggcugacaauaugauuacggagaugcugcagaaggaauacauggauagacaagggaaaacaccucucggacugguugaccuuuuuguguucagcaccuccuuuuaucugaucaccauuuuccuccaccuggucaagaucccgacacaucggcacauugugggcaaacccugcccuaagccccaucgccugaaccacaugggcaucuguucuugcgggcuuuacaaacagccuggagugcccgucagauggaagcggugaggacuaguaauaaggaaacuguaugaaugucugugggcaggaagugaagagauccuucuguaaagguuuuuggaauuaugucugcugaauaauaaacuuuuuugaaauaauaaaucugguagaaaaaugagaucucaaaggcucuuuucagagccaccaaaaaaaaaaaaaaaaaaaaaaaaaaaaaaaaaaaaaaaaaaaaaaaaaaaaaaaaaaaaaaaaagaauu

SEQ ID NO: 39244 - RNA, 1778 nt, Artificial Sequence; identical to SEQ ID NO: 39238
  mRNA product Design b-4 (hSL-A64-N5) comprising derived and/or modified sequence from LASV(Pinneo-NIG-1969;Clade I)__AIT17836__GPCmut11 (opt5)

SEQ ID NO: 39245 - RNA, 1778 nt, Artificial Sequence
  mRNA product Design b-4 (hSL-A64-N5) comprising derived and/or modified sequence from LASV(ISTH0009-NIG-2011;Clade II)__AIT17404__GPCmut11 (opt5)
aggagagucccgcagucggcguccagcggcucugcuuguucgugugugugucguugcaggccuuauucaagcuuaccaugggccagaucauuaccuucuuucaagaggugccccacgucaucgaagagguuaugaacauugugcugaucgcccucagccugcuugcuauucugaaggggaucuacaauguggccacaugcggacucuucggccuggucuccuuucuucugcucugugggagaucuugcagcacgaccuauaaaggaguguacgaacugcagacacuggagcucgacauggcgucccugaacaugaccaugccucuuucuuguacaaagaauaacagccaucacuauaucaugguuggcaaugaaaccgggcuggagcucacacugaccaacacguccauuaucaaucauaaauucugcaaccuuucugaugcucacaagaaaaaucuguacgaccaugcccucaugagcauuaucuccaccuuucaccugagcauuccgaacuucaaucaguaugaggccaugucuugugauuuuaacggaggcaagaucuccgugcaguacaaucugagccacgcuuaugccgucgacgcugccaaccauugcggcacaauugcgaauggggugcuccaaaccuucaugcggauggccuggggaggcucuuacaucgcucuggauuccgggaagggaagcugggacuguaucaugacaucuuaccaguaucuuauuauccagaacaccacgugggaagaucacugccaguuuucccgccccagcccuauuggcuaccuggggcuccugucccaaagaacacgggacaucuauauuucucgcagacuucugggaaccuucacauggacccucagcgauuccgagggcaacgaaacccccggcggguacugucugacacgguggaugcugaucgaggccgagcucaaaugcuuuggaaauacggcuguugccaaguguaacgaaaaacaugacgaggaguucugcgauaugcugcgccuuuuugacuucaauaagcaggcgaucagacggcugaaaaccgaagcccagaugagcauucagcucaucaacaaggcugugaaugcccugauuaacgaucaacuuaucaugaagaaucaucugcgcgacauuaugggcaucccuuauugcaacuacucuaaauauuguuaccucaaucacacagucaccgggaagacaucccugcccagaugcugucuggugagcaacggaucuuaccucaaugaaacccacuucagcgacgauaucgagcagcaggcugacaacaugauuacggagcugcuucaaaaagaauauauggaucggcagggcaagacaccucuggggcucguggaccuguuugucuucuccaccucuuuuuaccugaucagcauuuuccuucaccucaucaaaauuccgacccaucgccacaucacaggaaagcccugcccuaaaccccauagacugaaucacaugggcauuuguuccugcggccuguauaagcacccugggguucccgugaaguggaaacggugaggacuaguaauaaggaaacuguaugaaugucugugggcaggaagugaagagauccuucuguaaagguuuuuggaauuaugucugcugaauaauaaacuuuuuugaaauaauaaaucugguagaaaaaugagaucucaaaggcucuuuucagagccaccaaaaaaaaaaaaaaaaaaaaaaaaaaaaaaaaaaaaaaaaaaaaaaaaaaaaaaaaaaaaaaaaagaauu

SEQ ID NO: 39246 - RNA, 1778 nt, Artificial Sequence
  mRNA product Design b-4 (hSL-A64-N5) comprising derived and/or modified sequence from LASV(ISTH2010-NIG-2012;Clade II)__AIT17482__GPCmut11 (opt5)
aggagagucccgcagucggcguccagcggcucugcuuguucgugugugugucguugcaggccuuauucaagcuuaccaugggccagaucauuaccuucuuucaagaggugccccacgucaucgaagagguuaugaacauugugcugaucgcccucagccugcuugcuauucugaaggggaucuacaauguggccacaugcggacucuucggccuggucuccuuucuucugcucugugggagaucuugcagcacgaccuauaaaggaguguacgaacugcagacacuggagcucgacauggcgucccugaacaugaccaugccucuuucuuguacaaagaauaacagccaucacuauaucaugguuggcaaugaaaccgggcuggagcucacacugaccaacacguccauuaucaaucauaaauucugcaaccuuucugaugcucacaagaaaaaucuguacgaccaugcccucaugagcauuaucuccaccuuucaccugagcauuccgaacuucaaucaguaugaggccaugucuugugauuuuaacggaggcaagaucuccgugcaguacaaucugagccacgcuuaugccgucgacgcugccaaccauugcggcacaauugcgaauggggugcuccaaaccuucaugcggauggccuggggaggcucuuacaucgcucuggauuccgggaagggaagcugggacuguaucaugacaucuuaccaguaucuuauuauccagaacauuaccugggaagaucacugccaguuuucccgccccagcccuaucggcuaccuggggcuccugucccaaagaacgcgggacauuuauaucucucgcagacuucugggaacauucaccuggacacucagcgauuccgagggcaacgaaacccccggcggguacugucugacccgguggaugcugaucgaggccgagcucaaaugcuuuggaaauacagcuguugccaaguguaacgaaaaacaugacgaggaguucugcgauaugcugcgccuuuuugacuucaauaagcaggcgauuagacggcugaaaacggaagcccagaugagcauccagcucauuaacaaggcugugaaugcccugaucaacgaucaacuuauuaugaagaaucaucugcgcgacaucaugggcaucccuuauugcaacuacucuaaauauuguuaccucaaucacaccgucacagggaagaccucccugcccagaugcugucuggugagcaacggaucuuaccucaaugaaacacacuucagcgacgauauugagcagcaggcugacaacaugaucaccgagcugcuucaaaaagaauauauugaucggcagggcaagacgccucuggggcucguggaccuguuugucuucuccacaucuuuuuaccugaucagcauuuuccuucaccucguuaaaaucccgacccaucgccacguggugggaaagcccugcccuaaaccccauagacugaaucacaugggcauuuguuccugcggccuguauaagcacccugggguccccgugaaguggaaacggugaggacuaguaauaaggaaacuguaugaaugucugugggcaggaagugaagagauccuucuguaaagguuuuuggaauuaugucugcugaauaauaaacuuuuuugaaauaauaaaucugguagaaaaaugagaucucaaaggcucuuuucagagccaccaaaaaaaaaaaaaaaaaaaaaaaaaaaaaaaaaaaaaaaaaaaaaaaaaaaaaaaaaaaaaaaaagaauu

SEQ ID NO: 39247 - RNA, 1778 nt, Artificial Sequence
  mRNA product Design b-4 (hSL-A64-N5) comprising derived and/or modified sequence from LASV(Lassa virus/H.sapiens-wt/NGA/2015/ISTH_0543;Clade II)__AVO03639__GPCmut11 (opt5)
aggagagucccgcagucggcguccagcggcucugcuuguucgugugugugucguugcaggccuuauucaagcuuaccaugggccagaucauuaccuucuuucaagaggugccccacgucaucgaagagguuaugaacauugugcugaucgcccucagccugcuugcuauucugaaggggaucuacaauguggccacaugcggacucuucggccuggucuccuuucuucugcucugugggagaucuugcagcacgaccuauaaaggaguguacgaacugcagacacuggagcucgacauggcgaaccugaauaugaccaugccucuuuccuguacaaagaacaauucucaucacuauaucaugguuggcaacgaaaccgggcuggagcucacacugaccaauacgagcauuaucaaccauaaauucugcaaucuuuccgaugcucacaagaaaaaccuguacgaccaugcccucaugucuauuaucagcaccuuucaccuguccauuccgaauuucaaccaguaugaggccaugagcugugauuuuaauggaggcaagaucucugugcaguacaaccugucccacacauaugcugucgacgccgcuaaucauugcggcaccauugccaacggggugcuccaaacauucaugcggauggcguggggaggcagcuacaucgcccuggauucugggaagggauccugggacuguaucaugaccagcuaccaguaucuuguuauucagaacacgacaugggaagaucacugccaguuuucucgccccuccccuaucggcuaccuggggcuccugagccaaagaacccgggacauuuauaucucccgcagacuucugggaacauucaccuggacccucucugauagcgagggcaaugaaacacccggcggguacugucugacgcgguggaugcugauugaggcugagcucaaaugcuuuggaaacaccgccguggcuaaguguaaugaaaaacaugacgaggaguucugcgauaugcugcgccuuuuugacuucaacaagcaggccaucagacggcugaaaacagaagcgcagauguccauccagcucauuaauaaggccgucaacgcucugaucaaugaucaacuuauuaugaagaaccaucugcgcgacaucaugggcauuccuuauugcaauuacagcaaauauuguuaccucaaccacaccgugacagggaagaccucucugcccagaugcugucugguguccaauggaagcuaccucaacgaaacgcacuucucugacgauaucgagcagcaggccgacaauaugaucacagagcugcuucaaaaagaauauauugaucggcagggcaagaccccucuggggcucgucgaccuguuuguuuucagcaccuccuuuuaccugaucucuauuuuccuucaccucgugaaaaucccgacacaucgccacauuaccggaaagcccugcccuaaaccccauagacugaaccacaugggcaucuguagcugcggccuguauaagcacccuggggugcccgucaaguggaaacggugaggacuaguaauaaggaaacuguaugaaugucugugggcaggaagugaagagauccuucuguaaagguuuuuggaauuaugucugcugaauaauaaacuuuuuugaaauaauaaaucugguagaaaaaugagaucucaaaggcucuuuucagagccaccaaaaaaaaaaaaaaaaaaaaaaaaaaaaaaaaaaaaaaaaaaaaaaaaaaaaaaaaaaaaaaaaagaauu

SEQ ID NO: 39248 - RNA, 1778 nt, Artificial Sequence
  mRNA product Design b-4 (hSL-A64-N5) comprising derived and/or modified sequence from LASV(Lassa virus/H.sapiens-wt/NGA/2016/ISTH_0009;Clade II)__AVO03571__GPCmut11 (opt5)
aggagagucccgcagucggcguccagcggcucugcuuguucgugugugugucguugcaggccuuauucaagcuuaccaugggccagaucauuaccuucuuucaagaggugccccacgucaucgaagagguuaugaacauugugcugaucgcccucagccugcuugcuauucugaaggggaucuacaauguggccacaugcggacuccugggccuugucuccuuccugcuccugugugggagaucuugcagcacgaccuauaaaggaguguacgaacugcagacacucgagcuggacauggcgucccuuaacaugaccaugccucugucuuguacaaagaauaacagccaucacuauaucaugguuggcaaugaaaccgggcucgagcugacacuuaccaacacguccauuaucaaucauaaauuuugcaaccugucugaugcucacaagaaaaaucucuacgaccaugcccugaugagcauuaucuccaccuuccaccugagcauuccgaacuuuaaucaguaugaggccaugucuugugauuucaacggaggccggaucuccgugcaguacaaucucagccacucuuaugcugucgacgccgcuaaccauugcggcacaauugccaauggggugcugcaaaccuuuaugcgcauggcguggggaggcuccuacaucgcccuugauagcgggaagggaucuugggacuguaucaugacauccuaccaguaucugauuauccagaacaccacgugggaagaucacugccaguucagcagacccuccccuauuggcuaccucgggcugcuuucucaacggacacgcgacaucuauauuagcagacggcugcucggaaccuuuacauggacccuguccgauagcgagggcaacgaaacccccggcggguacugucugacacgcuggaugcucaucgaggcugagcugaagugcuucggaaauacggccguugcuaaauguaacgaaaagcaugacgaggaauuuugcgauaugcuuagacuguucgacuuuaauaaacaggccauccggcgccucaagaccgaggcgcagaugucuauucagcugaucaacaaagccgugaaugcucuuauuaacgaucaacugaucaugaagaaucaccucagagacauuaugggcaucccuuauugcaacuacuccaaguauuguuaccugaaucacacagucaccgggaaaacaagccugccccggugcugucucgugucuaacggaagcuaccugaaugaaacccauuucuccgacgauaucgagcagcaggccgacaacaugauuacggagcuucugcaaaaggaauauaucgaucgccagggcaaaacaccucucgggcugguggaccuguucgucuuuucuaccagcuucuaccuuauuuccaucuuucuccaccugguuaagauuccgacccauagacacaucacaggaaaacccugcccuaagccccaucggcugaaucacaugggcauuuguagcugcggccucuauaaccacccuggggugcccgugaaauggaagcgcugaggacuaguaauaaggaaacuguaugaaugucugugggcaggaagugaagagauccuucuguaaagguuuuuggaauuaugucugcugaauaauaaacuuuuuugaaauaauaaaucugguagaaaaaugagaucucaaaggcucuuuucagagccaccaaaaaaaaaaaaaaaaaaaaaaaaaaaaaaaaaaaaaaaaaaaaaaaaaaaaaaaaaaaaaaaaagaauu

SEQ ID NO: 39249 - RNA, 1778 nt, Artificial Sequence
  mRNA product Design b-4 (hSL-A64-N5) comprising derived and/or modified sequence from LASV(Lassa virus/H.sapiens-wt/NGA/2016/ISTH_0017;Clade II)__AVO03567__GPCmut11 (opt5)
aggagagucccgcagucggcguccagcggcucugcuuguucgugugugugucguugcaggccuuauucaagcuuaccaugggccagaucauuaccuucuuucaagaggugccccacgucaucgaagagguuaugaacauugugcugaucgcccucagccugcuugcuauucugaaggggaucuacaauguggccacaugcggacucuucggccuggucuccuuucuucugcucugugggagaucuugcagcacgaccuauaaaggaguguacgaacugcagacacuggagcucgacauggcgucccugaacaugaccaugccucuuucuuguacaaagaauaacagccaucacuauaucaugguuggcaaugaaaccgggcuggagcucacacugaccaacacguccauuaucaaucauaaauucugcaaccuuucugaugcucacaagaaaaaucuguacgaccaugcccucaugagcauuaucuccaccuuucaccugagcauuccgaacuucaaucaguaugaggccaugucuugugauuuuaacggaggcaagaucuccgugcaguacaaucugagccacacauaugcuauugacgccgcuaaccauugcggcaccaucgccaaugggguccuccaaacauucaugcggauggcguggggaggcucuuacaucgcccuggauuccgggaagggaagcugggacuguauuaugaccucuuaccaguaucuuaucauucagaacacgacaugggaagaucacugccaguuuucccgccccagcccuaucggcuaccuggggcuccugucccaaagaacccgggacauuuauaucucucgcagacuucugggaacauucaccuggacccucagcgauuccgagggcaacgaaacacccggcggguacugucugacgcgguggaugcugaucgaggcugagcucaaaugcuuuggaaauaccgccguggcuaaguguaacgaaaaacaugacgaggaguucugcgauaugcugcgccuuuuugacuucaauaagcaggccauuagacggcugaaaacagaagcgcagaugagcauccagcucauuaacaaggccguuaaugcucugaucaacgaucaacuuauuaugaagaaucaucugcgcgacaucaugggcaucccuuauugcaacuacucuaaauauuguuaccucaaucacaccgugacagggaagaccucccugcccagaugcugucuggucagcaacggaucuuaccucaaugaaacgcacuucagcgacgauauugagcagcaggccgacaacaugaucacagagcugcuucaaaaagaauauauggaucggcagggcaagaccccucuggggcucguggaccuguuuguguucuccaccucuuuuuaccugauuagcaucuuccuucaccucguccgcauuccgacacauagacacguuaucggaaaacccugcccuaagccccaucggcugaaucacaugggcauuuguuccugcggccuguauaaacacccuggggugcccgugaaguggaagcgcugaggacuaguaauaaggaaacuguaugaaugucugugggcaggaagugaagagauccuucuguaaagguuuuuggaauuaugucugcugaauaauaaacuuuuuugaaauaauaaaucugguagaaaaaugagaucucaaaggcucuuuucagagccaccaaaaaaaaaaaaaaaaaaaaaaaaaaaaaaaaaaaaaaaaaaaaaaaaaaaaaaaaaaaaaaaaagaauu

SEQ ID NO: 39250 - RNA, 1778 nt, Artificial Sequence
  mRNA product Design b-4 (hSL-A64-N5) comprising derived and/or modified sequence from LASV(Lassa virus/H.sapiens-wt/NGA/2018/ISTH_0959;Clade II)__AVV65099__GPCmut11 (opt5)
aggagagucccgcagucggcguccagcggcucugcuuguucgugugugugucguugcaggccuuauucaagcuuaccaugggccagaucauuaccuucuuucaagaggugccccacgucaucgaagagguuaugaacauugugcugaucgcccucagccugcuugcuauucugaaggggaucuacaauguggucacaugcggacucuucggccugguguccuuucuucugcucugugggagaucuugcagcacgaccuauaaaggaguuuacgaacugcagacacuggagcucgacauggccucccugaacaugaccaugccucuuucuuguacaaagaauaacagccaucacuauaucauggugggcaaugaaaccgggcuggagcucacacugaccaacacguccauuaucaaucauaaauucugcaaccuuucugaugcgcacaagaaaaaucuguacgaccaugcucucaugagcauuaucuccaccuuucaccugagcauuccgaacuucaaucaguaugaggccaugucuugugauuuuaacggaggcaagaucuccguccaguacaaucugagccacgccuaugcuauugacgccgcuaaccauugcggcacaaucgccaauggggugcuccaaaccuucaugcggauggcguggggaggcucuuacaucgcccuggauuccgggaagggaagcugggacuguauuaugacaucuuaccaguaucuuaucauucagaacaccacgugggaagaucacugccaguuuucccgccccagcccuaucggcuaccuggggcuccugucccaaagaacacgggacauuuauaucucucgcagacuucugggaaccuucacauggacccucagcgauuccgagggcaacgaaacccccggcggguacugucugacacgguggaugcugaucgaggcugagcucaaaugcuuuggaaauacggccguugcuaaguguaacgaaaaacaugacgaggaguucugcgauaugcugcgccuuuuugacuucaauaagcaggccauuagacggcugaaaaccgaagcgcagaugagcauccagcucauuaacaaggccgugaaugcucugaucaacgaucaacuuauuaugaagaaucaucugcgcgacaucaugggcaucccuuauugcaacuacucuaaauauuguuaccucaaucacacagucaccgggaagacaucccugcccagaugcugucuggugagcaacggaucuuaccucaaugaaacccacuucagcgacgauauugagcagcaggccgacaacaugaucacggagcugcuucaaaaagaauauauugaucggcagggcaagacaccucuggggcucguggaccuguuugucuucuccaccucuuuuuaccugaucagcauuuuccuucaccucguuaaaaucccgacccaucgccacgugauuggaaagcccugcccuaaaccccauagacugaaucacaugggcaucuguuccugcggccuguauaagcacccuggggugcccgucaaguggaaacggugaggacuaguaauaaggaaacuguaugaaugucugugggcaggaagugaagagauccuucuguaaagguuuuuggaauuaugucugcugaauaauaaacuuuuuugaaauaauaaaucugguagaaaaaugagaucucaaaggcucuuuucagagccaccaaaaaaaaaaaaaaaaaaaaaaaaaaaaaaaaaaaaaaaaaaaaaaaaaaaaaaaaaaaaaaaaagaauu

SEQ ID NO: 39251 - RNA, 1778 nt, Artificial Sequence
  mRNA product Design b-4 (hSL-A64-N5) comprising derived and/or modified sequence from LASV(LASV003-NIG-2008;Clade II)__AIT17580__GPCmut11 (opt5)
aggagagucccgcagucggcguccagcggcucugcuuguucgugugugugucguugcaggccuuauucaagcuuaccaugggccagaucauuaccuucuuucaagaggugccccacgucaucgaagagguuaugaacauugugcugaucgcccucagccugcuugcuauucugaaggggaucuacaauguggccacaugcggacucuucggccuggucuccuuucuucugcucugugggagaucuugcagcacgaccuauaaaggaguguacgaacugcagacacuggagcucgacauggcgucccugaacaugaccaugccucuuucuuguacaaagaauaacagccaucacuauaucaugguuggcaaugaaaccgggcuggagcucacacugaccaacacguccauuaucaaucauaaauucugcaaccuuucugaugcucacaagaaaaaucuguacgaccaugcccucaugagcauuaucuccaccuuucaccugagcauuccgaacuucaaucaguaugaggccaugucuugugauuuuaacggaggcaagaucuccgugcaguacaaucugagccacacauaugcugucgacgccgcuaaccauugcggcaccauugccaauggggugcuccaaacauucaugcggauggcguggggaggcucuuacaucgcccuggauuccgggaagggaagcugggacuguaucaugaccucuuaccaguaucuuauuauccagaacacgacaugggaagaucacugccaguuuucccgccccagcccuauuggcuaccuggggcuccugucccaaagaacccgggacaucuauauuucucgcagacuucugggaacauucaccuggacccucagcgauuccgagagcaacgaaacacccggcggcuacugucugacgcgguggaugcugaucgaggcugagcucaaaugcuuugggaauaccgccguugcuaaguguaacgaaaaacaugacgaggaguucugcgauaugcugcgccuuuuugacuucaauaagcaggccaucagacggcugaaagcggaagcccagaugucuauucagcucaucaacaaggcugugaaugcccugauuaacgaucaacuuaucaugaagaaucaucugcgcgacauuaugggaaucccuuauugcaacuacuccaaauauuguuaccucaaucacacagucaccggcagaacaagccugccccggugcugucuggugucuaacgggagcuaccucaaugaaacccacuucuccgacgauaucgagcagcaggcugacaacaugauuacggagcugcuucaaaaggaauauauggaucgccagggaaaaacaccucugggccucguggaccuguuugucuucucuaccagcuuuuaccugaucuccauuuuccuucaccucguuaagaucccgacccauagacacgugauugggaaacccugcccuaagccccaucggcugaaucacaugggaaucuguagcugcggccuguauaaacacccuggcgugcccgucaaguggaagcgcugaggacuaguaauaaggaaacuguaugaaugucugugggcaggaagugaagagauccuucuguaaagguuuuuggaauuaugucugcugaauaauaaacuuuuuugaaauaauaaaucugguagaaaaaugagaucucaaaggcucuuuucagagccaccaaaaaaaaaaaaaaaaaaaaaaaaaaaaaaaaaaaaaaaaaaaaaaaaaaaaaaaaaaaaaaaaagaauu

SEQ ID NO: 39252 - RNA, 1778 nt, Artificial Sequence
  mRNA product Design b-4 (hSL-A64-N5) comprising derived and/or modified sequence from LASV(LASV035-NIG-2009;Clade II)__AIT17588__GPCmut11 (opt5)
aggagagucccgcagucggcguccagcggcucugcuuguucgugugugugucguugcaggccuuauucaagcuuaccaugggccagaucauuaccuucuuucaagaggugccccacgucaucgaagagguuaugaacauugugcugaucgcccucagccugcuugcuauucugaaggggaucuacaauguggccacaugcggacucuucggccuggucuccuuucuucugcucugugggagaucuugcagcacgaccuauaaaggaguguacgaacugcagacacuggagcucgacauggcgucccugaacaugaccaugccucuuucuuguacaaagaauaacagccaucacuauaucaugguuggcaaugaaaccgggcuggagcucacacugaccaacacguccauuaucaaucauaaauucugcaaccuuucugaugcucacaagaaaaaucuguacgaccaugcccucaugagcauuaucuccaccuuucaccugagcauuccgaacuucaaucaguaugaggccaugucuugugauuuuaacggaggcaagaucuccgugcaguacaaucugagccacgcuuaugccgucgacgcugccaaccauugcggcacaauugcgaauggggugcuccaaaccuucaugcggauggccuggggaggcucuuacaucgcucuggauuccgggaagggaagcugggacuguaucaugacaucuuaccaguaucuuauuauccagaacaccacgugggaagaucacugccaguuuucccgccccagcccuauuggcuaccuggggcuccugucccaaagaacacgggacaucuauauuucucgcagacuucugggaaccuucacauggacccucagcgauuccgagggcaacgaaacccccggcggguacugucugacacgguggaugcugaucgaggccgagcucaaaugcuuuggaaauacggcuguugccaaguguaacgaaaaacaugacgaggaguucugcgauaugcugcgccuuuuugacuucaauaagcaggcgaucagacggcugaaagccgaagcucagaugagcauucagcucaucaacaaggccgugaaugcucugauuaacgaucaacuuaucaugaagaaucaucugcgcgacauuaugggcaucccuuauugcaacuacucuaaauauuguuaccucaaucacaccgucacagggaagaccucccugcccagaugcugucuggugagcaacggaucuuaccucaaugaaacacacuucagcgacgauaucgagcagcaggccgacaacaugauuaccgagcugcuucaaaaagaauauaucgaucggcagggcaagacgccucuggggcucguggaccuguuugucuucuccacaucuuuuuaccugauuagcaucuuccuucaccucguuaaaauuccgacccaucgccacgugaucggaaagcccugcccuaaaccccauagacugaaucacaugggcauuuguuccugcggccuguauaagcacccuggggugcccgucaaguggaaacggugaggacuaguaauaaggaaacuguaugaaugucugugggcaggaagugaagagauccuucuguaaagguuuuuggaauuaugucugcugaauaauaaacuuuuuugaaauaauaaaucugguagaaaaaugagaucucaaaggcucuuuucagagccaccaaaaaaaaaaaaaaaaaaaaaaaaaaaaaaaaaaaaaaaaaaaaaaaaaaaaaaaaaaaaaaaaagaauu

SEQ ID NO: 39253 - RNA, 1778 nt, Artificial Sequence
  mRNA product Design b-4 (hSL-A64-N5) comprising derived and/or modified sequence from LASV(LASV1000-NIG-2009;Clade II)__AIT17782__GPCmut11 (opt5)
aggagagucccgcagucggcguccagcggcucugcuuguucgugugugugucguugcaggccuuauucaagcuuaccaugggccagaucauuaccuucuuucaagaggugccccacgucaucgaagagguuaugaacauugugcugaucgcccucagccugcuugcuauucugaaggggaucuacaauguggccacaugcggacucuucggccuggucuccuuucuucugcucugugggagaucuugcagcacgaccuauaaaggaguguacgaacugcagacacuggagcucgacauggcgucccugaacaugaccaugccucuuucuuguacaaagaauaacagccaucacuauaucaugguuggcaaugaaaccgggcuggagcucacacugaccaacacguccauuaucaaucauaaauucugcaaccuuucugaugcucacaagaaaaaucuguacgaccaugcccucaugagcauuaucuccaccuuucaccugagcauuccgaacuucaaucaguaugaggccaugucuugugauuuuaacggaggcaagaucuccgugcaguacaaucugagccacacauaugcugucgacgccgcuaaccauugcggcaccauugccaauggggugcuccaaacauucaugcggauggcguggggaggcucuuacaucgcccuggauuccgggaagggaagcugggacuguaucaugaccucuuaccaguaucuuauuauccagaacacgacaugggaagaucacugccaguuuucccgccccagcccuauuggcuaccuggggcuccugucccaaagaacccgggacaucuauauuucucgcagacuucugggaacauucaccuggacccucagcgauuccgagggcaacgaaacacccggcggguacugucugacgcgguggaugcugaucgaggcugagcucaaaugcuuuggaaauaccgccguugcuaaguguaacgaaaaacaugacgaggaguucugcgauaugcugcgccuuuuugacuucaauaagcaggccaucaaaagacugaagacagaagcgcagaugagcauucagcucaucaacaaggccgugaaugcucugauuaacgaucaacuuaucaugaaaaaucaucugcgggacauuaugggcaucccuuauugcaacuacucuaaguauuguuaccucaaucacaccgucacagggaaaaccucccugccccgcugcugucuggugagcaacggaucuuaccucaaugaaacgcacuucagcgacgauaucgagcagcaggccgacaacaugauuacagagcugcuucaaaaggaauauaucgauagacagggcaaaaccccucuggggcucguggaccuguuugucuucuccaccucuuuuuaccugauuagcaucuuccuucaccucguuaagauuccgacacaucggcacguggugggaaaacccugcccuaagccccaucgccugaaucacaugggcaucuguuccugcggccuguauaagcacccugggguccccgugaaauggaagagaugaggacuaguaauaaggaaacuguaugaaugucugugggcaggaagugaagagauccuucuguaaagguuuuuggaauuaugucugcugaauaauaaacuuuuuugaaauaauaaaucugguagaaaaaugagaucucaaaggcucuuuucagagccaccaaaaaaaaaaaaaaaaaaaaaaaaaaaaaaaaaaaaaaaaaaaaaaaaaaaaaaaaaaaaaaaaagaauu

SEQ ID NO: 39254 - RNA, 1778 nt, Artificial Sequence
  mRNA product Design b-4 (hSL-A64-N5) comprising derived and/or modified sequence from LASV(LASV221-NIG-2010;Clade II)__AIT17624__GPCmut11 (opt5)
aggagagucccgcagucggcguccagcggcucugcuuguucgugugugugucguugcaggccuuauucaagcuuaccaugggccagaucauuaccuucuuucaagaggugccccacgucaucgaagagguuaugaacauugugcugaucgcccucagccugcuugcuauucugaaggggaucuacaauguggccacaugcggacucuucggccuggucuccuuucuucugcucugugggagaucuugcagcacgaccuauaaaggaguguacgaacugcagacacuggagcucgacauggcgucccugaacaugaccaugccucuuucuuguacaaagaauaacagccaucacuauaucaugguuggcaaugaaaccgggcuggagcucacacugaccaacacguccauuaucaaucauaaauucugcaaccuuucugaugcucacaagaaaaaucuguacgaccaugcccucaugagcauuaucuccaccuuucaccugagcauuccgaacuucaaucaguaugaggccaugucuugugauuuuaacggaggcaagaucuccgugcaguacaaucugagccacacauaugcuauugacgccgcuaaccauugcggcaccaucgccaaugggguccuccaaacauucaugcggauggcguggggaggcucuuacaucgcccuggauuccgggaagggaagcugggacuguauuaugaccucuuaccaguaucuuaucauucagaacacgacaugggaagaucacugccaguuuucccgccccagcccuaucggcuaccuggggcuccugucccaaagaacccgggacauuuauaucucucgcagacuucugggaacauucaccuggacccucagcgauuccgagggcaacgaaacacccggcggguacugucugacgcgguggaugcugaucgaggcugagcucaaaugcuuuggaaauaccgccguggcuaaguguaacgaaaaacaugacgaggaguucugcgauaugcugcgccuuuuugacuucaauaagcaggccauuagacggcugaaaacagaagcgcagaugagcauccagcucauuaacaaggccguuaaugcucugaucaacgaucaacuuauuaugaagaaucaucugcgcgacaucaugggcaucccuuauugcaacuacucuaaauauuguuaccucaaucacaccgugacagggaagaccucccugcccagaugcugucuggucagcaacggaucuuaccucaaugaaacgcacuucagcgacgauauugagcagcaggccgacaacaugaucacagagaugcugcaaaaagaauauauggaucggcagggcaagaccccucuugggcugguggaccucuuuguguucuccaccucuuuuuaccugauuagcaucuuccugcaccuugucaaaauuccgacacaucgccacguuaucggaaagcccugcccuaaaccccauagacucaaucacaugggcauuuguuccugcggccuguauaagcacccuggggugcccgugaaguggaaacggugaggacuaguaauaaggaaacuguaugaaugucugugggcaggaagugaagagauccuucuguaaagguuuuuggaauuaugucugcugaauaauaaacuuuuuugaaauaauaaaucugguagaaaaaugagaucucaaaggcucuuuucagagccaccaaaaaaaaaaaaaaaaaaaaaaaaaaaaaaaaaaaaaaaaaaaaaaaaaaaaaaaaaaaaaaaaagaauu

SEQ ID NO: 39255 - RNA, 1778 nt, Artificial Sequence
  mRNA product Design b-4 (hSL-A64-N5) comprising derived and/or modified sequence from LASV(LASV237-NIG-2010;Clade II)__AIT17638__GPCmut11 (opt5)
aggagagucccgcagucggcguccagcggcucugcuuguucgugugugugucguugcaggccuuauucaagcuuaccaugggccagaucauuaccuucuuucaagaggugccccacgucaucgaagagguuaugaacauugugcugaucgcccucagccugcuugcuauucugaaggggaucuacaauguggccacaugcggacucuucggccuggucuccuuucuucugcucugugggagaucuugcagcacgaccuauaaaggaguguacgaacugcagacacuggagcucgacauggcgucccugaacaugaccaugccucuuucuuguacaaagaauaacagccaucacuauaucaugguuggcaaugaaaccgggcuggagcucacacugaccaacacguccauuaucaaucauaaauucugcaaccuuucugaugcucacaagaaagaccuguacgaucaugcccucaugagcauuaucuccaccuuucaccugagcauuccgaauuucaaccaguaugaggccaugucuugugacuuuaauggaggcaagaucuccgugcaguacaaccugagccacacauaugcugucgaugccgcuaaucauugcggcaccauugccaacggggugcuccaaacauucaugcggauggcguggggaggcucuuacaucgcccuggacuccgggaagggaagcugggauuguaucaugaccucuuaccaguaucuuauuauccagaauacgacaugggaagaccacugccaguuuucccgccccagcccuauuggcuaccuggggcuccugucccaaagaacccgggauaucuauauuucucgcagacuucugggaacauucaccuggacccucagcgacuccgagggcaacgaaacacccggcggguacugucugacgcgguggaugcugaucgaggcugagcucaaaugcuuuggaaacaccgccguugcuaaguguaaugaaaaacaugaugaggaguucugcgacaugcugcgccuuuuugauuucaacaagcaggccaucagacggcugaaaacagaagcgcagaugagcauucagcucaucaauaaggccgugaacgcucugauuaaugaccaacuuaucaugaagaaccaucugcgcgacauuaugggcaucccuuauugcaauuacucuaaauauuguuaccucaaccacaccgucacagggaagaccucccugcccagaugcugucuggugagcaauggaucuuaccucaacgaaacgcacuucagcgaugacaucgagcagcaggccgauaauaugauuacagagcugcuucaaaaagaauauauggaccggcagggcaagaccccucuggggcucguggaucuguuugucuucuccaccucuuuuuaccugaucagcauuuuccuucaccucaucaaaauuccgacacaucgccacaucaccggaaagcccugcccuaaaccccauagacugaaccacaugggcauuuguuccugcggccuguauaagcacccugggguucccgugaaguggaaacggugaggacuaguaauaaggaaacuguaugaaugucugugggcaggaagugaagagauccuucuguaaagguuuuuggaauuaugucugcugaauaauaaacuuuuuugaaauaauaaaucugguagaaaaaugagaucucaaaggcucuuuucagagccaccaaaaaaaaaaaaaaaaaaaaaaaaaaaaaaaaaaaaaaaaaaaaaaaaaaaaaaaaaaaaaaaaagaauu

SEQ ID NO: 39256 - RNA, 1778 nt, Artificial Sequence
  mRNA product Design b-4 (hSL-A64-N5) comprising derived and/or modified sequence from LASV(LASV253-NIG-2011;Clade II)__AIT17670__GPCmut11 (opt5)
aggagagucccgcagucggcguccagcggcucugcuuguucgugugugugucguugcaggccuuauucaagcuuaccaugggccagaucauuaccuucuuucaagaggugccccacgucaucgaagagguuaugaacauugugcugaucgcccucagccugcuugcuauucugaaggggaucuacaauguggccacaugcggacucuucggccuggucuccuuucuucugcucugugggagaucuugcagcacgaccuauaaaggaguguacgaacugcagacacuggagcucgacauggcgucccugaacaugaccaugccucuuucuuguacaaagaauaacagccaucacuauaucaugguuggcaaugaaaccgggcuggagcucacacugaccaacacguccauuaucaaucauaaauucugcaaccuuucugaugcucacaagaaaaaucuguacgaccaugcccucaugagcauuaucuccaccuuucaccugagcauuccgaacuucaaucaguaugaggccaugucuugugauuuuaacggaggcaagaucuccgugcaguacaaucugagccacacauaugcugucgacgccgcuaaccauugcggcaccauugccaauggggugcuccaaacauucaugcggauggcguggggaggcucuuacaucgcccuggauuccgggaagggaagcugggacuguaucaugaccucuuaccaguaucuuauuauccagaacacgacaugggaagaucacugccaguuuucccgccccagcccuauuggcuaccuggggcuccugucccaaagaacccgggacaucuauauuucucgcagacuucugggaacauucaccuggacccucagcgauuccgagggcaacgaaacacccggcggguacugucugacgcgguggaugcugaucgaggcugagcucaaaugcuuuggaaauaccgccguugcuaaguguaacgaaaaacaugacgaggaguucugcgauaugcugcgccuuuuugacuucaauaagcaggccaucagacggcugaaagcggaagcccagaugagcauucagcucaucaacaaggcugugaaugcccugauuaacgaucaacuuaucaugaagaaucaucugcgcgacauuaugggcaucccuuauugcaacuacucuaaauauuguuaccucaaucacacagucaccgggagaacaucccugccccggugcugucuggugagcaacggaucuuaccucaaugaaacccacuucagcgacgauaucgagcagcaggcugacaacaugauuacggagcugcuucaaaaggaauauaucgaucgccagggcaaaacaccucuggggcucguggaccuguuugucuucuccaccucuuuuuaccugauuagcaucuuccuucaccucguuaagauuccgacccauagacacaucauuggaaaacccugcccuaagccccaucggcugaaucacaugggcaucuguuccugcggccuguauaaacacccuggggugcccgugaaguggaagcgcugaggacuaguaauaaggaaacuguaugaaugucugugggcaggaagugaagagauccuucuguaaagguuuuuggaauuaugucugcugaauaauaaacuuuuuugaaauaauaaaucugguagaaaaaugagaucucaaaggcucuuuucagagccaccaaaaaaaaaaaaaaaaaaaaaaaaaaaaaaaaaaaaaaaaaaaaaaaaaaaaaaaaaaaaaaaaagaauu

SEQ ID NO: 39257 - RNA, 1778 nt, Artificial Sequence
  mRNA product Design b-4 (hSL-A64-N5) comprising derived and/or modified sequence from LASV(LASV254-NIG-2011;Clade II)__AIT17674__GPCmut11 (opt5)
aggagagucccgcagucggcguccagcggcucugcuuguucgugugugugucguugcaggccuuauucaagcuuaccaugggccagaucauuaccuucuuucaagaggugccccacgucaucgaagagguuaugaacauugugcugaucgcccucagccugcuugcuauucugaaggggaucuacaauguggccacaugcggacucuucggccuggucuccuuucuucugcucugugggagaucuugcagcacgaccuauaaaggaguguacgaacugcagacacuggagcucgacaugaccaaccugaauaugacaaugccucuuuccuguaccaagaacaauucucaucacuauaucaugguuggcaacgaaacagggcuggagcucacccugacgaauaccagcauuaucaaccauaaauucugcaaucuuuccgaugcgcacaagaaaaaccuguacaaucaugcucucaugucuauuaucagcacauuucaccuguccauuccgaacuucaaucaguaugaggccaugagcugugacuuuaacggaggcaagaucucugugcaguacaaucugucccacagcuaugccgucgaugcugccaaccauugcggcaccauugcuaacggggugcuccaaacauucaugcggauggccuggggaggcucuuacaucgcgcuggacuccgggaagggaaauugggauuguaucaugaccagcuaccaguaucuuauuauccagaacacgacaugggaagaccacugccaguuuucucgccccuccccuauuggcuaccuggggcuccugagccaaagaacccgggauaucuauauuucccgcagacuucugggaacauucaccuggacccucucugacagcgagggcaaugaaacacccggcggguacugucugacgcgguggaugcugaucgaggccgagcucaaaugcuuuggaaacaccgcuguugccaaguguaaugaaaaacaugaugaggaguucugcgacaugcugcgccuuuuugauuucaacaagcaggcuaucagacggcugaaaacagaagcccaggcgaauauucagcucaucaacaaggccgugaaugcucugauuaacgaccaacuuaucaugaagaaucaucugcgcgauauuaugggcaucccuuauugcaacuacuccaaauauuguuaccucaaucacaccgucacagggaagaccagccugcccagaugcugucuggugucuaacggauccuaccucaaugaaacgcacuucagcgacgacaucgagcagcaggccgauaacaugauuacagagcugcuucaaaaagaauauauggaccggcagggcaagaccccucuggggcucguggaucuguuugucuucucuaccagcuuuuaccugaucuccauuuuccuucaccucguuaaaaucccgacacaucgccacgugauuggaaagcccugcccuaaaccccauagacugaaccacaugggcaucuguucuugcggccuguauaagcacccuggggugcccgucaaguggaaacggugaggacuaguaauaaggaaacuguaugaaugucugugggcaggaagugaagagauccuucuguaaagguuuuuggaauuaugucugcugaauaauaaacuuuuuugaaauaauaaaucugguagaaaaaugagaucucaaaggcucuuuucagagccaccaaaaaaaaaaaaaaaaaaaaaaaaaaaaaaaaaaaaaaaaaaaaaaaaaaaaaaaaaaaaaaaaagaauu

SEQ ID NO: 39258 - RNA, 1778 nt, Artificial Sequence
  mRNA product Design b-4 (hSL-A64-N5) comprising derived and/or modified sequence from LASV(Nig08-A19;Clade III)__ADU56618__GPCmut11 (opt5)
aggagagucccgcagucggcguccagcggcucugcuuguucgugugugugucguugcaggccuuauucaagcuuaccaugggccagaucgugaccuucuuucaagaggucccccacguuauugaagaggugaugaacaucgugcugauugcccucagcauccuggcuauucuuaaggggcuguacaauaucgccacaugcggacucaucggccuggucacguuccuucugcucuccgggagaucuuguagcaugaccuauaaaggaguguacgaacugcagacacuggagcucaacaugaauacccugaacaugacaaugccucuuuccugcaccaagaauaacucucaucacuauauuaugguuggcaaugaaacagggcuggagcucacccugacgaacaccagccuucugcaucacaaauuuuguaaucucuccgacgcgcauaagaaaaaccuguacgaucacacacugaugucuaucauuagcaccuuccaccucuccaucccgaauuuuaaccaguaugaggcuaugagcugcgacuucaauggaggcaagauuacagugcaguacaaccugucucauuccuaugccaucgaugccgcuaaucacuguggcaccgucgccaacggggugcuucaaacguuuaugcggauggcuuggggaggcagcuacauugcccuggacucugggcgcggaaagugggauugcaucaugacauccuaccaguaucucaucauucagaacaccacaugggaagaccauugucaguucagcagacccucuccuaucggcuaccuggggcuucugucccaacggacccgcgauauuuauaucagcagacggcuccugggaaccuuuacauggacgcuguccgacucugagggcaaugaaacccccggcggguacugccucacacgcuggaugcugauugaggcggagcuuaaauguuucggaaacaccgccguugcuaagugcaaugaaaaacacgaugaggaauuuugugacaugcugagacucuucgauuuuaacaagcaggccauccggcgccugaaagcugaggcccagaugagcauccagcuuauuaauaaggcggugaacgcccugaucaaugaccaacucauuaugaagaaccaccugagagauaucaugggcauuccuuauugcaauuacuccaaauauugcuaccugaaccauacaagcaccgggcggacgucucucccccgcuguugccuggucuccaauggaagcuaccuuaacgaaacacacuucucugacgacaucgagcagcaggcugauaauaugaucaccgagaugcugcaaaaggaauaucucgacagacagggcaaaaccccucuggggcugguggaucuuuucguguuuagcacauccuucuaccucauuucuaucuuucugcaucuggucaagauuccgacccaccggcauaucguuggaaaacccuguccuaagccccaccgccucaaccacaugggcauuugcagcuguggccuguauaaacagccuggggugcccgugagauggaagcggugaggacuaguaauaaggaaacuguaugaaugucugugggcaggaagugaagagauccuucuguaaagguuuuuggaauuaugucugcugaauaauaaacuuuuuugaaauaauaaaucugguagaaaaaugagaucucaaaggcucuuuucagagccaccaaaaaaaaaaaaaaaaaaaaaaaaaaaaaaaaaaaaaaaaaaaaaaaaaaaaaaaaaaaaaaaaagaauu

SEQ ID NO: 39259 - RNA, 1781 nt, Artificial Sequence
  mRNA product Design b-4 (hSL-A64-N5) comprising derived and/or modified sequence from LASV(G1180-SLE-2010;Clade IV)__AIT17168__GPCmut11 (opt5)
aggagagucccgcagucggcguccagcggcucugcuuguucgugugugugucguugcaggccuuauucaagcuuaccaugggccagaucgugaccuucuuucaagaggucccccacguuauugaagaggugaugaacaucgugcugauugcccucagcauccuggcuguccuuaaggggcuguacaauuucgccacaugcggacucgugggccugcuuacguuucugcuccugugugggagauccugcaccgcgucucgguauaaaggaguuuacgaacugcagacacucgagcugaacauggaaacccuuaauaugacaaugccucugagcuguaccaagaacaauucccaucacuauauuauggugggcaacgagacagggcucgagcugacccuuacgaauaccucuaucaucaaccauaaauucugcaaucugagcgacgcucacaagaaaaaccucuacgaucaugcccugauguccauuaucucuacauuucaccugagcauuccgaauuucaaccaguaugaagccauguccugugacuuuaauggaggcaagaucagcguccaguacaaccucucucacuccuaugcuggcgaugccgcuaaucauugcgggaccguggccaacggaguucugcaaacauucaugcgcauggcguggggcgggagcuacauugcccuugacucuggacacggcuccugggauuguaucaugaccagcuaccaguaucugauuauccagaacacgacaugggaggaccauugccaguuuucuagacccuccccuaucggguaccucggacugcuuagccaacggacccgcgauauuuauaucuccagacggcugcucggcacauucaccuggacccugucugacagcgaaggcaaggauacacccgggggauacugucugacgcgcuggaugcucauugaggcugagcugaaaugcuuuggcaauaccgccguggcuaaguguaacgaaaaacacgacgaggaguucugcgauaugcuuagacuguuugacuucaauaagcaggccauccagcggcucaaagcggaagcccagauguccauucaacugaucaacaaggcugucaaugcccuuaucaacgaucagcugauuaugaagaaucaccuccgcgacaucauggggauuccuuauugcaacuacagcaaauauuguuaccugaaucauacaaccacaggaaagaccucucugcccaaaugcugucucguguccaacggcagcuaccugaaugaaacgcacuucucugacgauaucgagcagcaagcugacaacaugauuacagagaugcuucagaaggaauauauggagagacaggggaaaaccccucugggacucguggaucuguuugucuucagcaccuccuuuuaccugaucucuaucuuccuucaucucguuaagauuccgacacaccggcauaucgugggcaaaagcugccccaagccucaccgccugaaucacaugggcauuuguuccugcgggcuguauaagcagcccggagugccugucaaauggaagagaugaggacuaguaauaaggaaacuguaugaaugucugugggcaggaagugaagagauccuucuguaaagguuuuuggaauuaugucugcugaauaauaaacuuuuuugaaauaauaaaucugguagaaaaaugagaucucaaaggcucuuuucagagccaccaaaaaaaaaaaaaaaaaaaaaaaaaaaaaaaaaaaaaaaaaaaaaaaaaaaaaaaaaaaaaaaaagaauu

SEQ ID NO: 39260 - RNA, 1781 nt, Artificial Sequence
  mRNA product Design b-4 (hSL-A64-N5) comprising derived and/or modified sequence from LASV(G1442-SLE-2011;Clade IV)__AIT17180__GPCmut11 (opt5)
aggagagucccgcagucggcguccagcggcucugcuuguucgugugugugucguugcaggccuuauucaagcuuaccaugggccagaucgugaccuucuuucaagaggucccccacguuauugaagaggugaugaacaucgugcugauugcccucagcauccuggcuguccuuaaggggcuguacaauguggccacaugcggacucauuggccugguuacguuccuucugcucugugggagauccugcaccacaacccuguauaaaggaguguacgaacugcagacacucgagcugaacauggaaacccuuaauaugacaaugccucugucuuguaccaagaacaauagccaucacuauauccgggucggcaacgagacggggcucgagcugacccuuacaaauaccuccaucauuaaccauaaauuuugcaaucugucugacgcgcacaagaaaaaccucuacgaucaugcucugaugagcaucauuuccacauuccaccugucuaucccgaauuuuaaccaguaugaagccaugagcugugacuucaauggaggcaagauuuccgugcaguacaaccucagccacucuuaugccggcgaugcugccaaucauugcgggaccguugcuaacggagugcugcaaacguuuaugcgcauggccuggggcggguccuacaucgcgcuugacagcggaagaggcaacugggauuguauuaugacaucuuaccaguaucugaucauccagaauaccacaugggacgaucacugccaguucucccggcccagcccuauuggguaccucggacugcuuucucaacgcaccagagacgucuauaucucccggcgccugcucggcaccuuuacauggacgcugagcgauuccgagggcaaggacacccccgggggauacugucugacaagauggaugcucauugaagccgagcugaaaugcuucggcaacaccgcuguggccaaguguaaugagaaacaugaugaagaguuuugcgacaugcuucggcuguucgauuuuaacaagcaggcuauccagcgccucaaagccgaagcgcagaugucuauucaacugaucaauaaggccgugaacgcucuuaucaaugaccagcugauuaugaagaaccaccucagagacaucauggggauuccuuauugcaauuacagcaaauauuguuaccugaacaauacagccaccggaaagacgucccugcccaaaugcugucucaucagcaacggcucuuaccugaaugagacacacuucuccgaugacauugaacaggaggcugauaacaugaucaccgagaugcuucaaaaggaauauauggagcggcaggggaaaaccccucugggacucgucgaccuguucguuuuuagcacaucuuucuaccugaucagcauuuuucuucaucucgugaagaucccgacccaccgccauauugugggcaaauccugccccaagccucacagacugaaucauaugggcaucuguucuugcgggcuguauaagcagcccggagucccugugcgguggaaacgcugaggacuaguaauaaggaaacuguaugaaugucugugggcaggaagugaagagauccuucuguaaagguuuuuggaauuaugucugcugaauaauaaacuuuuuugaaauaauaaaucugguagaaaaaugagaucucaaaggcucuuuucagagccaccaaaaaaaaaaaaaaaaaaaaaaaaaaaaaaaaaaaaaaaaaaaaaaaaaaaaaaaaaaaaaaaaagaauu

SEQ ID NO: 39261 - RNA, 1781 nt, Artificial Sequence
  mRNA product Design b-4 (hSL-A64-N5) comprising derived and/or modified sequence from LASV(G3010-SLE-2013;Clade IV)__AIT17344__GPCmut11 (opt5)
aggagagucccgcagucggcguccagcggcucugcuuguucgugugugugucguugcaggccuuauucaagcuuaccaugggccagaucgugaccuucuuucaagaggucccccacguuauugaagaggugaugaacaucgugcugauugcccucagcauccuggcuguccuuaaggggcuguacaauuucgccacaugcggacucgugggccugguuacguuucuucugcucugugggagauccugcaccacaucucuguauaaaggaguguacgaacugcagacccucgagcugaacauggaaacacuuaauaugaccaugccucugagcuguacaaagaacaauucccaucacuauauuauggucggcaacgagaccgggcucgagcugacgcuuaccaauacaucuaucaucaaccauaaauucugcaaucugagcgacgcgcacaagaaaaaccucuacaaucaugcucugauguccauuaucucuaccuuucaccugagcauuccgaacuucaaucaguaugaagccauguccugugauuuuaacggaggcaagaucagcgugcaguacaaucucucucacuccuaugccggcgacgcugccagccauugcgggacaguugcuaacggagugcugcaaaccuucaugcggauggccuggggcgggucuuacauugcgcuugauuccggauacggcaagugggacuguaucaugacgagcuaucaguaccugauuauccagaacacaaccugggaggaucacugccaguuuucucgccccuccccuaucggguaucucggacugcuuagccaaagaacacgggacauuuacaucucccgcagacugcucggcaccuucaccuggacacugucugauagcgaaggcaaagacacgcccgggggauauugucugacccgguggaugcucauugaggccgagcugaagugcuuuggcaauacagcugucgccaaauguaacgaaaagcaugaugaggaguucugcgacaugcuucgccuguuugauuucaauaaacaggcuauccagagacucaagaccgaagcccagauguccauucaacugaucaacaaggcggugaaugcccuuaucaacgaccagcugauuaugaaaaaucaccuccgggauaucauggggauuccuuacugcaacuauagcaaguacuguuaccugaaucacacaaccacgggaaaaacaucucugcccaagugcugucucguguccaacggcagcuaucugaaugaaacccauuucucugacgacaucgagcagcaagcugauaacaugauuaccgagaugcuucagaaagaauacauggagcgccaggggaagacaccucugggacucgucgaccuguuuguuuucagcaccuccuuuuaucugaucucuaucuuccuucaccucgugaaaauuccgacacauagacacaucgugggcaagagcugccccaagccucaucggcugaaucacaugggcauuuguuccugcgggcuguacaaacagcccggagucccugugcgcuggaagagaugaggacuaguaauaaggaaacuguaugaaugucugugggcaggaagugaagagauccuucuguaaagguuuuuggaauuaugucugcugaauaauaaacuuuuuugaaauaauaaaucugguagaaaaaugagaucucaaaggcucuuuucagagccaccaaaaaaaaaaaaaaaaaaaaaaaaaaaaaaaaaaaaaaaaaaaaaaaaaaaaaaaaaaaaaaaaagaauu

SEQ ID NO: 39262 - RNA, 1781 nt, Artificial Sequence
  mRNA product Design b-4 (hSL-A64-N5) comprising derived and/or modified sequence from LASV(G502-SLE-2009;Clade IV)__AIT17126__GPCmut11 (opt5)
aggagagucccgcagucggcguccagcggcucugcuuguucgugugugugucguugcaggccuuauucaagcuuaccaugggccagaucgugaccuucuuucaagaggucccccacguuauugaagaggugaugaacaucgugcugauugcccucagcauccuggcuguccuuaaggggcuguacaauuucgccacaugcggacucgugggccugcuuacguuucugcuccugugugggagauccugcaccacaggacuguauaaaggcguuuacgaacuccagacccuggagcuuaacauggaaacacugaauaugaccaugccucucucuuguacaaagaacaauagccaucacuauauuaugguggggaacgagaccggacuggagcuuacgcugaccaauacauccaucaucaaccauaaauucugcaaucucucugacgcgcacaagaaaaaccuguacgaucaugcucugaugagcauuaucuccaccuuucaccucucuauuccgaauuucaaccaguaugaagccaugagcugugacuuuaauggcggcaagaucuccguccaguacaaccugagccacucuuaugccggggaugcugccgaccauugcggaacaguggcuaauggcguucuucaaaccuucaugcggauggccuggggaggguccuacauugcgcuggauagcggccgcgggagaugggacuguaucaugacgucuuaccaguaucucauuauccagaacacaaccugggaggaucacugccaguuuucccggcccagcccuaucggauaccugggccuucugucucaacgcacaagagacauuuauaucucccggcgccuccugggcaccuucaccuggacacugagcgauuccgaagggaaggacacgcccggaggcuacugucucaccagauggaugcugauugaggccgagcuuaaaugcuuugggaacacagcuguggccaaguguaaugaaaaacaugaugaggaguucugcgacaugcugcggcucuuugauuucaacaagcaggcuauccagcgccugaaagccgaagcgcagaugucuauucaacuuaucaauaaggccgucaacgcucugaucaaugaccagcucgugaugaagaaccaccugagagacauuaugggaaucccuuauugcaauuacagccgguauuguuaccugaaccacaccacaaccggccgcacgucccuccccaaaugcugucuggugagcaaugggucuuaccuuaacgaaacacauuucuccgaugacauugagcagcaagccgauaauaugaucaccgagaugcugcagaaggaauauauggagagacagggaaaaaccccucucggccuggucgaccuguuuguuuucagcacaucuuuuuaccuuauuagcaucuuccuccaccuggugaagaucccgacccaucggcacauugugggcaaauccugccccaagccucaucgccugaaccacauggggaucuguucuugcggacucuauaaacagcccggcgucccugugaaguggaagagaugaggacuaguaauaaggaaacuguaugaaugucugugggcaggaagugaagagauccuucuguaaagguuuuuggaauuaugucugcugaauaauaaacuuuuuugaaauaauaaaucugguagaaaaaugagaucucaaaggcucuuuucagagccaccaaaaaaaaaaaaaaaaaaaaaaaaaaaaaaaaaaaaaaaaaaaaaaaaaaaaaaaaaaaaaaaaagaauu

SEQ ID NO: 39263 - RNA, 1781 nt, Artificial Sequence
  mRNA product Design b-4 (hSL-A64-N5) comprising derived and/or modified sequence from LASV(G733-SLE-2010;Clade IV)__AIT17154__GPCmut11 (opt5)
aggagagucccgcagucggcguccagcggcucugcuuguucgugugugugucguugcaggccuuauucaagcuuaccaugggccagaucgugaccuucuuucaagaggucccccacguuauugaagaggugaugaacaucgugcugauugcccucagcauccuggcuguccuuaaggggcuguacaauuucgccacaugcggaauugugggccucguuuccuuucugcuucugugugggagaucuugcacgaccagccucuauaaaggaguguacgaacugcagacacuggagcucaacauggaaacccugaauaugacaaugccucuuuccuguaccaagaacaauucucaucacuauaucauggucggcaacgagacagggcuggagcucacccugacgaauaccagcaucauuaaccauaaauucugcaaucuuuccgacgcgcacaagaaaaaccuguacgaucaugcucucaugucuaucauuagcacauuucaccuguccaucccgaauuucaaccaguaugaagccaugagcugugacuuuaauggaggcaagauuucugugcaguacaaccugucccacagcuaugccggcgaugcugccaaucauugcgggaccaucgcuaacggaguucuccaaacauucaugcggauggccuggggcgggucuuacauugcgcuggacuccggacgcgauagaugggacuguaucaugaccagcuaccaguaucuuaucauucagaacacgacaugggaggaucacugccaguuuucucggcccuccccuaucggcuaccuggggcuccugagccaacgcaccagagacauuuauaucucccggcgccuucugggaacauucaccuggacccucucugauagcgaaggcaaggacacacccggcggguacugucugacgagauggaugcugauugaggccgagcucaaaugcuuuggaaauaccgcuguggccaaguguaacgaaaaacaugaugaggaguucugcgacaugcugcggcuuuuugauuucaauaagcaggcuauccagcgccugaaagccgaagcgcagauguccauccaacucauuaacaaggccgucaaugcucugaucaacgaccagcuuauuaugaagaaucaccugagagacaucaugggcauuccuuauugcaacuacagcaaauauuguuaccucaaucacacaaccacagggaagaccucucugcccaaaugcugucugguguccaacggaagcuaccucaaugaaacgcauuucucugaugacaucgagcagcaagccgauaacaugaucacagagaugcugcagaaggaauauauggagcggcagggcaaaaccccucuugggcugguggaccucuuugucuucagcaccuccuuuuaccugauuucuaucuuccugcaccuuguuaagauuccgacacaucgccacguggugggaaaaagcugccccaagccucauagacucaaucacaugggcaucuguuccugcggccuguaugggcagcccggagucccugugaaguggaaacggugaggacuaguaauaaggaaacuguaugaaugucugugggcaggaagugaagagauccuucuguaaagguuuuuggaauuaugucugcugaauaauaaacuuuuuugaaauaauaaaucugguagaaaaaugagaucucaaaggcucuuuucagagccaccaaaaaaaaaaaaaaaaaaaaaaaaaaaaaaaaaaaaaaaaaaaaaaaaaaaaaaaaaaaaaaaaagaauu

SEQ ID NO: 39264 - RNA, 1781 nt, Artificial Sequence
  mRNA product Design b-4 (hSL-A64-N5) comprising derived and/or modified sequence from MOPV/LASV reassortant(IGS-1;Clade IV)__AFY05576__GPCmut11 (opt5)
aggagagucccgcagucggcguccagcggcucugcuuguucgugugugugucguugcaggccuuauucaagcuuaccaugggccagaucgugaccuucuuucaagaggucccccacguuauugaagaggugaugaacaucgugcugauugcccucagcguccuggcugugcuuaaggggcuguacaauuucgccacaugcggacucguuggccuggugacguuucuucugcucugugggagauccugcaccacaucucuguauaaaggagucuacgaacugcagacccucgagcugaacauggaaacacuuaauaugaccaugccucugagcuguacaaagaacaauucccaucacuauaucauggugggcaacgagaccgggcucgagcugacgcuuaccaauacaucuauuaucaaccauaaauucugcaaucugagcgacgcgcacaagaaaaaccucuacgaucaugcucugauguccaucauuucuaccuuucaccugagcaucccgaauuucaaccaguaugaagccauguccugugacuuuaauggaggcaagauuagcguucaguacaaccucucucacuccuaugccggcgaugcugccaaucauugcgggacaguggcuaacggaguccugcaaaccuucaugcggauggccuggggcgggagcuacaucgcgcuugacucuggacgcggcaacugggauuguauuaugacguccuaccaguaucugaucauucagaauacaaccugggaggaccacugccaguuuagcagacccucuccuaucggguaccucggacugcuuucccaacggacacgcgauaucuauauuagcagacggcugcucggcaccuucaccuggacacuguccgacucugaaggcgaggauacgcccgggggauacugucugacccgcuggaugcucaucgaggccgaacugaagugcuuuggcaacacagcuguggccaaauguaaugagaagcaugacgaagaguucugcgauaugcuuagacuguuugacuucaacaaacaggcuauucagcggcucaaggccgaagcgcagaugagcauccaacugauuaauaaagccgugaacgcucuuaucaaugaucagcugaucaugaagaaccaccuccgcgacauuauggggaucccuuauugcaauuacuccaaguauuguuaccugaaccacaccacaaccggaagaacgagccugcccaaaugcugucucgucucuaauggcuccuaccugaacgagacacauuucagcgacgauauugagcagcaagccgacaauaugaucaccgaaaugcuucagaaggaguauauggaacggcaggggaaaaccccucugggacucguugaucuguuuguguucucuaccagcuuuuaccugauuuccaucuuccuucaccucgugaagaucccgacacaucgccacauugucggcaaaucuugccccaagccucauagacugaaccacaugggcaucuguagcugcgggcuguauaaacagcccggagugccuguuaaguggaagcggugaggacuaguaauaaggaaacuguaugaaugucugugggcaggaagugaagagauccuucuguaaagguuuuuggaauuaugucugcugaauaauaaacuuuuuugaaauaauaaaucugguagaaaaaugagaucucaaaggcucuuuucagagccaccaaaaaaaaaaaaaaaaaaaaaaaaaaaaaaaaaaaaaaaaaaaaaaaaaaaaaaaaaaaaaaaaagaauu

SEQ ID NO: 39265 - RNA, 1781 nt, Artificial Sequence
  mRNA product Design b-4 (hSL-A64-N5) comprising derived and/or modified sequence from LASV(LM765-SLE-2012;Clade IV)__AIT17814__GPCmut11 (opt5)
aggagagucccgcagucggcguccagcggcucugcuuguucgugugugugucguugcaggccuuauucaagcuuaccaugggccagaucgugaccuucuuucaagaggucccccacguuauugaagaggugaugaacaucgugcugauugcccucagcauccuggcuguccuuaaggggcuguacaauuucgccacaugcggacucgugggccugguuacguuucuucugcucugugggagauccugcaccacaucucuguauaaaggaguguacgaacugcagacccucgagcugaacauggaaacacuuaauaugaccaugccucugagcuguacaaagaacaauucccaucacuauauuauggucggcaacgagaccgggcucgagcugacgcuuaccaauacaucuaucaucgaccauaaauucugcaaccugagcgaugcgcaccggaagaaucucuacgaccaugcucugauguccauuaucucuaccuuucaccugagcauuccgaacuucaaucaguaugaagccauguccugugauuuuaacggaggcaaaaucagcgugcaguacaaucucucucacuccuaugccaaggacgcugccgaucauugcggcacaguugcuaacggggugcugcaaaccuucaugcgcauggccuggggaggcagcuacauugcgcuugacucugggagaggacggugggauuguaucaugacguccuaccaguaucugauuauccagaauacaaccugggaggaccacugccaguuuagccgccccucuccuaucggcuaccucgggcugcuuucccaaagaacacgggauauuuauaucagccgcagacugcucggaaccuucaccuggacacuguccgacucugaaggcaaggauacgcccggcggguacugucugacccgguggaugcucauugaggccgagcugaaaugcuuuggaaacacagcugucgccaaguguaacgaaaaacaugacgaggaguucugcgauaugcuucgccuguuugacuucaauaagcaggcuauccagagacucaaagccgaagcgcagaugagcauucaacugaucaacaaggccgugaaugcucuuaucaacgaccagcugauuaugaagaaucaccuccgggauaucaugggcauuccuuauugcaacuacuccaaauauuguuaccugaaucacaccacaaccgggaagacgagccugcccaaaugcugucucgugucuaacggauccuaccugaaugaaacacauuucagcgacgauaucgagcagcaagccgacaacaugauuaccgagaugcuucagaaggaauauauggagcgccagggcaaaaccccucuggggcucgucgaucuguuuguuuucucuaccagcuuuuaccugaucuccaucuuccuucaccucgugaagauuccgacacauagacacaucgugggaaaacccugcccuaagccccaucggcugaaucacaugggcauuuguucuugcggccuguauaagcagccugggguccccgugaaauggaagcgcugaggacuaguaauaaggaaacuguaugaaugucugugggcaggaagugaagagauccuucuguaaagguuuuuggaauuaugucugcugaauaauaaacuuuuuugaaauaauaaaucugguagaaaaaugagaucucaaaggcucuuuucagagccaccaaaaaaaaaaaaaaaaaaaaaaaaaaaaaaaaaaaaaaaaaaaaaaaaaaaaaaaaaaaaaaaaagaauu

SEQ ID NO: 39266 - RNA, 1781 nt, Artificial Sequence
  mRNA product Design b-4 (hSL-A64-N5) comprising derived and/or modified sequence from LASV(LM776-SLE-2012;Clade IV)__AIT17824__GPCmut11 (opt5)
aggagagucccgcagucggcguccagcggcucugcuuguucgugugugugucguugcaggccuuauucaagcuuaccaugggccagaucgugaccuucuuucaagaggucccccacguuauugaagaggugaugaacaucgugcugauugcccucagcauccuggcuguccuuaaggggcuguacaauuucgccacaugcggacucgugggccugguuacguuucuucugcucugugggagauccugcaccacaucuguguauaaaggagucuacgaacugcagacccuggagcucaacauggaaacacugaauaugaccaugccucuuagcuguacaaagaacaauucccaucacuauauuauggugggcaacgagaccgggcuggagcucacgcugaccaauacaucuaucaucaaccauaaauucugcaaucuuagcgacgcgcacaagaaaaaccuguacgaucaugcucucauguccauuaucucuaccuuucaccugagcauuccgaauuucaaccaguaugaagccauguccugugacuuuaauggaggcaagaucagcguucaguacaaccugucucacuccuaugccggcgaugcugccaaucauugcgggacaguggcuaacggaguccuccaaaccuucaugcggauggccuggggcgggagcuacauugcgcuggacucuggacacggcaagugggauuguaucaugacguccuaccaguaucuuauuauccagaacacaaccugggaggaccauugccaguuuagccgccccucuccuaucggguaccugggacuccugucccaaagaacacgggauauuuauaucagccgcagacuucugggcaccuucaccuggacacucuccgacucugaaggcaaagauacgcccgggggauacugucugacccgguggaugcugauugaggccgagcucaagugcuuuggcaauacagcuguggccaaauguaacgaaaagcacgacgaggaguucugcgauaugcugcgccuuuuugacuucaauaaacaggcuauccagagacugaaggccgaagcgcagaugagcauucaacucaucaacaaggccgugaaugcucugaucaacgaucagcuuauuaugaaaaaucaucugcgggacaucauggggauuccuuauugcaacuacuccaaguauuguuaccucaaucacaccacaaccggaaaaacgagccugcccaagugcugucuggucucuaacggcuccuaccucaaugaaacacacuucagcgacgauaucgagcagcaagccgacaacaugauuaccgagaugcugcagaaagaauauauggagcgccaggggaagaccccucuuggacugguugaucucuuuguguucucuaccagcuuuuaccugaucuccaucuuccugcaucuugugaaaauuccgacacacagacauaucgucggcaagucuugccccaagccucaccggcucaaucacaugggcauuuguagcugcgggcuguauaaacagcccggagugccuguucgcuggaagagaugaggacuaguaauaaggaaacuguaugaaugucugugggcaggaagugaagagauccuucuguaaagguuuuuggaauuaugucugcugaauaauaaacuuuuuugaaauaauaaaucugguagaaaaaugagaucucaaaggcucuuuucagagccaccaaaaaaaaaaaaaaaaaaaaaaaaaaaaaaaaaaaaaaaaaaaaaaaaaaaaaaaaaaaaaaaaagaauu

SEQ ID NO: 39267 - RNA, 1781 nt, Artificial Sequence
  mRNA product Design b-4 (hSL-A64-N5) comprising derived and/or modified sequence from LASV(Mad39;Clade IV)__ANH09722__GPCmut11 (opt5)
aggagagucccgcagucggcguccagcggcucugcuuguucgugugugugucguugcaggccuuauucaagcuuaccaugggccagaucgugaccuucuuucaagaggucccccacguuauugaagaggugaugaacaucgugcugauugcccucagcauccuggcuguccuuaaggggcuguacaauguggccacaugcggacucauuggccugguuacguuccuucugcucugugggagauccugcaccacaacccuguauaaaggaguguacgaacugcaggcgcucgagcugaacauggaaacacuuaauaugaccaugccucugucuuguacaaagaacaauagccaucacuauauccgggucggcaacgagaccgggcucgagcugacgcuuaccaauacaucccugaucaaccauaaauuuugcaaucucucugacgcucacaagaaaaaccuguacgaucaugcccugaugagcauuaucuccaccuuccaccucucuauuccgaauuuuaaccaguaugaagccaugagcugugacuucaaugauggaaagaucuccgugcaguacaaccugagccacacauaugcuggcgacaccgccaaucauugcggcacgguugcuaacggggugcuucaaacauuuaugcgcauggccuggggaggcucuuacauugcgcuggauuccgggagaggaggcugggacuguaucaugaccagcuaccaguaucucauuauccagaacacaaccugggaggaucacugccaguucucucggcccuccccuaucggguaccugggacuucugagccaacgcaccagagacauuuauaucucucggcgccuccugggcacauuuacguggacccuguccgauagcgaaggcaaggacacacccgggggauacugucucaccagauggaugcugauugaggccgagcuuaaaugcuucggcaauacagcugucgccaaguguaacgaaaaacaugaugaggaauuuugcgacaugcugcgccucuucgauuuuaauaagcaggcuauccagcggcugaaagccgaggcgcagauguccauucaacuuaucaacaaggccgugaaugcucugaucaacgaccagcucauuaugaagaaucaccugagagacaucauggggauuccuuauugcaacuacucuaaauauuguuaccugaaucacaccgugacgggaaagacaagccuccccaaaugcugucuggucuccaacggcagcuaccuuaaugaaacccauuucucugaugacaucgagcagcaagccgauaacaugauuaccgagaugcugcagaaggaauauauggagcggcaggggaaaacaccucucggacugguugaccuguucguguuuuccaccagcuucuaccuuaucucuaucuuucuccaccuggugaagauuccgacacaucgccacgucgugggcaaacccugcccuaagccccauagacugaaucacaugggcaucuguagcugcggguucuauaagcagccuggaguucccgugcgguggaaacgcugaggacuaguaauaaggaaacuguaugaaugucugugggcaggaagugaagagauccuucuguaaagguuuuuggaauuaugucugcugaauaauaaacuuuuuugaaauaauaaaucugguagaaaaaugagaucucaaaggcucuuuucagagccaccaaaaaaaaaaaaaaaaaaaaaaaaaaaaaaaaaaaaaaaaaaaaaaaaaaaaaaaaaaaaaaaaagaauu

SEQ ID NO: 39268 - RNA, 1781 nt, Artificial Sequence
  mRNA product Design b-4 (hSL-A64-N5) comprising derived and/or modified sequence from LASV(Z0947-SLE-2011;Clade IV)__AIT17840__GPCmut11 (opt5)
aggagagucccgcagucggcguccagcggcucugcuuguucgugugugugucguugcaggccuuauucaagcuuaccaugggccagaucgugaccuucuuucaagaggucccccacguuauugaagaggugaugaacaucgugcugauugcccucagcauccuggcuguccuuaaggggcuguacaauuucgccacaugcggacucgugggccugguuacguuucuucugcucugugggagauccugcaccauuucucuguauaaaggaguguacgaacugcagacacucgagcugaacauggaaacccuuaauaugacaaugccucugagcuguaccaagaacaauucccaucacuauaucauggucggcaacgagacagggcucgagcugacccuuacgaauaccucuaucauuaaccauaaauucugcaaucugagcgacgcgcacaagaaaaaccucuacgaucaugcucugauguccaucauuucuacauuucaccugagcaucccgaauuucaaccaguaugaagccauguccugugacuuuaauggaggcaagauuagcgugcaguacaaccucucucacuccuaugccggcgaugcugccaaucauugcgggaccguugcuaacggagugcugcaaacauucaugcggauggccuggggcgggagcuacaucgcgcuugacucuggacgcgauagaugggacuguauuaugaccuccuaccaguaucugaucauccagaacacgacaugggaggaucacugccaguuuagccggcccucuccuauuggcuaccucgggcugcuuucccaacgcaccagagacaucuauauuagccggcgccugcucggaacauucaccuggacccuguccgauucugaaggcaaggacacacccggcggguacugucugacgagauggaugcucaucgaggccgagcugaaaugcuuuggaaauaccgcugucgccaaguguaacgaaaaacaugaugaggaguucugcgacaugcuucggcuguuugauuucaauaagcaggcuauucagcgccucaaagccgaagcgcagaugagcauccaacugaucaacaaggccgugaaugcucuuauuaacgaccagcugaucaugaagaaucaccucagagacauuaugggcaucccuuauugcaacuacuccaaauauuguuaccugaaucacacaaccacagggaagaccagccugcccaaaugcugucucgugucuaacggauccuaccugaaugaaacgcauuucagcgaugacauugagcagcaagccgauaacaugaucacagagaugcuucagaaggaauauauggagcggcagggcaaaaccccucuggggcucgucgaccuguuuguuuucucuaccagcuuuuaccugaucuccauuuuccuucaccucgugaagaucccgacacaucgccacauugugggaaaacccugcccuaagccccauagacugaaucacaugggcaucuguucuugcggccuguauaagcagccugggguccccgugaaauggaagcggugaggacuaguaauaaggaaacuguaugaaugucugugggcaggaagugaagagauccuucuguaaagguuuuuggaauuaugucugcugaauaauaaacuuuuuugaaauaauaaaucugguagaaaaaugagaucucaaaggcucuuuucagagccaccaaaaaaaaaaaaaaaaaaaaaaaaaaaaaaaaaaaaaaaaaaaaaaaaaaaaaaaaaaaaaaaaagaauu

SEQ ID NO: 39269 - RNA, 1812 nt, Artificial Sequence
  mRNA product Design b-4 (hSL-A100) comprising derived and/or modified sequence from LASV(Josiah;Clade IV)__NP_694870__GPCmut11 (opt1)
aggagagucccgcagucggcguccagcggcucugcuuguucgugugugugucguugcaggccuuauucaagcuuaccaugggccagaucgugaccuucuuccaggaggucccccacgugaucgaggaggugaugaacaucguccugaucgcccucagcgugcuggccgugcugaaggggcucuacaacuucgcgaccugcggccuggucgggcuggugacguuccuccugcugugcggccgcuccugcaccaccagccucuacaaggggguguacgagcugcagacccuggagcucaacauggagacgcugaacaugaccaugccgcuguccugcaccaagaacaacagccaccacuacaucauggucggcaacgagaccggccucgagcugacgcugaccaacaccuccaucaucaaccacaaguucugcaaccucagcgacgcccacaagaagaaccuguacgaccacgcccugauguccaucaucagcaccuuccaccucuccauccccaacuucaaccaguacgaggccaugagcugcgacuucaacgggggcaagaucuccgugcaguacaaccugagccacuccuacgccggggacgcggccaaccacugcggcacgguggccaacgggguccugcagaccuucaugcggauggccuggggcggcagcuacaucgcgcucgacuccgggcgcggcaacugggacugcaucaugaccagcuaccaguaccugaucauccagaacaccacgugggaggaccacugccaguucucccggcccagccccaucggguaccugggccuccugucccagcgcacccgggacaucuacaucagccgccggcugcucggcaccuucaccuggacgcugagcgacuccgaggggaaggacaccccgggcggguacugccugacccgcuggaugcucaucgaggccgagcugaagugcuucggcaacaccgccguggccaagugcaacgagaagcacgacgaggaguucugcgacaugcugcggcuguucgacuucaacaagcaggccauccagcgccugaaggcggaggcccagaugagcauccagcugaucaacaaggccgugaacgcccucaucaacgaccagcugaucaugaagaaccaccuccgggacaucauggggauccccuacugcaacuacuccaaguacugcuaccucaaccacacgaccaccggccgcaccagccugcccaagugcugccuggucuccaacggcagcuaccucaacgagacgcacuucuccgacgacaucgagcagcaggccgacaacaugaucaccgagaugcugcagaaggaguacauggagcggcaggggaagacgccccugggccucguggaccuguucguguucagcaccuccuucuaccugaucagcaucuuccugcaccucgucaagaucccgacccaccgccacaucguggggaaguccugccccaagccccaccggcugaaccacaugggcaucugcagcugcgggcuguacaagcagcccggcgugccggucaaguggaagcgcugaggacuaguaauaaggaaacuguaugaaugucugugggcaggaagugaagagauccuucuguaaagguuuuuggaauuaugucugcugaauaauaaacuuuuuugaaauaauaaaucugguagaaaaaugagaucucaaaggcucuuuucagagccaccaaaaaaaaaaaaaaaaaaaaaaaaaaaaaaaaaaaaaaaaaaaaaaaaaaaaaaaaaaaaaaaaaaaaaaaaaaaaaaaaaaaaaaaaaaaaaaaaaaaaa

SEQ ID NO: 39270 - RNA, 1809 nt, Artificial Sequence
  mRNA product Design b-4 (hSL-A100) comprising derived and/or modified sequence from LASV(LP;Clade I)__AAF86701__GPCmut11 (opt1)
aggagagucccgcagucggcguccagcggcucugcuuguucgugugugugucguugcaggccuuauucaagcuuaccaugggccagaucaucaccuucuuccaggaggugccccacgucaucgaggaggugaugaacaucgugcugaucgcccucagccugcuggccauccucaaggggcuguacaacaucgcgaccugcggcaucaucgggcuggucgccuuccucuuccugugcggcaaguccugcagccugacgcucaagggcggguacgagcugcagacccuggagcucaacauggagacccugaacaugaccaugccgcuguccugcacgaagaacagcucccaccacuacauccgcgugggcaacgagaccgggcucgagcugacccugaccaacacgagcaucaucaaccacaaguucugcaaccucuccgacgcccacaagaagaaccuguacgaccacgcccugaugagcaucaucuccaccuuccaccucagcauccccaacuucaaccaguacgaggccauguccugcgacuucaacggcgggaagaucagcgugcaguacaaccugucccacagcuacgcgggcgacgccgccgagcacugcgggaccgucgccaacggcgugcugcagaccuucaugcggauggcguggggcgggcgcuacaucgcccucgacuccggcaaggggaacugggacugcaucaugacgagcuaccaguaccugaucauccagaacaccaccugggaggaccacugccaguucucccggcccagccccaucggcuaccugggccuccugucccagcgcacccgggacaucuacaucagccgccggcugcucgggacguucaccuggacccugagcgacuccgagggcaacgagacccccgggggcuacugccugacgcgcuggaugcucaucgaggccgagcugaagugcuucgggaacaccgccguggccaagugcaacgagaagcacgacgaggaguucugcgacaugcugcggcuguucgacuucaacaagcaggcgauccgccggcugaaggccgaggcccagaugagcauccagcugaucaacaaggccgucaacgcccucaucaacgaccagcugaucaugaagaaccaccuccgcgacaucaugggcauccccuacugcaacuacuccaaguacugcuaccucaaccacaccagcuccggccggaccagccugcccaagugcugccugaucuccaacgggagcuaccucaacgagacgcaguucuccgacgacaucgagcagcaggcggacaacaugaucaccgagaugcugcagaaggaguacaucgagcgccagggcaagaccccgcuggggcucguggacaucuucaucuucagcaccuccuucuaccugaucagcaucuuccugcaccugaucaagaucccgacgcaccggcacaucgugggcaagcccugccccaagccccaccgccucaaccacaugggggucugcuccugcggccuguacaagcacccgggcgugcccaccaaguggaagcggugaggacuaguaauaaggaaacuguaugaaugucugugggcaggaagugaagagauccuucuguaaagguuuuuggaauuaugucugcugaauaauaaacuuuuuugaaauaauaaaucugguagaaaaaugagaucucaaaggcucuuuucagagccaccaaaaaaaaaaaaaaaaaaaaaaaaaaaaaaaaaaaaaaaaaaaaaaaaaaaaaaaaaaaaaaaaaaaaaaaaaaaaaaaaaaaaaaaaaaaaaaaaaaaaa

SEQ ID NO: 39271 - RNA, 1809 nt, Artificial Sequence
  mRNA product Design b-4 (hSL-A100) comprising derived and/or modified sequence from LASV(803213;Clade II)__AAF86703__GPCmut11 (opt1)
aggagagucccgcagucggcguccagcggcucugcuuguucgugugugugucguugcaggccuuauucaagcuuaccaugggccagaucaucaccuucuuccaggaggugccccacgucaucgaggaggugaugaacaucgugcugaucgcccucagccugcuggccauccucaaggggaucuacaacgucgcgaccugcggccuguucgggcugaucuccuuccuccugcugugcggccgcagcugcuccgugacguacaaggggguguacgagcuccagacccuggagcugaacauggccaaccucaacaugaccaugccgcugagcugcaccaagaacaacucccaccacuacaucauggucggcaacgagacgggccuggagcucacccugaccaacaccagcaucaucaaccacaaguucugcaaccuguccgacgcccacaagaagaaccucuacgaccacgcccugaugagcaucaucuccacguuccaccugagcauccccaacuucaaccaguacgaggccauguccugcgacuucaacgggggcaagaucagcgugcaguacaaccucucccacagcuucgcgguggacgccgccaaccacugcgggaccaucgccaacggcguccugcagaccuucaugcggauggcguggggcggguccuacaucgcccuggacagcggcaaggggaacugggacugcaucaugaccuccuaccaguaccucaucauccagaacacgaccugggaggaccacugccaguucagccgccccucccccaucggcuaccuggggcugcucagccagcggacccgcgacaucuacaucagccggcgccugcugggcaccuucacguggacccucuccgacagcgagggcaacgaggcccccgggggcuacugccugacccgguggaugcugaucgaggccgagcucaagugcuucgggaacaccgccguggcgaagugcaacgagaagcacgacgaggaguucugcgacaugcugcgccuguucgacuucaacaagcaggccaucaagcggcucaagacggaggcccagauguccauccagcugaucaacaaggccgugaacgcccugaucaacgaccagcucaucaugaagaaccaccuccgcgacaucaugggcauccccuacugcaacuacagccgguacugcuaccugaaccacaccgucaccgggaagaccucccugccccgcugcugccuggugagcaacggcuccuaccugaacgagacgcacuucagcgacgacaucgagcagcaggcggacaacaugaucaccgagaugcuccagaaggaguacauggaccggcagggcaagaccccgcuggggcugguggaccucuucgucuucuccaccagcuucuaccugaucuccaucuuccugcaccuggugaagaucccgacgcaccgccacaucgugggcaagcccugccccaagccccaccggcucaaccacauggggaucugcagcugcggccuguacaagcacccggggguccccgugaaguggaagcgcugaggacuaguaauaaggaaacuguaugaaugucugugggcaggaagugaagagauccuucuguaaagguuuuuggaauuaugucugcugaauaauaaacuuuuuugaaauaauaaaucugguagaaaaaugagaucucaaaggcucuuuucagagccaccaaaaaaaaaaaaaaaaaaaaaaaaaaaaaaaaaaaaaaaaaaaaaaaaaaaaaaaaaaaaaaaaaaaaaaaaaaaaaaaaaaaaaaaaaaaaaaaaaaaaa

SEQ ID NO: 39272 - RNA, 1809 nt, Artificial Sequence
  mRNA product Design b-4 (hSL-A100) comprising derived and/or modified sequence from LASV(GA391;Clade III)__CAA36645__GPCmut11 (opt1)
aggagagucccgcagucggcguccagcggcucugcuuguucgugugugugucguugcaggccuuauucaagcuuaccaugggccagaucgugaccuucuuccaggaggucccccacgugaucgaggaggugaugaacaucguccugaucgcccucagcauccuggccauccugaaggggcucuacaacguggcgaccugcggccugaucgggcuggugacguuccuccugcuguccggccgcagcugcucccucaucuacaaggggaccuacgagcugcagacccuggagcucaacauggagacccugaacaugacgaugccgcugagcugcaccaagaacaacucccaccacuacauccgggucggcaacgagaccggccucgagcugacccugacgaacaccagcauccucaaccacaaguucugcaaccuguccgacgcccacaagcgcaaccuguacgaccacagccucauguccaucaucagcaccuuccaccuguccauccccaacuucaaccaguacgaggccaugagcugcgacuucaacgggggcaagaucaccgugcaguacaaccugucccacagcuucgccguggacgccgcggggcacugcggcacgcucgccaacgggguccugcagaccuucaugcggauggccuggggcggcuccuacaucgcccuggacagcgggcgcggcaacugggacugcaucaugaccuccuaccaguaccucaucauccagaacaccacgugggacgaccacugccaguucagccggcccucccccaucggguaccugggccugcucagccagcgcacccgggacaucuacaucagccgccggcugcugggcaccuucaccuggacgcucuccgacagcgaggggaacgagaccccgggcggguacugccugacccgcuggaugcugaucgaggcggagcucaagugcuucggcaacaccgccguggccaagugcaacgagaagcacgacgaggaguucugcgacaugcugcggcuguucgacuucaacaagcaggccauccgccggcucaagacggaggcccagauguccauccagcugaucaacaaggcggugaacgcccugaucaacgaccagcucaucaugaagaaccaccuccgcgacaucauggggauccccuacugcaacuacagccgguacugcuaccugaaccacaccuccaccggcaagaccagccugccccgcugcugccugaucuccaacggcagcuaccugaacgagacgaaguucuccgacgacaucgagcagcaggccgacaacaugaucaccgagaugcuccagaaggaguacaucgaccggcaggggaagacgccccugggccuggucgaccuguucguguucagcaccuccuucuaccucaucagcaucuuccugcaccuggugaagaucccgacccaccgccacaucgucgggaagcccugccccaagccccaccggcucaaccacaugggcaucugcuccugcgggcuguacaagcagccgggcgugcccgugcgcuggaagcggugaggacuaguaauaaggaaacuguaugaaugucugugggcaggaagugaagagauccuucuguaaagguuuuuggaauuaugucugcugaauaauaaacuuuuuugaaauaauaaaucugguagaaaaaugagaucucaaaggcucuuuucagagccaccaaaaaaaaaaaaaaaaaaaaaaaaaaaaaaaaaaaaaaaaaaaaaaaaaaaaaaaaaaaaaaaaaaaaaaaaaaaaaaaaaaaaaaaaaaaaaaaaaaaaa

SEQ ID NO: 39273 - RNA, 1812 nt, Artificial Sequence
  mRNA product Design b-4 (hSL-A100) comprising derived and/or modified sequence from LASV(AV;Clade V)__CCA30314__GPCmut11 (opt1)
aggagagucccgcagucggcguccagcggcucugcuuguucgugugugugucguugcaggccuuauucaagcuuaccaugggccagaucgugaccuucuuccaggaggucccccacgugaucgaggaggugaugaacaucguccugaucgcccucagcauccuggccgugcugaaggggcucuacaacaucgcgaccugcggccugaucgggcugaucacguuccuccugcugugcggccgcuccugcagcuccaaccucuacaaggggguguacgagcugcagagccuggaccucaacauggagacccugaacaugaccaugccgcuguccugcaccaagaacaacagccaccacuacauccgggucggcaacgacacgggccucgagcugacccugaccaacaccuccauccucaaccacaaguucugcaaccugagcgacgcccacaagaaggaccuguacgaccacgcccucauguccaucaucagcacguuccaccuguccauccccaacuucaaccaguacgaggccaugagcugcgacuucaacgggggcaagaucuccgugcaguacaaccugagccacuccuacgccaucgacgcggccaaccacugcgggaccguggccaacggcauccuccagaccuucaugcgcauggccuggggcgggagcuacaucgcgcuggacuccggccgggggaacugggacugcaucaugaccagcuaccaguaccugaucauccagaacacgaccugggagaaccacugccaguucucccgccccagccccaucggcuaccucgggcugcugagccagcggacccgcgacaucuacaucucccggcgccuccugggcaccuucacguggacccugagcgacuccgagggcaacgccacccccgggggcuacugccucacccgguggaugcugaucgaggccgagcugaagugcuucgggaacacggccgucgccaagugcaacgagaagcacgacgaggaguucugcgacaugcuccgccuguucgacuucaacaagcaggcgaucagccggcugaaguccgaggcccagaugagcauccagcucaucaacaaggccgugaacgcccugaucaacgaccagcugaucaugaagaaccaccuccgcgacaucaugggcauccccuacugcaacuacuccaaguacugcuaccugaaccacaccaucaccgggaagaccagccugcccaagugcugccucguguccaacggcagcuaccugaacgagacgcacuucuccgacgacaucgagcagcaggccgacaacaugaucaccgagaugcugcagaaggaguacauggagcggcagggcaagaccccgcucgggcuggucgaccuguucguguucagcaccuccuucuaccugaucagcaucuuccuccgccuggugaagaucccgacgcaccggcacaucgucggcaagcccugccccaagccccaccgccugaaccacauggggaucugcuccugcggccucuacaagcagccgggggugcccgugcgguggaagcgcugaggacuaguaauaaggaaacuguaugaaugucugugggcaggaagugaagagauccuucuguaaagguuuuuggaauuaugucugcugaauaauaaacuuuuuugaaauaauaaaucugguagaaaaaugagaucucaaaggcucuuuucagagccaccaaaaaaaaaaaaaaaaaaaaaaaaaaaaaaaaaaaaaaaaaaaaaaaaaaaaaaaaaaaaaaaaaaaaaaaaaaaaaaaaaaaaaaaaaaaaaaaaaaaaa

SEQ ID NO: 39274 - RNA, 1809 nt, Artificial Sequence
  mRNA product Design b-4 (hSL-A100) comprising derived and/or modified sequence from LASV(Togo/2016/7082;Clade VI)__AMR44577__GPCmut11 (opt1)
aggagagucccgcagucggcguccagcggcucugcuuguucgugugugugucguugcaggccuuauucaagcuuaccaugggccagaucaucaccuucuuccaggaggugccccacgucaucgaggaggugaugaacaucgugcugaucgcccucagccugcuggccauccucaagggggucuacaacguggcgaccugcggcaucaucgggcuggugacguuccuguuccucugcggccgcuccugcagccugaucuacaagggguccuacgagcugcagacccucgagcugaacauggagacccugaacaugaccaugccgcucagcugcacgaagaacuccagccaccacuacauccgggucggcaacgagaccggccuggagcugacccucaccaacacguccaucaucaaccacaaguucugcaaccugagcgacgcccacaagcgcaaccuguacgaccacgcccucauguccauccugagcaccuuccaccuguccauccccaacuucaaccaguacgaggccaugagcugcgacuucaacgggggcaagaucuccgugcaguacaaccucagccacgccuacgcgguggacgccgccgagcacugcgggaccgucgccaacggcgugcugcagaccuucaugcggauggcguggggcggguccuacaucgcccuggacagcggccgcgggaacugggacugcaucaugacguccuaccaguaccucaucauccagaacaccaccugggaggaccacugccaguucagccggcccucccccaucggcuaccuggggcugcucagccagcgcacccgggacaucuacaucagccgccggcugcugggcacguucaccuggacccucuccgacagcgagggcaacgagacccccgggggcuacugccugacgcgcuggaugcugaucgaggccgagcucaagugcuucgggaacaccgccguggccaagugcaacgagaagcacgacgaggaguucugcgacaugcugcggcuguucgacuucaacaagcaggcgauccagcgccucaaguccgaggcccagaugagcauccagcugaucaacaaggccgucaacgcccugaucaacgaccagcucaucaugaagaaccaccuccgggacaugaugggcauccccuacugcaacuacuccaaguacugcuaccugaaccacaccagcuccgggcgcaccagccugcccaagugcugccugguguccaacggcagcuaccugaacgagacgcacuucuccgacgacaucgagcagcaggccgacaacaugaucaccgagaugcuccagaaggaguacaucgaccggcagggcaagaccccgcuggggcugguggaccucuucgucuucagcaccuccuucuaccugaucagcaucuuccugcaccugaucaagaucccgacgcaccgccacaucgugggcaagcccugccccaagccccaccggcucaaccacauggggaucugcuccugcggccuguacaagcagccgggggugcccacccgcuggaagcggugaggacuaguaauaaggaaacuguaugaaugucugugggcaggaagugaagagauccuucuguaaagguuuuuggaauuaugucugcugaauaauaaacuuuuuugaaauaauaaaucugguagaaaaaugagaucucaaaggcucuuuucagagccaccaaaaaaaaaaaaaaaaaaaaaaaaaaaaaaaaaaaaaaaaaaaaaaaaaaaaaaaaaaaaaaaaaaaaaaaaaaaaaaaaaaaaaaaaaaaaaaaaaaaaa

SEQ ID NO: 39275 - RNA, 1809 nt, Artificial Sequence
  mRNA product Design b-4 (hSL-A100) comprising derived and/or modified sequence from LASV(KAK-428;Clade n.d. (VII))__ANH09740__GPCmut11 (opt1)
aggagagucccgcagucggcguccagcggcucugcuuguucgugugugugucguugcaggccuuauucaagcuuaccaugggccagaucgugaccuucuuccaggaggucccccacgugaucgaggaggugaugaacaucguccugaucgcccucagccugcuggccauccucaaggggcuguacaacuucgcgaccugcggcgugaucgggcugaucacguuccuccugcugugcggccgcuccugcagcgccaccuacaaggggcaguacgagcuccagacccuggagcugaacauggagucccucaacaugaccaugccgcugagcugcacgaagaacaacucccaccacuacauccgggccggcaacaacaccggccuggagcucacccugaccaacacgagcaucaucucccacaaguucugcaaccugagcgacgcccacaagaagaaccucuacgaccacacccugauguccaucaucaccaccuuccaccugagcauccccaacuucaaccaguacgaggccauguccugcgacuucaacgggggcaagaucagcauccaguacaaccucucccacagcuacgcgggggacgccgcccagcacugcggcacgguggccaacgggguccugcagaccuucaugcgcauggcguggggcggcuccuaccuggcccucgacagcgggcggcgcggcugggacugcaucaucuccagcuaccaguaccugaucauccagaacaccaccugggacgaccacugccaguucucccggcccagccccaucggguaccugggcuucgugagccagaagacgcgcgacaucuacaucucccggcgccuccugggcaccuucaccuggacccugagcgacuccgaggggcacgacaugccgggcggguacugccucacgcgguggaugcugaucgaggccgaccugaagugcuucggcaacaccgccguggccaagugcaacgagaagcacgacgaggaguucugcgacauguggcgccucuucgacuucaacaagcaggcgauccagcggcugaaggccgaggcccagaugaacauccagcugaucaacaaggccgucaacgcccucaucaacgaccagcugaugaugaagaaccaccuccgcgacaucauggggauccccuacugcaacuacagcaaguucugcuaccugaacaacaccaccacgggccggaccucccugccccgcugcugccugaucagcaacggcuccuaccucaacgagacccacuucagcgacgacaucgagcagcaggcggacaacaugaucaccgagaugcugcagaaggaguacauggaccggcaggggaagacgccccugggccucguggaccuguucguguucuccaccagcuucuaccugaucaccaucuuccuccaccuggucaagaucccgacccaccgccacaucguggggaagcccugccccaagccccaccggcugaaccacaugggcaucugcuccugcgggcuguacaagcagccgggcgugcccguccgcuggaagcggugaggacuaguaauaaggaaacuguaugaaugucugugggcaggaagugaagagauccuucuguaaagguuuuuggaauuaugucugcugaauaauaaacuuuuuugaaauaauaaaucugguagaaaaaugagaucucaaaggcucuuuucagagccaccaaaaaaaaaaaaaaaaaaaaaaaaaaaaaaaaaaaaaaaaaaaaaaaaaaaaaaaaaaaaaaaaaaaaaaaaaaaaaaaaaaaaaaaaaaaaaaaaaaaaa

SEQ ID NO: 39276 - RNA, 1809 nt, Artificial Sequence; identical to SEQ ID NO: 39270
  mRNA product Design b-4 (hSL-A100) comprising derived and/or modified sequence from LASV(Pinneo-NIG-1969;Clade I)__AIT17836__GPCmut11 (opt1)

SEQ ID NO: 39277 - RNA, 1809 nt, Artificial Sequence
  mRNA product Design b-4 (hSL-A100) comprising derived and/or modified sequence from LASV(ISTH0009-NIG-2011;Clade II)__AIT17404__GPCmut11 (opt1)
aggagagucccgcagucggcguccagcggcucugcuuguucgugugugugucguugcaggccuuauucaagcuuaccaugggccagaucaucaccuucuuccaggaggugccccacgucaucgaggaggugaugaacaucgugcugaucgcccucagccugcuggccauccucaaggggaucuacaacgucgcgaccugcggccuguucgggcugguguccuuccuccugcugugcggccgcagcugcuccacgaccuacaaggggguguacgagcuccagacccuggagcuggacauggccagccucaacaugaccaugccgcuguccugcacgaagaacaacagccaccacuacaucauggucggcaacgagaccggccuggagcucacccugaccaacacguccaucaucaaccacaaguucugcaaccugagcgacgcccacaagaagaaccucuacgaccacgcccugauguccaucaucagcaccuuccaccuguccauccccaacuucaaccaguacgaggccaugagcugcgacuucaacgggggcaagaucuccgugcaguacaaccucagccacgcguacgccguggacgccgccaaccacugcgggaccaucgcgaacggcguccugcagaccuucaugcggauggccuggggcggguccuacaucgcccuggacagcggcaagggguccugggacugcaucaugacgagcuaccaguaccucaucauccagaacaccaccugggaggaccacugccaguucucccgccccagccccaucggcuaccuggggcugcucagccagcggacccgcgacaucuacaucucccggcgccugcugggcacguucaccuggacccucagcgacuccgagggcaacgagacccccgggggcuacugccugacgcgguggaugcugaucgaggccgagcucaagugcuucgggaacaccgccguggcgaagugcaacgagaagcacgacgaggaguucugcgacaugcugcgccuguucgacuucaacaagcaggccauccggcgccucaagaccgaggcccagaugagcauccagcugaucaacaaggccgugaacgcccugaucaacgaccagcucaucaugaagaaccaccuccgggacaucaugggcaucccguacugcaacuacuccaaguacugcuaccugaaccacaccgucacggggaagaccagccugccccgcugcugccugguguccaacggcagcuaccugaacgagacccacuucuccgacgacaucgagcagcaggcggacaacaugaucaccgagcuccugcagaaggaguacauggaccggcagggcaagacgccccuggggcucguggaccuguucgucuucagcaccuccuucuaccugaucagcaucuuccugcaccucaucaagaucccgacccaccgccacaucaccggcaagcccugccccaagccccaccggcugaaccacauggggaucugcuccugcggccuguacaagcacccgggggugcccgugaaguggaagcgcugaggacuaguaauaaggaaacuguaugaaugucugugggcaggaagugaagagauccuucuguaaagguuuuuggaauuaugucugcugaauaauaaacuuuuuugaaauaauaaaucugguagaaaaaugagaucucaaaggcucuuuucagagccaccaaaaaaaaaaaaaaaaaaaaaaaaaaaaaaaaaaaaaaaaaaaaaaaaaaaaaaaaaaaaaaaaaaaaaaaaaaaaaaaaaaaaaaaaaaaaaaaaaaaaa

SEQ ID NO: 39278 - RNA, 1809 nt, Artificial Sequence
  mRNA product Design b-4 (hSL-A100) comprising derived and/or modified sequence from LASV(ISTH2010-NIG-2012;Clade II)__AIT17482__GPCmut11 (opt1)
aggagagucccgcagucggcguccagcggcucugcuuguucgugugugugucguugcaggccuuauucaagcuuaccaugggccagaucaucaccuucuuccaggaggugccccacgucaucgaggaggugaugaacaucgugcugaucgcccucagccugcuggccauccucaaggggaucuacaacgucgcgaccugcggccuguucgggcugguguccuuccuccugcugugcggccgcagcugcuccacgaccuacaaggggguguacgagcuccagacccuggagcuggacauggccagccucaacaugaccaugccgcuguccugcacgaagaacaacagccaccacuacaucauggucggcaacgagaccggccuggagcucacccugaccaacacguccaucaucaaccacaaguucugcaaccugagcgacgcccacaagaagaaccucuacgaccacgcccugauguccaucaucagcaccuuccaccuguccauccccaacuucaaccaguacgaggccaugagcugcgacuucaacgggggcaagaucuccgugcaguacaaccucagccacgcguacgccguggacgccgccaaccacugcgggaccaucgcgaacggcguccugcagaccuucaugcggauggccuggggcggguccuacaucgcccuggacagcggcaagggguccugggacugcaucaugacgagcuaccaguaccucaucauccagaacaucaccugggaggaccacugccaguucucccgccccagccccaucggcuaccuggggcugcucagccagcggacccgcgacaucuacaucucccggcgccugcugggcaccuucacguggacccucagcgacuccgagggcaacgagacccccgggggcuacugccugacccgguggaugcugaucgaggccgagcucaagugcuucgggaacacggccguggcgaagugcaacgagaagcacgacgaggaguucugcgacaugcugcgccuguucgacuucaacaagcaggccauccggcgccucaagaccgaggcccagaugagcauccagcugaucaacaaggccgugaacgcccugaucaacgaccagcucaucaugaagaaccaccuccgggacaucaugggcauccccuacugcaacuacuccaaguacugcuaccugaaccacaccgucaccgggaagacgagccugccccgcugcugccugguguccaacggcagcuaccugaacgagacccacuucuccgacgacaucgagcagcaggcggacaacaugaucaccgagcuccugcagaaggaguacaucgaccggcagggcaagaccccgcuggggcucguggaccuguucgucuucagcacguccuucuaccugaucagcaucuuccugcaccucgugaagaucccgacccaccgccacguggucggcaagcccugccccaagccccaccggcugaaccacauggggaucugcuccugcggccuguacaagcacccgggggugcccgugaaguggaagcgcugaggacuaguaauaaggaaacuguaugaaugucugugggcaggaagugaagagauccuucuguaaagguuuuuggaauuaugucugcugaauaauaaacuuuuuugaaauaauaaaucugguagaaaaaugagaucucaaaggcucuuuucagagccaccaaaaaaaaaaaaaaaaaaaaaaaaaaaaaaaaaaaaaaaaaaaaaaaaaaaaaaaaaaaaaaaaaaaaaaaaaaaaaaaaaaaaaaaaaaaaaaaaaaaaa

SEQ ID NO: 39279 - RNA, 1809 nt, Artificial Sequence
  mRNA product Design b-4 (hSL-A100) comprising derived and/or modified sequence from LASV(Lassa virus/H.sapiens-wt/NGA/2015/ISTH_0543;Clade II)__AVO03639__GPCmut11 (opt1)
aggagagucccgcagucggcguccagcggcucugcuuguucgugugugugucguugcaggccuuauucaagcuuaccaugggccagaucaucaccuucuuccaggaggugccccacgucaucgaggaggugaugaacaucgugcugaucgcccucagccugcuggccauccucaaggggaucuacaacgucgcgaccugcggccuguucgggcugguguccuuccuccugcugugcggccgcagcugcuccacgaccuacaaggggguguacgagcuccagacccuggagcuggacauggccaaccucaacaugaccaugccgcugagcugcacgaagaacaacucccaccacuacaucauggucggcaacgagaccggccuggagcucacccugaccaacacgagcaucaucaaccacaaguucugcaaccuguccgacgcccacaagaagaaccucuacgaccacgcccugaugagcaucaucuccaccuuccaccugagcauccccaacuucaaccaguacgaggccauguccugcgacuucaacgggggcaagaucagcgugcaguacaaccucucccacaccuacgcgguggacgccgccaaccacugcgggaccaucgccaacggcguccugcagacguucaugcggauggcguggggcgggagcuacaucgcccuggacuccggcaaggggagcugggacugcaucaugaccuccuaccaguaccucgugauccagaacaccaccugggaggaccacugccaguucagccgccccucccccaucggcuaccuggggcugcucagccagcggacgcgcgacaucuacaucagccggcgccugcugggcaccuucaccuggacccucuccgacagcgagggcaacgagacgcccgggggcuacugccugacccgguggaugcugaucgaggccgagcucaagugcuucgggaacaccgccguggccaagugcaacgagaagcacgacgaggaguucugcgacaugcugcgccuguucgacuucaacaagcaggcgauccggcgccucaagaccgaggcccagauguccauccagcugaucaacaaggccgucaacgcccugaucaacgaccagcucaucaugaagaaccaccuccgggacaucaugggcauccccuacugcaacuacagcaaguacugcuaccugaaccacacggugaccgggaagaccucccugccccgcugcugccuggugagcaacggcuccuaccugaacgagacccacuucagcgacgacaucgagcagcaggccgacaacaugaucacggagcuccugcagaaggaguacaucgaccggcagggcaagaccccgcuggggcucgucgaccuguucguguucuccaccagcuucuaccugaucuccaucuuccugcaccucgugaagaucccgacccaccgccacaucacgggcaagcccugccccaagccccaccggcugaaccacauggggaucugcagcugcggccuguacaagcacccggggguccccgugaaguggaagcgcugaggacuaguaauaaggaaacuguaugaaugucugugggcaggaagugaagagauccuucuguaaagguuuuuggaauuaugucugcugaauaauaaacuuuuuugaaauaauaaaucugguagaaaaaugagaucucaaaggcucuuuucagagccaccaaaaaaaaaaaaaaaaaaaaaaaaaaaaaaaaaaaaaaaaaaaaaaaaaaaaaaaaaaaaaaaaaaaaaaaaaaaaaaaaaaaaaaaaaaaaaaaaaaaaa

SEQ ID NO: 39280 - RNA, 1809 nt, Artificial Sequence
  mRNA product Design b-4 (hSL-A100) comprising derived and/or modified sequence from LASV(Lassa virus/H.sapiens-wt/NGA/2016/ISTH_0009;Clade II)__AVO03571__GPCmut11 (opt1)
aggagagucccgcagucggcguccagcggcucugcuuguucgugugugugucguugcaggccuuauucaagcuuaccaugggccagaucaucaccuucuuccaggaggugccccacgucaucgaggaggugaugaacaucgugcugaucgcccucagccugcuggccauccucaaggggaucuacaacgucgcgaccugcggccugcuggggcucguguccuuccugcugcucugcggccgcagcugcuccacgaccuacaaggggguguacgagcugcagacccuggagcucgacauggccagccugaacaugaccaugccgcuguccugcacgaagaacaacagccaccacuacaucauggucggcaacgagaccggccucgagcugacccugaccaacacguccaucaucaaccacaaguucugcaaccucagcgacgcccacaagaagaaccuguacgaccacgcccugauguccaucaucagcaccuuccaccucuccauccccaacuucaaccaguacgaggccaugagcugcgacuucaacgggggccggaucuccgugcaguacaaccugagccacuccuacgcgguggacgccgccaaccacugcgggaccaucgccaacggcguccugcagaccuucaugcgcauggcguggggcgggagcuacaucgcccucgacuccggcaaggggagcugggacugcaucaugacguccuaccaguaccugaucauccagaacaccaccugggaggaccacugccaguucagccggcccagccccaucggcuaccuggggcuccugucccagcgcacccgggacaucuacaucagccgccggcugcucggcacguucaccuggacccuguccgacagcgagggcaacgagacccccgggggcuacugccugacgcgcuggaugcucaucgaggccgagcugaagugcuucgggaacaccgccguggccaagugcaacgagaagcacgacgaggaguucugcgacaugcugcggcuguucgacuucaacaagcaggcgauccgccggcugaagaccgaggcccagauguccauccagcugaucaacaaggccgugaacgcccucaucaacgaccagcugaucaugaagaaccaccuccgcgacaucaugggcaucccguacugcaacuacagcaaguacugcuaccucaaccacaccgucacggggaagaccucccugccccggugcugccuggugagcaacggcuccuaccucaacgagacccacuucagcgacgacaucgagcagcaggccgacaacaugaucaccgagcugcugcagaaggaguacaucgaccgccagggcaagacgccccucgggcugguggaccuguucgucuucuccaccagcuucuaccugaucuccaucuuccuccaccuggugaagaucccgacccaccggcacaucaccggcaagcccugccccaagccccaccgccugaaccacauggggaucugcagcugcggccucuacaaccacccgggggugcccgucaaguggaagcggugaggacuaguaauaaggaaacuguaugaaugucugugggcaggaagugaagagauccuucuguaaagguuuuuggaauuaugucugcugaauaauaaacuuuuuugaaauaauaaaucugguagaaaaaugagaucucaaaggcucuuuucagagccaccaaaaaaaaaaaaaaaaaaaaaaaaaaaaaaaaaaaaaaaaaaaaaaaaaaaaaaaaaaaaaaaaaaaaaaaaaaaaaaaaaaaaaaaaaaaaaaaaaaaaa

SEQ ID NO: 39281 - RNA, 1809 nt, Artificial Sequence
  mRNA product Design b-4 (hSL-A100) comprising derived and/or modified sequence from LASV(Lassa virus/H.sapiens-wt/NGA/2016/ISTH_0017;Clade II)__AVO03567__GPCmut11 (opt1)
aggagagucccgcagucggcguccagcggcucugcuuguucgugugugugucguugcaggccuuauucaagcuuaccaugggccagaucaucaccuucuuccaggaggugccccacgucaucgaggaggugaugaacaucgugcugaucgcccucagccugcuggccauccucaaggggaucuacaacgucgcgaccugcggccuguucgggcugguguccuuccuccugcugugcggccgcagcugcuccacgaccuacaaggggguguacgagcuccagacccuggagcuggacauggccagccucaacaugaccaugccgcuguccugcacgaagaacaacagccaccacuacaucauggucggcaacgagaccggccuggagcucacccugaccaacacguccaucaucaaccacaaguucugcaaccugagcgacgcccacaagaagaaccucuacgaccacgcccugauguccaucaucagcaccuuccaccuguccauccccaacuucaaccaguacgaggccaugagcugcgacuucaacgggggcaagaucuccgugcaguacaaccucagccacaccuacgcgaucgacgccgccaaccacugcgggaccaucgccaacggcgugcugcagacguucaugcggauggcguggggcggguccuacaucgcccuggacagcggcaagggguccugggacugcaucaugaccagcuaccaguaccucaucauccagaacaccaccugggaggaccacugccaguucucccgccccagccccaucggcuaccuggggcugcucagccagcggacgcgcgacaucuacaucucccggcgccugcugggcaccuucaccuggacccucagcgacuccgagggcaacgagacgcccgggggcuacugccugacccgguggaugcugaucgaggccgagcucaagugcuucgggaacaccgccgucgccaagugcaacgagaagcacgacgaggaguucugcgacaugcugcgccuguucgacuucaacaagcaggcgauccggcgccucaagaccgaggcccagaugagcauccagcugaucaacaaggccgugaacgcccugaucaacgaccagcucaucaugaagaaccaccuccgggacaucaugggcauccccuacugcaacuacuccaaguacugcuaccugaaccacacggugaccgggaagaccagccugccccgcugcugccuggucuccaacggcagcuaccugaacgagacccacuucuccgacgacaucgagcagcaggccgacaacaugaucacggagcuccugcagaaggaguacauggaccggcagggcaagaccccgcuggggcucguggaccuguucguguucagcaccuccuucuaccugaucagcaucuuccugcaccucguccgcaucccgacccaccggcacgugaucggcaagcccugccccaagccccaccgccugaaccacauggggaucugcuccugcggccuguacaagcacccgggggugcccgucaaguggaagcggugaggacuaguaauaaggaaacuguaugaaugucugugggcaggaagugaagagauccuucuguaaagguuuuuggaauuaugucugcugaauaauaaacuuuuuugaaauaauaaaucugguagaaaaaugagaucucaaaggcucuuuucagagccaccaaaaaaaaaaaaaaaaaaaaaaaaaaaaaaaaaaaaaaaaaaaaaaaaaaaaaaaaaaaaaaaaaaaaaaaaaaaaaaaaaaaaaaaaaaaaaaaaaaaaa

SEQ ID NO: 39282 - RNA, 1809 nt, Artificial Sequence
  mRNA product Design b-4 (hSL-A100) comprising derived and/or modified sequence from LASV(Lassa virus/H.sapiens-wt/NGA/2018/ISTH_0959;Clade II)__AVV65099__GPCmut11 (opt1)
aggagagucccgcagucggcguccagcggcucugcuuguucgugugugugucguugcaggccuuauucaagcuuaccaugggccagaucaucaccuucuuccaggaggugccccacgucaucgaggaggugaugaacaucgugcugaucgcccucagccugcuggccauccucaaggggaucuacaacgucgugaccugcggccuguucgggcugguguccuuccuccugcugugcggccgcagcugcuccacgaccuacaagggggucuacgagcuccagacccuggagcuggacauggcgagccucaacaugaccaugccgcuguccugcacgaagaacaacagccaccacuacaucauggugggcaacgagaccggccuggagcucacccugaccaacacguccaucaucaaccacaaguucugcaaccugagcgacgcccacaagaagaaccucuacgaccacgcccugauguccaucaucagcaccuuccaccuguccauccccaacuucaaccaguacgaggccaugagcugcgacuucaacgggggcaagaucuccgugcaguacaaccucagccacgccuacgcgaucgacgccgccaaccacugcgggaccaucgccaacggcguccugcagaccuucaugcggauggcguggggcggguccuacaucgcccuggacagcggcaagggguccugggacugcaucaugacgagcuaccaguaccucaucauccagaacaccaccugggaggaccacugccaguucucccgccccagccccaucggcuaccuggggcugcucagccagcggacccgcgacaucuacaucucccggcgccugcugggcacguucaccuggacccucagcgacuccgagggcaacgagacccccgggggcuacugccugacgcgguggaugcugaucgaggccgagcucaagugcuucgggaacaccgccguggccaagugcaacgagaagcacgacgaggaguucugcgacaugcugcgccuguucgacuucaacaagcaggcgauccggcgccucaagaccgaggcccagaugagcauccagcugaucaacaaggccgugaacgcccugaucaacgaccagcucaucaugaagaaccaccuccgggacaucaugggcaucccguacugcaacuacuccaaguacugcuaccugaaccacaccgucacggggaagaccagccugccccgcugcugccugguguccaacggcagcuaccugaacgagacccacuucuccgacgacaucgagcagcaggccgacaacaugaucaccgagcuccugcagaaggaguacaucgaccggcagggcaagacgccccuggggcucguggaccuguucgucuucagcaccuccuucuaccugaucagcaucuuccugcaccucgugaagaucccgacccaccgccacgugaucggcaagcccugccccaagccccaccggcugaaccacauggggaucugcuccugcggccuguacaagcacccggggguccccgugaaguggaagcgcugaggacuaguaauaaggaaacuguaugaaugucugugggcaggaagugaagagauccuucuguaaagguuuuuggaauuaugucugcugaauaauaaacuuuuuugaaauaauaaaucugguagaaaaaugagaucucaaaggcucuuuucagagccaccaaaaaaaaaaaaaaaaaaaaaaaaaaaaaaaaaaaaaaaaaaaaaaaaaaaaaaaaaaaaaaaaaaaaaaaaaaaaaaaaaaaaaaaaaaaaaaaaaaaaa

SEQ ID NO: 39283 - RNA, 1809 nt, Artificial Sequence
  mRNA product Design b-4 (hSL-A100) comprising derived and/or modified sequence from LASV(LASV003-NIG-2008;Clade II)__AIT17580__GPCmut11 (opt1)
aggagagucccgcagucggcguccagcggcucugcuuguucgugugugugucguugcaggccuuauucaagcuuaccaugggccagaucaucaccuucuuccaggaggugccccacgucaucgaggaggugaugaacaucgugcugaucgcccucagccugcuggccauccucaaggggaucuacaacgucgcgaccugcggccuguucgggcugguguccuuccuccugcugugcggccgcagcugcuccacgaccuacaaggggguguacgagcuccagacccuggagcuggacauggccagccucaacaugaccaugccgcuguccugcacgaagaacaacagccaccacuacaucauggucggcaacgagaccggccuggagcucacccugaccaacacguccaucaucaaccacaaguucugcaaccugagcgacgcccacaagaagaaccucuacgaccacgcccugauguccaucaucagcaccuuccaccuguccauccccaacuucaaccaguacgaggccaugagcugcgacuucaacgggggcaagaucuccgugcaguacaaccucagccacaccuacgcgguggacgccgccaaccacugcgggaccaucgccaacggcguccugcagacguucaugcggauggcguggggcggguccuacaucgcccuggacagcggcaagggguccugggacugcaucaugaccagcuaccaguaccucaucauccagaacaccaccugggaggaccacugccaguucucccgccccagccccaucggcuaccuggggcugcucagccagcggacgcgcgacaucuacaucucccggcgccugcugggcaccuucaccuggacccucagcgacuccgagagcaacgagacgccgggcggguacugccugacccgguggaugcugaucgaggccgagcucaagugcuucggcaacaccgccguggccaagugcaacgagaagcacgacgaggaguucugcgacaugcugcgccuguucgacuucaacaagcaggcgauccggcgccucaaggccgaggcccagauguccauccagcugaucaacaaggccgugaacgcccugaucaacgaccagcucaucaugaagaaccaccuccgggacaucauggggauccccuacugcaacuacagcaaguacugcuaccugaaccacaccgucacgggccgcaccucccugccccggugcugccuggugagcaacggguccuaccugaacgagacccacuucagcgacgacaucgagcagcaggcggacaacaugaucaccgagcuccugcagaaggaguacauggaccgccagggcaagacgccccugggccucguggaccuguucgucuucuccaccagcuucuaccugaucuccaucuuccugcaccucgugaagaucccgacccaccggcacgugaucgggaagcccugccccaagccccaccgccugaaccacaugggcaucugcagcugcgggcuguacaagcacccgggcguccccgugaaguggaagcggugaggacuaguaauaaggaaacuguaugaaugucugugggcaggaagugaagagauccuucuguaaagguuuuuggaauuaugucugcugaauaauaaacuuuuuugaaauaauaaaucugguagaaaaaugagaucucaaaggcucuuuucagagccaccaaaaaaaaaaaaaaaaaaaaaaaaaaaaaaaaaaaaaaaaaaaaaaaaaaaaaaaaaaaaaaaaaaaaaaaaaaaaaaaaaaaaaaaaaaaaaaaaaaaaa

SEQ ID NO: 39284 - RNA, 1809 nt, Artificial Sequence
  mRNA product Design b-4 (hSL-A100) comprising derived and/or modified sequence from LASV(LASV035-NIG-2009;Clade II)__AIT17588__GPCmut11 (opt1)
aggagagucccgcagucggcguccagcggcucugcuuguucgugugugugucguugcaggccuuauucaagcuuaccaugggccagaucaucaccuucuuccaggaggugccccacgucaucgaggaggugaugaacaucgugcugaucgcccucagccugcuggccauccucaaggggaucuacaacgucgcgaccugcggccuguucgggcugguguccuuccuccugcugugcggccgcagcugcuccacgaccuacaaggggguguacgagcuccagacccuggagcuggacauggccagccucaacaugaccaugccgcuguccugcacgaagaacaacagccaccacuacaucauggucggcaacgagaccggccuggagcucacccugaccaacacguccaucaucaaccacaaguucugcaaccugagcgacgcccacaagaagaaccucuacgaccacgcccugauguccaucaucagcaccuuccaccuguccauccccaacuucaaccaguacgaggccaugagcugcgacuucaacgggggcaagaucuccgugcaguacaaccucagccacgcguacgccguggacgccgccaaccacugcgggaccaucgcgaacggcguccugcagaccuucaugcggauggccuggggcggguccuacaucgcccuggacagcggcaagggguccugggacugcaucaugacgagcuaccaguaccucaucauccagaacaccaccugggaggaccacugccaguucucccgccccagccccaucggcuaccuggggcugcucagccagcggacccgcgacaucuacaucucccggcgccugcugggcacguucaccuggacccucagcgacuccgagggcaacgagacccccgggggcuacugccugacgcgguggaugcugaucgaggccgagcucaagugcuucgggaacaccgccguggcgaagugcaacgagaagcacgacgaggaguucugcgacaugcugcgccuguucgacuucaacaagcaggccauccggcgccucaaggccgaggcccagaugagcauccagcugaucaacaaggccgugaacgcgcugaucaacgaccagcucaucaugaagaaccaccuccgggacaucaugggcauccccuacugcaacuacuccaaguacugcuaccugaaccacaccgucaccgggaagacgagccugccccgcugcugccugguguccaacggcagcuaccugaacgagacccacuucuccgacgacaucgagcagcaggccgacaacaugaucaccgagcuccugcagaaggaguacaucgaccggcagggcaagaccccgcuggggcucguggaccuguucgucuucagcacguccuucuaccugaucagcaucuuccugcaccucgugaagaucccgacccaccgccacgugaucggcaagcccugccccaagccccaccggcugaaccacauggggaucugcuccugcggccuguacaagcacccggggguccccgugaaguggaagcgcugaggacuaguaauaaggaaacuguaugaaugucugugggcaggaagugaagagauccuucuguaaagguuuuuggaauuaugucugcugaauaauaaacuuuuuugaaauaauaaaucugguagaaaaaugagaucucaaaggcucuuuucagagccaccaaaaaaaaaaaaaaaaaaaaaaaaaaaaaaaaaaaaaaaaaaaaaaaaaaaaaaaaaaaaaaaaaaaaaaaaaaaaaaaaaaaaaaaaaaaaaaaaaaaaa

SEQ ID NO: 39285 - RNA, 1809 nt, Artificial Sequence
  mRNA product Design b-4 (hSL-A100) comprising derived and/or modified sequence from LASV(LASV1000-NIG-2009;Clade II)__AIT17782__GPCmut11 (opt1)
aggagagucccgcagucggcguccagcggcucugcuuguucgugugugugucguugcaggccuuauucaagcuuaccaugggccagaucaucaccuucuuccaggaggugccccacgucaucgaggaggugaugaacaucgugcugaucgcccucagccugcuggccauccucaaggggaucuacaacgucgcgaccugcggccuguucgggcugguguccuuccuccugcugugcggccgcagcugcuccacgaccuacaaggggguguacgagcuccagacccuggagcuggacauggccagccucaacaugaccaugccgcuguccugcacgaagaacaacagccaccacuacaucauggucggcaacgagaccggccuggagcucacccugaccaacacguccaucaucaaccacaaguucugcaaccugagcgacgcccacaagaagaaccucuacgaccacgcccugauguccaucaucagcaccuuccaccuguccauccccaacuucaaccaguacgaggccaugagcugcgacuucaacgggggcaagaucuccgugcaguacaaccucagccacaccuacgcgguggacgccgccaaccacugcgggaccaucgccaacggcguccugcagacguucaugcggauggcguggggcggguccuacaucgcccuggacagcggcaagggguccugggacugcaucaugaccagcuaccaguaccucaucauccagaacaccaccugggaggaccacugccaguucucccgccccagccccaucggcuaccuggggcugcucagccagcggacgcgcgacaucuacaucucccggcgccugcugggcaccuucaccuggacccucagcgacuccgagggcaacgagacgcccgggggcuacugccugacccgguggaugcugaucgaggccgagcucaagugcuucgggaacaccgccguggccaagugcaacgagaagcacgacgaggaguucugcgacaugcugcgccuguucgacuucaacaagcaggcgaucaagcggcucaagaccgaggcccagaugagcauccagcugaucaacaaggccgugaacgcccugaucaacgaccagcucaucaugaagaaccaccuccgcgacaucaugggcauccccuacugcaacuacuccaaguacugcuaccugaaccacacggucaccgggaagaccagccugccccggugcugccugguguccaacggcagcuaccugaacgagacccacuucuccgacgacaucgagcagcaggccgacaacaugaucacggagcuccugcagaaggaguacaucgaccgccagggcaagaccccgcuggggcucguggaccuguucgucuucagcaccuccuucuaccugaucagcaucuuccugcaccucgugaagaucccgacccaccggcacguggucggcaagcccugccccaagccccaccgccugaaccacauggggaucugcuccugcggccuguacaagcacccgggggugcccgugaaguggaagcggugaggacuaguaauaaggaaacuguaugaaugucugugggcaggaagugaagagauccuucuguaaagguuuuuggaauuaugucugcugaauaauaaacuuuuuugaaauaauaaaucugguagaaaaaugagaucucaaaggcucuuuucagagccaccaaaaaaaaaaaaaaaaaaaaaaaaaaaaaaaaaaaaaaaaaaaaaaaaaaaaaaaaaaaaaaaaaaaaaaaaaaaaaaaaaaaaaaaaaaaaaaaaaaaaa

SEQ ID NO: 39286 - RNA, 1809 nt, Artificial Sequence
  mRNA product Design b-4 (hSL-A100) comprising derived and/or modified sequence from LASV(LASV221-NIG-2010;Clade II)__AIT17624__GPCmut11 (opt1)
aggagagucccgcagucggcguccagcggcucugcuuguucgugugugugucguugcaggccuuauucaagcuuaccaugggccagaucaucaccuucuuccaggaggugccccacgucaucgaggaggugaugaacaucgugcugaucgcccucagccugcuggccauccucaaggggaucuacaacgucgcgaccugcggccuguucgggcugguguccuuccuccugcugugcggccgcagcugcuccacgaccuacaaggggguguacgagcuccagacccuggagcuggacauggccagccucaacaugaccaugccgcuguccugcacgaagaacaacagccaccacuacaucauggucggcaacgagaccggccuggagcucacccugaccaacacguccaucaucaaccacaaguucugcaaccugagcgacgcccacaagaagaaccucuacgaccacgcccugauguccaucaucagcaccuuccaccuguccauccccaacuucaaccaguacgaggccaugagcugcgacuucaacgggggcaagaucuccgugcaguacaaccucagccacaccuacgcgaucgacgccgccaaccacugcgggaccaucgccaacggcgugcugcagacguucaugcggauggcguggggcggguccuacaucgcccuggacagcggcaagggguccugggacugcaucaugaccagcuaccaguaccucaucauccagaacaccaccugggaggaccacugccaguucucccgccccagccccaucggcuaccuggggcugcucagccagcggacgcgcgacaucuacaucucccggcgccugcugggcaccuucaccuggacccucagcgacuccgagggcaacgagacgcccgggggcuacugccugacccgguggaugcugaucgaggccgagcucaagugcuucgggaacaccgccgucgccaagugcaacgagaagcacgacgaggaguucugcgacaugcugcgccuguucgacuucaacaagcaggcgauccggcgccucaagaccgaggcccagaugagcauccagcugaucaacaaggccgugaacgcccugaucaacgaccagcucaucaugaagaaccaccuccgggacaucaugggcauccccuacugcaacuacuccaaguacugcuaccugaaccacacggugaccgggaagaccagccugccccgcugcugccuggucuccaacggcagcuaccugaacgagacccacuucuccgacgacaucgagcagcaggccgacaacaugaucacggagaugcuccagaaggaguacauggaccggcagggcaagaccccgcuggggcugguggaccucuucguguucagcaccuccuucuaccugaucagcaucuuccugcaccuggucaagaucccgacccaccgccacgugaucggcaagcccugccccaagccccaccggcucaaccacauggggaucugcuccugcggccuguacaagcacccgggggugcccgucaaguggaagcgcugaggacuaguaauaaggaaacuguaugaaugucugugggcaggaagugaagagauccuucuguaaagguuuuuggaauuaugucugcugaauaauaaacuuuuuugaaauaauaaaucugguagaaaaaugagaucucaaaggcucuuuucagagccaccaaaaaaaaaaaaaaaaaaaaaaaaaaaaaaaaaaaaaaaaaaaaaaaaaaaaaaaaaaaaaaaaaaaaaaaaaaaaaaaaaaaaaaaaaaaaaaaaaaaaa

SEQ ID NO: 39287 - RNA, 1809 nt, Artificial Sequence
  mRNA product Design b-4 (hSL-A100) comprising derived and/or modified sequence from LASV(LASV237-NIG-2010;Clade II)__AIT17638__GPCmut11 (opt1)
aggagagucccgcagucggcguccagcggcucugcuuguucgugugugugucguugcaggccuuauucaagcuuaccaugggccagaucaucaccuucuuccaggaggugccccacgucaucgaggaggugaugaacaucgugcugaucgcccucagccugcuggccauccucaaggggaucuacaacgucgcgaccugcggccuguucgggcugguguccuuccuccugcugugcggccgcagcugcuccacgaccuacaaggggguguacgagcuccagacccuggagcuggacauggccagccucaacaugaccaugccgcuguccugcacgaagaacaacagccaccacuacaucauggucggcaacgagaccggccuggagcucacccugaccaacacguccaucaucaaccacaaguucugcaaccugagcgacgcccacaagaaggaccucuacgaccacgcccugauguccaucaucagcaccuuccaccuguccauccccaacuucaaccaguacgaggccaugagcugcgacuucaacgggggcaagaucuccgugcaguacaaccucagccacaccuacgcgguggacgccgccaaccacugcgggaccaucgccaacggcguccugcagacguucaugcggauggcguggggcggguccuacaucgcccuggacagcggcaagggguccugggacugcaucaugaccagcuaccaguaccucaucauccagaacaccaccugggaggaccacugccaguucucccgccccagccccaucggcuaccuggggcugcucagccagcggacgcgcgacaucuacaucucccggcgccugcugggcaccuucaccuggacccucagcgacuccgagggcaacgagacgcccgggggcuacugccugacccgguggaugcugaucgaggccgagcucaagugcuucgggaacaccgccguggccaagugcaacgagaagcacgacgaggaguucugcgacaugcugcgccuguucgacuucaacaagcaggcgauccggcgccucaagaccgaggcccagaugagcauccagcugaucaacaaggccgugaacgcccugaucaacgaccagcucaucaugaagaaccaccuccgggacaucaugggcauccccuacugcaacuacuccaaguacugcuaccugaaccacacggucaccgggaagaccagccugccccgcugcugccugguguccaacggcagcuaccugaacgagacccacuucuccgacgacaucgagcagcaggccgacaacaugaucacggagcuccugcagaaggaguacauggaccggcagggcaagaccccgcuggggcucguggaccuguucgucuucagcaccuccuucuaccugaucagcaucuuccugcaccucaucaagaucccgacccaccgccacaucacgggcaagcccugccccaagccccaccggcugaaccacauggggaucugcuccugcggccuguacaagcacccgggggugcccgugaaguggaagcgcugaggacuaguaauaaggaaacuguaugaaugucugugggcaggaagugaagagauccuucuguaaagguuuuuggaauuaugucugcugaauaauaaacuuuuuugaaauaauaaaucugguagaaaaaugagaucucaaaggcucuuuucagagccaccaaaaaaaaaaaaaaaaaaaaaaaaaaaaaaaaaaaaaaaaaaaaaaaaaaaaaaaaaaaaaaaaaaaaaaaaaaaaaaaaaaaaaaaaaaaaaaaaaaaaa

SEQ ID NO: 39288 - RNA, 1809 nt, Artificial Sequence
  mRNA product Design b-4 (hSL-A100) comprising derived and/or modified sequence from LASV(LASV253-NIG-2011;Clade II)__AIT17670__GPCmut11 (opt1)
aggagagucccgcagucggcguccagcggcucugcuuguucgugugugugucguugcaggccuuauucaagcuuaccaugggccagaucaucaccuucuuccaggaggugccccacgucaucgaggaggugaugaacaucgugcugaucgcccucagccugcuggccauccucaaggggaucuacaacgucgcgaccugcggccuguucgggcugguguccuuccuccugcugugcggccgcagcugcuccacgaccuacaaggggguguacgagcuccagacccuggagcuggacauggccagccucaacaugaccaugccgcuguccugcacgaagaacaacagccaccacuacaucauggucggcaacgagaccggccuggagcucacccugaccaacacguccaucaucaaccacaaguucugcaaccugagcgacgcccacaagaagaaccucuacgaccacgcccugauguccaucaucagcaccuuccaccuguccauccccaacuucaaccaguacgaggccaugagcugcgacuucaacgggggcaagaucuccgugcaguacaaccucagccacaccuacgcgguggacgccgccaaccacugcgggaccaucgccaacggcguccugcagacguucaugcggauggcguggggcggguccuacaucgcccuggacagcggcaagggguccugggacugcaucaugaccagcuaccaguaccucaucauccagaacaccaccugggaggaccacugccaguucucccgccccagccccaucggcuaccuggggcugcucagccagcggacgcgcgacaucuacaucucccggcgccugcugggcaccuucaccuggacccucagcgacuccgagggcaacgagacgcccgggggcuacugccugacccgguggaugcugaucgaggccgagcucaagugcuucgggaacaccgccguggccaagugcaacgagaagcacgacgaggaguucugcgacaugcugcgccuguucgacuucaacaagcaggcgauccggcgccucaaggccgaggcccagaugagcauccagcugaucaacaaggccgugaacgcccugaucaacgaccagcucaucaugaagaaccaccuccgggacaucaugggcaucccguacugcaacuacuccaaguacugcuaccugaaccacaccgucacggggcgcaccagccugccccggugcugccugguguccaacggcagcuaccugaacgagacccacuucuccgacgacaucgagcagcaggcggacaacaugaucaccgagcuccugcagaaggaguacaucgaccgccagggcaagacgccccuggggcucguggaccuguucgucuucagcaccuccuucuaccugaucagcaucuuccugcaccucgugaagaucccgacccaccggcacaucaucggcaagcccugccccaagccccaccgccugaaccacauggggaucugcuccugcggccuguacaagcacccgggggugcccgucaaguggaagcggugaggacuaguaauaaggaaacuguaugaaugucugugggcaggaagugaagagauccuucuguaaagguuuuuggaauuaugucugcugaauaauaaacuuuuuugaaauaauaaaucugguagaaaaaugagaucucaaaggcucuuuucagagccaccaaaaaaaaaaaaaaaaaaaaaaaaaaaaaaaaaaaaaaaaaaaaaaaaaaaaaaaaaaaaaaaaaaaaaaaaaaaaaaaaaaaaaaaaaaaaaaaaaaaaa

SEQ ID NO: 39289 - RNA, 1809 nt, Artificial Sequence
  mRNA product Design b-4 (hSL-A100) comprising derived and/or modified sequence from LASV(LASV254-NIG-2011;Clade II)__AIT17674__GPCmut11 (opt1)
aggagagucccgcagucggcguccagcggcucugcuuguucgugugugugucguugcaggccuuauucaagcuuaccaugggccagaucaucaccuucuuccaggaggugccccacgucaucgaggaggugaugaacaucgugcugaucgcccucagccugcuggccauccucaaggggaucuacaacgucgcgaccugcggccuguucgggcugguguccuuccuccugcugugcggccgcagcugcuccacgaccuacaaggggguguacgagcuccagacccuggagcuggacaugaccaaccucaacaugacgaugccgcugagcugcaccaagaacaacucccaccacuacaucauggucggcaacgagaccggccuggagcucacccugacgaacaccagcaucaucaaccacaaguucugcaaccuguccgacgcccacaagaagaaccucuacaaccacgcccugaugagcaucaucuccaccuuccaccugagcauccccaacuucaaccaguacgaggccauguccugcgacuucaacgggggcaagaucagcgugcaguacaaccucucccacagcuacgccguggacgcggccaaccacugcgggaccaucgccaacggcguccugcagacguucaugcggauggccuggggcggguccuacaucgcgcuggacagcggcaaggggaacugggacugcaucaugaccuccuaccaguaccucaucauccagaacaccaccugggaggaccacugccaguucagccgccccucccccaucggcuaccuggggcugcucagccagcggacgcgcgacaucuacaucagccggcgccugcugggcaccuucaccuggacccucuccgacagcgagggcaacgagacgcccgggggcuacugccugacccgguggaugcugaucgaggccgagcucaagugcuucgggaacaccgccguggccaagugcaacgagaagcacgacgaggaguucugcgacaugcugcgccuguucgacuucaacaagcaggccauccggcgccucaagaccgaggcgcaggccaacauccagcugaucaacaaggccgugaacgcccugaucaacgaccagcucaucaugaagaaccaccuccgggacaucaugggcauccccuacugcaacuacuccaaguacugcuaccugaaccacacggucaccgggaagaccagccugccccgcugcugccugguguccaacggcagcuaccugaacgagacccacuucuccgacgacaucgagcagcaggccgacaacaugaucacggagcuccugcagaaggaguacauggaccggcagggcaagaccccgcuggggcucguggaccuguucgucuucagcaccuccuucuaccugaucagcaucuuccugcaccucgugaagaucccgacccaccgccacgugaucggcaagcccugccccaagccccaccggcugaaccacauggggaucugcuccugcggccuguacaagcacccggggguccccgugaaguggaagcgcugaggacuaguaauaaggaaacuguaugaaugucugugggcaggaagugaagagauccuucuguaaagguuuuuggaauuaugucugcugaauaauaaacuuuuuugaaauaauaaaucugguagaaaaaugagaucucaaaggcucuuuucagagccaccaaaaaaaaaaaaaaaaaaaaaaaaaaaaaaaaaaaaaaaaaaaaaaaaaaaaaaaaaaaaaaaaaaaaaaaaaaaaaaaaaaaaaaaaaaaaaaaaaaaaa

SEQ ID NO: 39290 - RNA, 1809 nt, Artificial Sequence
  mRNA product Design b-4 (hSL-A100) comprising derived and/or modified sequence from LASV(Nig08-A19;Clade III)__ADU56618__GPCmut11 (opt1)
aggagagucccgcagucggcguccagcggcucugcuuguucgugugugugucguugcaggccuuauucaagcuuaccaugggccagaucgugaccuucuuccaggaggucccccacgugaucgaggaggugaugaacaucguccugaucgcccucagcauccuggccauccugaaggggcucuacaacaucgcgaccugcggccugaucgggcuggugacguuccuccugcuguccggccgcagcugcuccaugaccuacaaggggguguacgagcuccagacccuggagcugaacaugaacacccucaacaugacgaugccgcugagcugcaccaagaacaacucccaccacuacaucauggucggcaacgagaccggccuggagcucacccugacgaacaccagccugcuccaccacaaguucugcaaccuguccgacgcccacaagaagaaccuguacgaccacacccucaugagcaucaucuccaccuuccaccugagcauccccaacuucaaccaguacgaggccauguccugcgacuucaacgggggcaagaucacggugcaguacaaccugagccacuccuacgccaucgacgccgcgaaccacugcgggaccguggccaacggcguccuccagaccuucaugcggauggccuggggcgggagcuacaucgcccuggacuccggccgcgggaagugggacugcaucaugaccagcuaccaguaccugaucauccagaacacgaccugggaggaccacugccaguucucccggcccagccccaucggcuaccucgggcugcugucccagcgcacccgggacaucuacaucagccgccggcuccugggcaccuucacguggacccugagcgacuccgagggcaacgagacccccgggggcuacugccucacccgcuggaugcugaucgaggcggagcugaagugcuucgggaacacggccguggccaagugcaacgagaagcacgacgaggaguucugcgacaugcuccggcuguucgacuucaacaagcaggccauccgccggcugaaggccgaggcgcagaugagcauccagcucaucaacaaggccgugaacgcccugaucaacgaccagcugaucaugaagaaccaccuccgcgacaucaugggcauccccuacugcaacuacuccaaguacugcuaccugaaccacaccagcaccgggcggaccucccugccccgcugcugccucgucagcaacggcuccuaccugaacgagacgcacuucagcgacgacaucgagcagcaggccgacaacaugaucaccgagaugcugcagaaggaguaccucgaccggcagggcaagaccccgcuggggcugguggaccuguucguguucuccaccagcuucuaccucaucuccaucuuccugcaccuggucaagaucccgacgcaccgccacaucgugggcaagcccugccccaagccccaccggcucaaccacauggggaucugcagcugcggccuguacaagcagccgggggugcccguccgcuggaagcggugaggacuaguaauaaggaaacuguaugaaugucugugggcaggaagugaagagauccuucuguaaagguuuuuggaauuaugucugcugaauaauaaacuuuuuugaaauaauaaaucugguagaaaaaugagaucucaaaggcucuuuucagagccaccaaaaaaaaaaaaaaaaaaaaaaaaaaaaaaaaaaaaaaaaaaaaaaaaaaaaaaaaaaaaaaaaaaaaaaaaaaaaaaaaaaaaaaaaaaaaaaaaaaaaa

SEQ ID NO: 39291 - RNA, 1812 nt, Artificial Sequence
  mRNA product Design b-4 (hSL-A100) comprising derived and/or modified sequence from LASV(G1180-SLE-2010;Clade IV)__AIT17168__GPCmut11 (opt1)
aggagagucccgcagucggcguccagcggcucugcuuguucgugugugugucguugcaggccuuauucaagcuuaccaugggccagaucgugaccuucuuccaggaggucccccacgugaucgaggaggugaugaacaucguccugaucgcccucagcauccuggccgugcugaaggggcucuacaacuucgcgaccugcggccugguggggcugcucaccuuccugcugcucugcggccgcuccugcaccgccagccgguacaagggggucuacgagcugcagacccuggagcucaacauggagacccugaacaugacgaugccgcuguccugcaccaagaacaacagccaccacuacaucauggugggcaacgagaccggccucgagcugacccugacgaacaccuccaucaucaaccacaaguucugcaaccucagcgacgcccacaagaagaaccuguacgaccacgcccugauguccaucaucagcaccuuccaccucuccauccccaacuucaaccaguacgaggccaugagcugcgacuucaacgggggcaagaucuccgugcaguacaaccugagccacuccuacgcgggggacgccgccaaccacugcggcaccgucgccaacggggugcugcagacguucaugcgcauggcguggggcggcagcuacaucgcccucgacuccgggcacggcagcugggacugcaucaugaccuccuaccaguaccugaucauccagaacaccaccugggaggaccacugccaguucagccggcccucccccaucggguaccugggccuccugagccagcgcacgcgggacaucuacaucagccgccggcugcucggcaccuucaccuggacccuguccgacagcgaggggaaggacacgccgggcggguacugccugacccgcuggaugcucaucgaggccgagcugaagugcuucggcaacaccgccguggccaagugcaacgagaagcacgacgaggaguucugcgacaugcugcggcuguucgacuucaacaagcaggcgauccagcgccugaaggccgaggcccagauguccauccagcugaucaacaaggccgucaacgcccucaucaacgaccagcugaucaugaagaaccaccuccgggacaucauggggauccccuacugcaacuacagcaaguacugcuaccucaaccacaccacgaccggcaagaccucccugcccaagugcugccuggugagcaacggcuccuaccucaacgagacccacuucagcgacgacaucgagcagcaggcggacaacaugaucacggagaugcugcagaaggaguacauggagcgccaggggaagacgccccugggccucguggaccuguucgucuucuccaccagcuucuaccugaucuccaucuuccugcaccucgugaagaucccgacccaccggcacaucgugggcaagagcugccccaagccccaccgccugaaccacauggggaucugcuccugcgggcuguacaagcagcccggcgucccggugaaguggaagcggugaggacuaguaauaaggaaacuguaugaaugucugugggcaggaagugaagagauccuucuguaaagguuuuuggaauuaugucugcugaauaauaaacuuuuuugaaauaauaaaucugguagaaaaaugagaucucaaaggcucuuuucagagccaccaaaaaaaaaaaaaaaaaaaaaaaaaaaaaaaaaaaaaaaaaaaaaaaaaaaaaaaaaaaaaaaaaaaaaaaaaaaaaaaaaaaaaaaaaaaaaaaaaaaaa

SEQ ID NO: 39292 - RNA, 1812 nt, Artificial Sequence
  mRNA product Design b-4 (hSL-A100) comprising derived and/or modified sequence from LASV(G1442-SLE-2011;Clade IV)__AIT17180__GPCmut11 (opt1)
aggagagucccgcagucggcguccagcggcucugcuuguucgugugugugucguugcaggccuuauucaagcuuaccaugggccagaucgugaccuucuuccaggaggucccccacgugaucgaggaggugaugaacaucguccugaucgcccucagcauccuggccgugcugaaggggcucuacaacguggcgaccugcggccugaucgggcuggucacguuccuccugcugugcggccgcuccugcaccaccacccucuacaaggggguguacgagcugcagacgcuggagcucaacauggagacccugaacaugaccaugccgcugagcugcaccaagaacaacucccaccacuacauccgggugggcaacgagacgggccucgagcugacccugaccaacaccagcaucaucaaccacaaguucugcaaccucuccgacgcccacaagaagaaccuguacgaccacgcccugaugagcaucaucuccacguuccaccucagcauccccaacuucaaccaguacgaggccauguccugcgacuucaacgggggcaagaucagcguccaguacaaccugucccacagcuacgccggggacgcggccaaccacugcggcaccguggccaacggggugcugcagaccuucaugcgcauggccuggggcggcuccuacaucgcgcucgacagcgggcggggcaacugggacugcaucaugaccuccuaccaguaccugaucauccagaacacgaccugggacgaccacugccaguucagccgccccucccccaucggguaccugggccuccugagccagcggacccgcgacgucuacaucucccggcgccugcucggcaccuucacguggacccugagcgacagcgaggggaaggacaccccgggcggguacugccugacccgguggaugcucaucgaggccgagcugaagugcuucggcaacacggccguggccaagugcaacgagaagcacgacgaggaguucugcgacaugcugcgccucuucgacuucaacaagcaggccauccagcggcugaaggcggaggcccagauguccauccagcugaucaacaaggccgugaacgcccucaucaacgaccagcugaucaugaagaaccaccuccgcgacaucauggggauccccuacugcaacuacagcaaguacugcuaccugaacaacaccgccaccggcaagaccucccugcccaagugcugccugaucagcaacggcuccuaccucaacgagacgcacuucagcgacgacaucgagcaggaggcggacaacaugaucaccgagaugcugcagaaggaguacauggagcggcaggggaagacgccccugggccucgucgaccuguucguguucuccaccagcuucuaccugaucuccaucuuccugcaccucgugaagaucccgacccaccgccacaucgucggcaagagcugccccaagccccaccggcugaaccacauggggaucugcuccugcgggcuguacaagcagcccggcgugccggugcgcuggaagcggugaggacuaguaauaaggaaacuguaugaaugucugugggcaggaagugaagagauccuucuguaaagguuuuuggaauuaugucugcugaauaauaaacuuuuuugaaauaauaaaucugguagaaaaaugagaucucaaaggcucuuuucagagccaccaaaaaaaaaaaaaaaaaaaaaaaaaaaaaaaaaaaaaaaaaaaaaaaaaaaaaaaaaaaaaaaaaaaaaaaaaaaaaaaaaaaaaaaaaaaaaaaaaaaaa

SEQ ID NO: 39293 - RNA, 1812 nt, Artificial Sequence
  mRNA product Design b-4 (hSL-A100) comprising derived and/or modified sequence from LASV(G3010-SLE-2013;Clade IV)__AIT17344__GPCmut11 (opt1)
aggagagucccgcagucggcguccagcggcucugcuuguucgugugugugucguugcaggccuuauucaagcuuaccaugggccagaucgugaccuucuuccaggaggucccccacgugaucgaggaggugaugaacaucguccugaucgcccucagcauccuggccgugcugaaggggcucuacaacuucgcgaccugcggccugguggggcuggucacguuccuccugcugugcggccgcuccugcaccaccagccucuacaaggggguguacgagcugcagacccuggagcucaacauggagacgcugaacaugaccaugccgcuguccugcaccaagaacaacagccaccacuacaucauggugggcaacgagaccggccucgagcugacgcugaccaacaccuccaucaucaaccacaaguucugcaaccucagcgacgcccacaagaagaaccuguacaaccacgcccugauguccaucaucagcaccuuccaccucuccauccccaacuucaaccaguacgaggccaugagcugcgacuucaacgggggcaagaucuccguccaguacaaccugagccacuccuacgccggggacgcggccagccacugcggcacgguggccaacggggugcugcagaccuucaugcggauggccuggggcggcuccuacaucgcgcucgacagcggguacggcaagugggacugcaucaugaccuccuaccaguaccugaucauccagaacaccacgugggaggaccacugccaguucagccgccccucccccaucggguaccugggccuccugagccagcggacccgcgacaucuacaucagccggcgccugcucggcaccuucaccuggacgcuguccgacagcgaggggaaggacaccccgggcggguacugccugacccgguggaugcucaucgaggccgagcugaagugcuucggcaacaccgccgucgccaagugcaacgagaagcacgacgaggaguucugcgacaugcugcgccucuucgacuucaacaagcaggccauccagcggcugaagacggaggcgcagauguccauccagcugaucaacaaggccgugaacgcccucaucaacgaccagcugaucaugaagaaccaccuccgcgacaucauggggauccccuacugcaacuacagcaaguacugcuaccugaaccacaccaccaccggcaagacgucccugcccaagugcugccuggugagcaacggcuccuaccucaacgagacccacuucagcgacgacaucgagcagcaggccgacaacaugaucaccgagaugcugcagaaggaguacauggagcggcaggggaagacgccccugggccucgucgaccuguucguguucuccaccagcuucuaccugaucuccaucuuccugcaccucgugaagaucccgacccaccgccacaucgucggcaagagcugccccaagccccaccggcugaaccacauggggaucugcuccugcgggcuguacaagcagcccggcgugccggugcgcuggaagcggugaggacuaguaauaaggaaacuguaugaaugucugugggcaggaagugaagagauccuucuguaaagguuuuuggaauuaugucugcugaauaauaaacuuuuuugaaauaauaaaucugguagaaaaaugagaucucaaaggcucuuuucagagccaccaaaaaaaaaaaaaaaaaaaaaaaaaaaaaaaaaaaaaaaaaaaaaaaaaaaaaaaaaaaaaaaaaaaaaaaaaaaaaaaaaaaaaaaaaaaaaaaaaaaaa

SEQ ID NO: 39294 - RNA, 1812 nt, Artificial Sequence
  mRNA product Design b-4 (hSL-A100) comprising derived and/or modified sequence from LASV(G502-SLE-2009;Clade IV)__AIT17126__GPCmut11 (opt1)
aggagagucccgcagucggcguccagcggcucugcuuguucgugugugugucguugcaggccuuauucaagcuuaccaugggccagaucgugaccuucuuccaggaggucccccacgugaucgaggaggugaugaacaucguccugaucgcccucagcauccuggccgugcugaaggggcucuacaacuucgcgaccugcggccugguggggcugcucacguuccugcugcucugcggccgcuccugcaccaccgggcuguacaagggcgucuacgagcugcagacccucgagcugaacauggagacgcugaacaugaccaugccgcucagcugcaccaagaacaacucccaccacuacaucauggugggcaacgagaccgggcuggagcugacgcucaccaacaccagcaucaucaaccacaaguucugcaaccuguccgacgcccacaagaagaaccuguacgaccacgcccucaugagcaucaucuccaccuuccaccugagcauccccaacuucaaccaguacgaggccauguccugcgacuucaacggcgggaagaucagcgugcaguacaaccugucccacagcuacgccggcgacgcggccgaccacugcgggacggucgccaacggcgugcuccagaccuucaugcggauggccuggggcggguccuacaucgcgcuggacagcggccgcgggcggugggacugcaucaugaccuccuaccaguaccugaucauccagaacaccacgugggaggaccacugccaguucagccgccccucccccaucggcuaccucggccugcugagccagcggacccgcgacaucuacaucucccggcgccuccuggggaccuucaccuggacgcugagcgacagcgagggcaaggacacccccgggggcuacugccucacccgguggaugcugaucgaggccgagcugaagugcuucgggaacaccgccguggccaagugcaacgagaagcacgacgaggaguucugcgacaugcuccgccuguucgacuucaacaagcaggccauccagcggcugaaggcggaggcccagauguccauccagcucaucaacaaggccgucaacgcccugaucaacgaccagcuggugaugaagaaccaccuccgcgacaucaugggcauccccuacugcaacuacagccgguacugcuaccugaaccacacgaccaccggccgcaccucccugcccaagugcugccucgugagcaacggguccuaccugaacgagacgcacuucagcgacgacaucgagcagcaggccgacaacaugaucaccgagaugcugcagaaggaguacauggagcggcagggcaagaccccgcucgggcuggucgaccuguucguguucuccaccagcuucuaccugaucuccaucuuccuccaccuggugaagaucccgacgcaccgccacaucgucggcaagagcugccccaagccccaccggcugaaccacauggggaucugcuccugcggccucuacaagcagcccggcgugccggugaaguggaagcgcugaggacuaguaauaaggaaacuguaugaaugucugugggcaggaagugaagagauccuucuguaaagguuuuuggaauuaugucugcugaauaauaaacuuuuuugaaauaauaaaucugguagaaaaaugagaucucaaaggcucuuuucagagccaccaaaaaaaaaaaaaaaaaaaaaaaaaaaaaaaaaaaaaaaaaaaaaaaaaaaaaaaaaaaaaaaaaaaaaaaaaaaaaaaaaaaaaaaaaaaaaaaaaaaaa

SEQ ID NO: 39295 - RNA, 1812 nt, Artificial Sequence
  mRNA product Design b-4 (hSL-A100) comprising derived and/or modified sequence from LASV(G733-SLE-2010;Clade IV)__AIT17154__GPCmut11 (opt1)
aggagagucccgcagucggcguccagcggcucugcuuguucgugugugugucguugcaggccuuauucaagcuuaccaugggccagaucgugaccuucuuccaggaggucccccacgugaucgaggaggugaugaacaucguccugaucgcccucagcauccuggccgugcugaaggggcucuacaacuucgcgaccugcggcaucguggggcuggucuccuuccugcuccugugcggccgcagcugcacgaccucccuguacaaggggguguacgagcuccagacccuggagcugaacauggagacccucaacaugacgaugccgcugagcugcaccaagaacaacucccaccacuacaucauggugggcaacgagaccggccuggagcucacccugacgaacaccagcaucaucaaccacaaguucugcaaccuguccgacgcccacaagaagaaccucuacgaccacgcccugaugagcaucaucuccaccuuccaccugagcauccccaacuucaaccaguacgaggccauguccugcgacuucaacgggggcaagaucagcguccaguacaaccucucccacagcuacgccggggacgcggccaaccacugcggcaccaucgccaacggggugcugcagacguucaugcggauggccuggggcggcuccuacaucgcgcuggacagcgggcgcgaccggugggacugcaucaugaccuccuaccaguaccucaucauccagaacaccaccugggaggaccacugccaguucagccgccccucccccaucggcuaccuggggcugcucagccagcggacgcgcgacaucuacaucagccggcgccugcugggcaccuucaccuggacccucuccgacagcgagggcaaggacacgcccgggggcuacugccugacccgguggaugcugaucgaggccgagcucaagugcuucgggaacaccgccguggccaagugcaacgagaagcacgacgaggaguucugcgacaugcugcgccuguucgacuucaacaagcaggccauccagcggcucaaggcggaggcccagauguccauccagcugaucaacaaggccgucaacgcccugaucaacgaccagcucaucaugaagaaccaccuccgcgacaucaugggcauccccuacugcaacuacagcaaguacugcuaccugaaccacaccacgaccgggaagaccucccugcccaagugcugccuggugagcaacggcuccuaccugaacgagacccacuucagcgacgacaucgagcagcaggccgacaacaugaucacggagaugcuccagaaggaguacauggagcggcagggcaagaccccgcuggggcugguggaccucuucgucuucuccaccagcuucuaccugaucuccaucuuccugcaccuggugaagaucccgacccaccgccacguggucggcaagagcugccccaagccccaccggcucaaccacauggggaucugcuccugcggccuguacgggcagcccggcgugccggugaaguggaagcgcugaggacuaguaauaaggaaacuguaugaaugucugugggcaggaagugaagagauccuucuguaaagguuuuuggaauuaugucugcugaauaauaaacuuuuuugaaauaauaaaucugguagaaaaaugagaucucaaaggcucuuuucagagccaccaaaaaaaaaaaaaaaaaaaaaaaaaaaaaaaaaaaaaaaaaaaaaaaaaaaaaaaaaaaaaaaaaaaaaaaaaaaaaaaaaaaaaaaaaaaaaaaaaaaaa

SEQ ID NO: 39296 - RNA, 1812 nt, Artificial Sequence
  mRNA product Design b-4 (hSL-A100) comprising derived and/or modified sequence from MOPV/LASV reassortant(IGS-1;Clade IV)__AFY05576__GPCmut11 (opt1)
aggagagucccgcagucggcguccagcggcucugcuuguucgugugugugucguugcaggccuuauucaagcuuaccaugggccagaucgugaccuucuuccaggaggucccccacgugaucgaggaggugaugaacaucguccugaucgcccucagcgugcuggccgugcugaaggggcucuacaacuucgcgaccugcggccuggucgggcuggugacguuccuccugcugugcggccgcuccugcaccaccagccucuacaaggggguguacgagcugcagacccuggagcucaacauggagacgcugaacaugaccaugccgcuguccugcaccaagaacaacagccaccacuacaucauggucggcaacgagaccggccucgagcugacgcugaccaacaccuccaucaucaaccacaaguucugcaaccucagcgacgcccacaagaagaaccuguacgaccacgcccugauguccaucaucagcaccuuccaccucuccauccccaacuucaaccaguacgaggccaugagcugcgacuucaacgggggcaagaucuccgugcaguacaaccugagccacuccuacgccggggacgcggccaaccacugcggcacgguggccaacgggguccugcagaccuucaugcggauggccuggggcggcagcuacaucgcgcucgacuccgggcgcggcaacugggacugcaucaugaccagcuaccaguaccugaucauccagaacaccacgugggaggaccacugccaguucucccggcccagccccaucggguaccugggccuccugucccagcgcacccgggacaucuacaucagccgccggcugcucggcaccuucaccuggacgcugagcgacuccgagggggaggacaccccgggcggguacugccugacccgcuggaugcucaucgaggccgagcugaagugcuucggcaacaccgccguggccaagugcaacgagaagcacgacgaggaguucugcgacaugcugcggcuguucgacuucaacaagcaggccauccagcgccugaaggcggaggcccagaugagcauccagcugaucaacaaggccgugaacgcccucaucaacgaccagcugaucaugaagaaccaccuccgggacaucauggggauccccuacugcaacuacuccaaguacugcuaccucaaccacacgaccaccggccgcaccagccugcccaagugcugccuggucuccaacggcagcuaccucaacgagacgcacuucuccgacgacaucgagcagcaggccgacaacaugaucaccgagaugcugcagaaggaguacauggagcggcaggggaagacgccccugggccucguggaccuguucguguucagcaccuccuucuaccugaucagcaucuuccugcaccucgucaagaucccgacccaccgccacaucguggggaaguccugccccaagccccaccggcugaaccacaugggcaucugcagcugcgggcuguacaagcagcccggcgugccggucaaguggaagcgcugaggacuaguaauaaggaaacuguaugaaugucugugggcaggaagugaagagauccuucuguaaagguuuuuggaauuaugucugcugaauaauaaacuuuuuugaaauaauaaaucugguagaaaaaugagaucucaaaggcucuuuucagagccaccaaaaaaaaaaaaaaaaaaaaaaaaaaaaaaaaaaaaaaaaaaaaaaaaaaaaaaaaaaaaaaaaaaaaaaaaaaaaaaaaaaaaaaaaaaaaaaaaaaaaa

SEQ ID NO: 39297 - RNA, 1812 nt, Artificial Sequence
  mRNA product Design b-4 (hSL-A100) comprising derived and/or modified sequence from LASV(LM765-SLE-2012;Clade IV)__AIT17814__GPCmut11 (opt1)
aggagagucccgcagucggcguccagcggcucugcuuguucgugugugugucguugcaggccuuauucaagcuuaccaugggccagaucgugaccuucuuccaggaggucccccacgugaucgaggaggugaugaacaucguccugaucgcccucagcauccuggccgugcugaaggggcucuacaacuucgcgaccugcggccugguggggcuggucacguuccuccugcugugcggccgcuccugcaccaccagccucuacaaggggguguacgagcugcagacccuggagcucaacauggagacgcugaacaugaccaugccgcuguccugcaccaagaacaacagccaccacuacaucauggugggcaacgagaccggccucgagcugacgcugaccaacaccuccaucaucgaccacaaguucugcaaccucagcgacgcccaccggaagaaccuguacgaccacgcccugauguccaucaucagcaccuuccaccucuccauccccaacuucaaccaguacgaggccaugagcugcgacuucaacgggggcaagaucuccguccaguacaaccugagccacuccuacgccaaggacgcggccgaccacugcgggacgguggccaacggcgugcugcagaccuucaugcgcauggccuggggcgggagcuacaucgcgcucgacuccggccgggggcgcugggacugcaucaugaccagcuaccaguaccugaucauccagaacaccacgugggaggaccacugccaguucucccggcccagccccaucggcuaccuggggcuccugucccagcgcacccgggacaucuacaucagccgccggcugcucggcaccuucaccuggacgcugagcgacuccgagggcaaggacacccccgggggcuacugccugacccgcuggaugcucaucgaggccgagcugaagugcuucgggaacaccgccgucgccaagugcaacgagaagcacgacgaggaguucugcgacaugcugcggcuguucgacuucaacaagcaggccauccagcgccugaaggcggaggcccagaugagcauccagcugaucaacaaggccgugaacgcccucaucaacgaccagcugaucaugaagaaccaccuccgggacaucaugggcauccccuacugcaacuacuccaaguacugcuaccucaaccacacgaccaccgggaagaccagccugcccaagugcugccugguguccaacggcagcuaccucaacgagacgcacuucuccgacgacaucgagcagcaggccgacaacaugaucaccgagaugcugcagaaggaguacauggagcgccagggcaagaccccgcuggggcucgucgaccuguucguguucagcaccuccuucuaccugaucagcaucuuccugcaccucgugaagaucccgacgcaccggcacaucgucggcaagcccugccccaagccccaccgccugaaccacauggggaucugcuccugcggccuguacaagcagccgggggugcccgugaaguggaagcggugaggacuaguaauaaggaaacuguaugaaugucugugggcaggaagugaagagauccuucuguaaagguuuuuggaauuaugucugcugaauaauaaacuuuuuugaaauaauaaaucugguagaaaaaugagaucucaaaggcucuuuucagagccaccaaaaaaaaaaaaaaaaaaaaaaaaaaaaaaaaaaaaaaaaaaaaaaaaaaaaaaaaaaaaaaaaaaaaaaaaaaaaaaaaaaaaaaaaaaaaaaaaaaaaa

SEQ ID NO: 39298 - RNA, 1812 nt, Artificial Sequence
  mRNA product Design b-4 (hSL-A100) comprising derived and/or modified sequence from LASV(LM776-SLE-2012;Clade IV)__AIT17824__GPCmut11 (opt1)
aggagagucccgcagucggcguccagcggcucugcuuguucgugugugugucguugcaggccuuauucaagcuuaccaugggccagaucgugaccuucuuccaggaggucccccacgugaucgaggaggugaugaacaucguccugaucgcccucagcauccuggccgugcugaaggggcucuacaacuucgcgaccugcggccugguggggcuggucacguuccuccugcugugcggccgcuccugcaccaccagcguguacaaggggguguacgagcuccagacccuggagcugaacauggagacgcucaacaugaccaugccgcuguccugcaccaagaacaacagccaccacuacaucauggucggcaacgagaccggccuggagcucacgcugaccaacaccuccaucaucaaccacaaguucugcaaccugagcgacgcccacaagaagaaccucuacgaccacgcccugauguccaucaucagcaccuuccaccuguccauccccaacuucaaccaguacgaggccaugagcugcgacuucaacgggggcaagaucuccgugcaguacaaccucagccacuccuacgccggggacgcggccaaccacugcggcacgguggccaacgggguccugcagaccuucaugcggauggccuggggcggcagcuacaucgcgcuggacuccgggcacggcaagugggacugcaucaugaccagcuaccaguaccucaucauccagaacaccacgugggaggaccacugccaguucucccgccccagccccaucggguaccugggccugcucucccagcggacccgcgacaucuacaucagccggcgccugcugggcaccuucaccuggacgcucagcgacuccgaggggaaggacaccccgggcggguacugccugacccgguggaugcugaucgaggccgagcucaagugcuucggcaacaccgccguggccaagugcaacgagaagcacgacgaggaguucugcgacaugcugcgccuguucgacuucaacaagcaggccauccagcggcucaaggcggaggcccagaugagcauccagcugaucaacaaggccgugaacgcccugaucaacgaccagcucaucaugaagaaccaccuccgcgacaucauggggauccccuacugcaacuacuccaaguacugcuaccugaaccacacgaccaccggcaagaccagccugcccaagugcugccuggucuccaacggcagcuaccugaacgagacgcacuucuccgacgacaucgagcagcaggccgacaacaugaucaccgagaugcuccagaaggaguacauggagcggcaggggaagacgccccugggccugguggaccucuucguguucagcaccuccuucuaccugaucagcaucuuccugcaccuggucaagaucccgacccaccgccacaucguggggaaguccugccccaagccccaccggcucaaccacaugggcaucugcagcugcgggcuguacaagcagcccggcgugccgguccgcuggaagcggugaggacuaguaauaaggaaacuguaugaaugucugugggcaggaagugaagagauccuucuguaaagguuuuuggaauuaugucugcugaauaauaaacuuuuuugaaauaauaaaucugguagaaaaaugagaucucaaaggcucuuuucagagccaccaaaaaaaaaaaaaaaaaaaaaaaaaaaaaaaaaaaaaaaaaaaaaaaaaaaaaaaaaaaaaaaaaaaaaaaaaaaaaaaaaaaaaaaaaaaaaaaaaaaaa

SEQ ID NO: 39299 - RNA, 1812 nt, Artificial Sequence
  mRNA product Design b-4 (hSL-A100) comprising derived and/or modified sequence from LASV(Mad39;Clade IV)__ANH09722__GPCmut11 (opt1)
aggagagucccgcagucggcguccagcggcucugcuuguucgugugugugucguugcaggccuuauucaagcuuaccaugggccagaucgugaccuucuuccaggaggucccccacgugaucgaggaggugaugaacaucguccugaucgcccucagcauccuggccgugcugaaggggcucuacaacguggcgaccugcggccugaucgggcuggucacguuccuccugcugugcggccgcuccugcaccaccacccucuacaaggggguguacgagcugcaggcccuggagcucaacauggagacgcugaacaugaccaugccgcugagcugcaccaagaacaacucccaccacuacauccgggugggcaacgagaccggccucgagcugacgcugaccaacaccagccucaucaaccacaaguucugcaaccuguccgacgcccacaagaagaaccuguacgaccacgcccucaugagcaucaucuccaccuuccaccugagcauccccaacuucaaccaguacgaggccauguccugcgacuucaacgacgggaagaucagcguccaguacaaccugucccacacguacgcgggcgacaccgccaaccacugcgggaccguggccaacggcgugcuccagaccuucaugcgcauggccuggggcgggagcuacaucgcgcuggacuccggccgcgggggcugggacugcaucaugacgagcuaccaguaccugaucauccagaacaccaccugggaggaccacugccaguucucccggcccagccccaucggguaccucggccugcugucccagcggacccgcgacaucuacaucagccggcgccuccugggcacguucaccuggacccuguccgacagcgaggggaaggacaccccgggcggguacugccucacgcgguggaugcugaucgaggccgagcugaagugcuucggcaacaccgccgucgccaagugcaacgagaagcacgacgaggaguucugcgacaugcuccgccuguucgacuucaacaagcaggccauccagcggcugaaggcggaggcccagaugagcauccagcucaucaacaaggccgugaacgcccugaucaacgaccagcugaucaugaagaaccaccuccgcgacaucauggggauccccuacugcaacuacuccaaguacugcuaccugaaccacaccgugaccggcaagacgagccugcccaagugcugccucgucuccaacggcagcuaccugaacgagacccacuucuccgacgacaucgagcagcaggccgacaacaugaucaccgagaugcugcagaaggaguacauggagcggcaggggaagacgccccucggccugguggaccuguucguguucagcaccuccuucuaccugaucagcaucuuccuccaccuggucaagaucccgacccaccgccacgugguggggaagcccugccccaagccccaccggcugaaccacaugggcaucugcuccugcggguucuacaagcagccgggcguccccgugcgcuggaagcggugaggacuaguaauaaggaaacuguaugaaugucugugggcaggaagugaagagauccuucuguaaagguuuuuggaauuaugucugcugaauaauaaacuuuuuugaaauaauaaaucugguagaaaaaugagaucucaaaggcucuuuucagagccaccaaaaaaaaaaaaaaaaaaaaaaaaaaaaaaaaaaaaaaaaaaaaaaaaaaaaaaaaaaaaaaaaaaaaaaaaaaaaaaaaaaaaaaaaaaaaaaaaaaaaa

SEQ ID NO: 39300 - RNA, 1812 nt, Artificial Sequence
  mRNA product Design b-4 (hSL-A100) comprising derived and/or modified sequence from LASV(Z0947-SLE-2011;Clade IV)__AIT17840__GPCmut11 (opt1)
aggagagucccgcagucggcguccagcggcucugcuuguucgugugugugucguugcaggccuuauucaagcuuaccaugggccagaucgugaccuucuuccaggaggucccccacgugaucgaggaggugaugaacaucguccugaucgcccucagcauccuggccgugcugaaggggcucuacaacuucgcgaccugcggccugguggggcuggucacguuccuccugcugugcggccgcuccugcaccaucagccucuacaaggggguguacgagcugcagacccuggagcucaacauggagacccugaacaugacgaugccgcuguccugcaccaagaacaacagccaccacuacaucauggugggcaacgagaccggccucgagcugacccugacgaacaccuccaucaucaaccacaaguucugcaaccucagcgacgcccacaagaagaaccuguacgaccacgcccugauguccaucaucagcaccuuccaccucuccauccccaacuucaaccaguacgaggccaugagcugcgacuucaacgggggcaagaucuccguccaguacaaccugagccacuccuacgccggggacgcggccaaccacugcggcaccguggccaacggggugcugcagacguucaugcggauggccuggggcggcagcuacaucgcgcucgacuccgggcgcgaccggugggacugcaucaugaccagcuaccaguaccugaucauccagaacaccaccugggaggaccacugccaguucucccgccccagccccaucggcuaccuggggcuccugucccagcggacgcgcgacaucuacaucagccggcgccugcucggcaccuucaccuggacccugagcgacuccgagggcaaggacacgcccgggggcuacugccugacccgguggaugcucaucgaggccgagcugaagugcuucgggaacaccgccgucgccaagugcaacgagaagcacgacgaggaguucugcgacaugcugcgccucuucgacuucaacaagcaggccauccagcggcugaaggcggaggcccagaugagcauccagcugaucaacaaggccgugaacgcccucaucaacgaccagcugaucaugaagaaccaccuccgcgacaucaugggcauccccuacugcaacuacuccaaguacugcuaccugaaccacaccacgaccgggaagaccagccugcccaagugcugccugguguccaacggcagcuaccucaacgagacccacuucuccgacgacaucgagcagcaggccgacaacaugaucacggagaugcugcagaaggaguacauggagcggcagggcaagaccccgcuggggcucgucgaccuguucguguucagcaccuccuucuaccugaucagcaucuuccugcaccucgugaagaucccgacccaccgccacaucgucggcaagcccugccccaagccccaccggcugaaccacauggggaucugcuccugcggccuguacaagcagccgggggugcccgugaaguggaagcgcugaggacuaguaauaaggaaacuguaugaaugucugugggcaggaagugaagagauccuucuguaaagguuuuuggaauuaugucugcugaauaauaaacuuuuuugaaauaauaaaucugguagaaaaaugagaucucaaaggcucuuuucagagccaccaaaaaaaaaaaaaaaaaaaaaaaaaaaaaaaaaaaaaaaaaaaaaaaaaaaaaaaaaaaaaaaaaaaaaaaaaaaaaaaaaaaaaaaaaaaaaaaaaaaaa

SEQ ID NO: 39301 - RNA, 1812 nt, Artificial Sequence
  mRNA product Design b-4 (hSL-A100) comprising derived and/or modified sequence from LASV(Josiah;Clade IV)__NP_694870__GPCmut11 (opt1)
aggagagucccgcagucggcguccagcggcucugcuuguucgugugugugucguugcaggccuuauucaagcuuaccaugggccagaucgugaccuucuuccaggaggucccccacgugaucgaggaggugaugaacaucguccugaucgcccucagcgugcuggccgugcugaaggggcucuacaacuucgcgaccugcggccuggucgggcuggugacguuccuccugcugugcggccgcuccugcaccaccagccucuacaaggggguguacgagcugcagacccuggagcucaacauggagacgcugaacaugaccaugccgcuguccugcaccaagaacaacagccaccacuacaucauggucggcaacgagaccggccucgagcugacgcugaccaacaccuccaucaucaaccacaaguucugcaaccucagcgacgcccacaagaagaaccuguacgaccacgcccugauguccaucaucagcaccuuccaccucuccauccccaacuucaaccaguacgaggccaugagcugcgacuucaacgggggcaagaucuccgugcaguacaaccugagccacuccuacgccggggacgcggccaaccacugcggcacgguggccaacgggguccugcagaccuucaugcggauggccuggggcggcagcuacaucgcgcucgacuccgggcgcggcaacugggacugcaucaugaccagcuaccaguaccugaucauccagaacaccacgugggaggaccacugccaguucucccggcccagccccaucggguaccugggccuccugucccagcgcacccgggacaucuacaucagccgccggcugcucggcaccuucaccuggacgcugagcgacuccgaggggaaggacaccccgggcggguacugccugacccgcuggaugcucaucgaggccgagcugaagugcuucggcaacaccgccguggccaagugcaacgagaagcacgacgaggaguucugcgacaugcugcggcuguucgacuucaacaagcaggccauccagcgccugaaggcggaggcccagaugagcauccagcugaucaacaaggccgugaacgcccucaucaacgaccagcugaucaugaagaaccaccuccgggacaucauggggauccccuacugcaacuacuccaaguacugcuaccucaaccacacgaccaccggccgcaccagccugcccaagugcugccuggucuccaacggcagcuaccucaacgagacgcacuucuccgacgacaucgagcagcaggccgacaacaugaucaccgagaugcugcagaaggaguacauggagcggcaggggaagacgccccugggccugguggaccucuucguguucagcaccuccuucuaccugaucagcaucuuccugcaccucgucaagaucccgacccaccgccacaucguggggaaguccugccccaagccccaccggcugaaccacaugggcaucugcagcugcgggcuguacaagcagcccggcgugccggucaaguggaagcgcugaggacuaguaauaaggaaacuguaugaaugucugugggcaggaagugaagagauccuucuguaaagguuuuuggaauuaugucugcugaauaauaaacuuuuuugaaauaauaaaucugguagaaaaaugagaucucaaaggcucuuuucagagccaccaaaaaaaaaaaaaaaaaaaaaaaaaaaaaaaaaaaaaaaaaaaaaaaaaaaaaaaaaaaaaaaaaaaaaaaaaaaaaaaaaaaaaaaaaaaaaaaaaaaaa

SEQ ID NO: 39302 - RNA, 1809 nt, Artificial Sequence
  mRNA product Design b-4 (hSL-A100) comprising derived and/or modified sequence from LASV(LP;Clade I)__AAF86701__GPCmut11 (opt1)
aggagagucccgcagucggcguccagcggcucugcuuguucgugugugugucguugcaggccuuauucaagcuuaccaugggccagaucaucaccuucuuccaggaggugccccacgucaucgaggaggugaugaacaucgugcugaucgcccucagccugcuggccauccucaaggggcuguacaacaucgcgaccugcggcaucaucgggcuggucgccuuccucuuccugugcggcaaguccugcagccugacgcucaagggcggguacgagcugcagacccuggagcucaacauggagacccugaacaugaccaugccgcuguccugcacgaagaacagcucccaccacuacauccgcgugggcaacgagaccgggcucgagcugacccugaccaacacgagcaucaucaaccacaaguucugcaaccucuccgacgcccacaagaagaaccuguacgaccacgcccugaugagcaucaucuccaccuuccaccucagcauccccaacuucaaccaguacgaggccauguccugcgacuucaacggcgggaagaucagcgugcaguacaaccugucccacagcuacgcgggcgacgccgccgagcacugcgggaccgucgccaacggcgugcugcagaccuucaugcggauggcguggggcgggcgcuacaucgcccucgacuccggcaaggggaacugggacugcaucaugacgagcuaccaguaccugaucauccagaacaccaccugggaggaccacugccaguucucccggcccagccccaucggcuaccugggccuccugucccagcgcacccgggacaucuacaucagccgccggcugcucgggacguucaccuggacccugagcgacuccgagggcaacgagacccccgggggcuacugccugacgcgcuggaugcucaucgaggccgagcugaagugcuucgggaacaccgccguggccaagugcaacgagaagcacgacgaggaguucugcgacaugcugcggcuguucgacuucaacaagcaggcgauccgccggcugaaggccgaggcccagaugagcauccagcugaucaacaaggccgucaacgcccucaucaacgaccagcugaucaugaagaaccaccuccgcgacaucaugggcauccccuacugcaacuacuccaaguacugcuaccucaaccacaccagcuccggccggaccagccugcccaagugcugccugaucuccaacgggagcuaccucaacgagacgcaguucuccgacgacaucgagcagcaggcggacaacaugaucaccgagaugcugcagaaggaguacaucgagcgccagggcaagaccccgcuggggcugguggacaucuucaucuucagcaccuccuucuaccucaucagcaucuuccugcaccugaucaagaucccgacgcaccggcacaucgugggcaagcccugccccaagccccaccgccucaaccacaugggggucugcuccugcggccuguacaagcacccgggcgugcccaccaaguggaagcggugaggacuaguaauaaggaaacuguaugaaugucugugggcaggaagugaagagauccuucuguaaagguuuuuggaauuaugucugcugaauaauaaacuuuuuugaaauaauaaaucugguagaaaaaugagaucucaaaggcucuuuucagagccaccaaaaaaaaaaaaaaaaaaaaaaaaaaaaaaaaaaaaaaaaaaaaaaaaaaaaaaaaaaaaaaaaaaaaaaaaaaaaaaaaaaaaaaaaaaaaaaaaaaaaa

SEQ ID NO: 39303 - RNA, 1809 nt, Artificial Sequence
  mRNA product Design b-4 (hSL-A100) comprising derived and/or modified sequence from LASV(803213;Clade II)__AAF86703__GPCmut11 (opt1)
aggagagucccgcagucggcguccagcggcucugcuuguucgugugugugucguugcaggccuuauucaagcuuaccaugggccagaucaucaccuucuuccaggaggugccccacgucaucgaggaggugaugaacaucgugcugaucgcccucagccugcuggccauccucaaggggaucuacaacgucgcgaccugcggccuguucgggcugaucuccuuccuccugcugugcggccgcagcugcuccgugacguacaaggggguguacgagcuccagacccuggagcugaacauggccaaccucaacaugaccaugccgcugagcugcaccaagaacaacucccaccacuacaucauggucggcaacgagacgggccuggagcucacccugaccaacaccagcaucaucaaccacaaguucugcaaccuguccgacgcccacaagaagaaccucuacgaccacgcccugaugagcaucaucuccacguuccaccugagcauccccaacuucaaccaguacgaggccauguccugcgacuucaacgggggcaagaucagcgugcaguacaaccucucccacagcuucgcgguggacgccgccaaccacugcgggaccaucgccaacggcguccugcagaccuucaugcggauggcguggggcggguccuacaucgcccuggacagcggcaaggggaacugggacugcaucaugaccuccuaccaguaccucaucauccagaacacgaccugggaggaccacugccaguucagccgccccucccccaucggcuaccuggggcugcucagccagcggacccgcgacaucuacaucagccggcgccugcugggcaccuucacguggacccucuccgacagcgagggcaacgaggcccccgggggcuacugccugacccgguggaugcugaucgaggccgagcucaagugcuucgggaacaccgccguggcgaagugcaacgagaagcacgacgaggaguucugcgacaugcugcgccuguucgacuucaacaagcaggccaucaagcggcucaagacggaggcccagauguccauccagcugaucaacaaggccgugaacgcccugaucaacgaccagcucaucaugaagaaccaccuccgcgacaucaugggcauccccuacugcaacuacagccgguacugcuaccugaaccacaccgucaccgggaagaccucccugccccgcugcugccuggugagcaacggcuccuaccugaacgagacgcacuucagcgacgacaucgagcagcaggcggacaacaugaucaccgagaugcuccagaaggaguacauggaccggcagggcaagaccccgcuggggcugguggaccuguucgucuucuccaccagcuucuaccucaucuccaucuuccugcaccuggugaagaucccgacgcaccgccacaucgugggcaagcccugccccaagccccaccggcucaaccacauggggaucugcagcugcggccuguacaagcacccggggguccccgugaaguggaagcgcugaggacuaguaauaaggaaacuguaugaaugucugugggcaggaagugaagagauccuucuguaaagguuuuuggaauuaugucugcugaauaauaaacuuuuuugaaauaauaaaucugguagaaaaaugagaucucaaaggcucuuuucagagccaccaaaaaaaaaaaaaaaaaaaaaaaaaaaaaaaaaaaaaaaaaaaaaaaaaaaaaaaaaaaaaaaaaaaaaaaaaaaaaaaaaaaaaaaaaaaaaaaaaaaaa

SEQ ID NO: 39304 - RNA, 1809 nt, Artificial Sequence
  mRNA product Design b-4 (hSL-A100) comprising derived and/or modified sequence from LASV(GA391;Clade III)__CAA36645__GPCmut11 (opt1)
aggagagucccgcagucggcguccagcggcucugcuuguucgugugugugucguugcaggccuuauucaagcuuaccaugggccagaucgugaccuucuuccaggaggucccccacgugaucgaggaggugaugaacaucguccugaucgcccucagcauccuggccauccugaaggggcucuacaacguggcgaccugcggccugaucgggcuggugacguuccuccugcuguccggccgcagcugcucccucaucuacaaggggaccuacgagcugcagacccuggagcucaacauggagacccugaacaugacgaugccgcugagcugcaccaagaacaacucccaccacuacauccgggucggcaacgagaccggccucgagcugacccugacgaacaccagcauccucaaccacaaguucugcaaccuguccgacgcccacaagcgcaaccuguacgaccacagccucauguccaucaucagcaccuuccaccuguccauccccaacuucaaccaguacgaggccaugagcugcgacuucaacgggggcaagaucaccgugcaguacaaccugucccacagcuucgccguggacgccgcggggcacugcggcacgcucgccaacgggguccugcagaccuucaugcggauggccuggggcggcuccuacaucgcccuggacagcgggcgcggcaacugggacugcaucaugaccuccuaccaguaccucaucauccagaacaccacgugggacgaccacugccaguucagccggcccucccccaucggguaccugggccugcucagccagcgcacccgggacaucuacaucagccgccggcugcugggcaccuucaccuggacgcucuccgacagcgaggggaacgagaccccgggcggguacugccugacccgcuggaugcugaucgaggcggagcucaagugcuucggcaacaccgccguggccaagugcaacgagaagcacgacgaggaguucugcgacaugcugcggcuguucgacuucaacaagcaggccauccgccggcucaagacggaggcccagauguccauccagcugaucaacaaggcggugaacgcccugaucaacgaccagcucaucaugaagaaccaccuccgcgacaucauggggauccccuacugcaacuacagccgguacugcuaccugaaccacaccuccaccggcaagaccagccugccccgcugcugccugaucuccaacggcagcuaccugaacgagacgaaguucuccgacgacaucgagcagcaggccgacaacaugaucaccgagaugcugcagaaggaguacaucgaccggcaggggaagacgccccucggccuggucgaccuguucguguucagcaccuccuucuaccucaucagcaucuuccugcaccuggugaagaucccgacccaccgccacaucgucgggaagcccugccccaagccccaccggcucaaccacaugggcaucugcuccugcgggcuguacaagcagccgggcgugcccgugcgcuggaagcggugaggacuaguaauaaggaaacuguaugaaugucugugggcaggaagugaagagauccuucuguaaagguuuuuggaauuaugucugcugaauaauaaacuuuuuugaaauaauaaaucugguagaaaaaugagaucucaaaggcucuuuucagagccaccaaaaaaaaaaaaaaaaaaaaaaaaaaaaaaaaaaaaaaaaaaaaaaaaaaaaaaaaaaaaaaaaaaaaaaaaaaaaaaaaaaaaaaaaaaaaaaaaaaaaa

SEQ ID NO: 39305 - RNA, 1812 nt, Artificial Sequence
  mRNA product Design b-4 (hSL-A100) comprising derived and/or modified sequence from LASV(AV;Clade V)__CCA30314__GPCmut11 (opt1)
aggagagucccgcagucggcguccagcggcucugcuuguucgugugugugucguugcaggccuuauucaagcuuaccaugggccagaucgugaccuucuuccaggaggucccccacgugaucgaggaggugaugaacaucguccugaucgcccucagcauccuggccgugcugaaggggcucuacaacaucgcgaccugcggccugaucgggcugaucacguuccuccugcugugcggccgcuccugcagcuccaaccucuacaaggggguguacgagcugcagagccuggaccucaacauggagacccugaacaugaccaugccgcuguccugcaccaagaacaacagccaccacuacauccgggucggcaacgacacgggccucgagcugacccugaccaacaccuccauccucaaccacaaguucugcaaccugagcgacgcccacaagaaggaccuguacgaccacgcccucauguccaucaucagcacguuccaccuguccauccccaacuucaaccaguacgaggccaugagcugcgacuucaacgggggcaagaucuccgugcaguacaaccugagccacuccuacgccaucgacgcggccaaccacugcgggaccguggccaacggcauccuccagaccuucaugcgcauggccuggggcgggagcuacaucgcgcuggacuccggccgggggaacugggacugcaucaugaccagcuaccaguaccugaucauccagaacacgaccugggagaaccacugccaguucucccgccccagccccaucggcuaccucgggcugcugagccagcggacccgcgacaucuacaucucccggcgccuccugggcaccuucacguggacccugagcgacuccgagggcaacgccacccccgggggcuacugccucacccgguggaugcugaucgaggccgagcugaagugcuucgggaacacggccgucgccaagugcaacgagaagcacgacgaggaguucugcgacaugcuccgccuguucgacuucaacaagcaggcgaucagccggcugaaguccgaggcccagaugagcauccagcucaucaacaaggccgugaacgcccugaucaacgaccagcugaucaugaagaaccaccuccgcgacaucaugggcauccccuacugcaacuacuccaaguacugcuaccugaaccacaccaucaccgggaagaccagccugcccaagugcugccucguguccaacggcagcuaccugaacgagacgcacuucuccgacgacaucgagcagcaggccgacaacaugaucaccgagaugcugcagaaggaguacauggagcggcagggcaagaccccgcuggggcucgucgaccuguucguguucagcaccuccuucuaccugaucagcaucuuccuccgccuggugaagaucccgacgcaccggcacaucgucggcaagcccugccccaagccccaccgccugaaccacauggggaucugcuccugcggccucuacaagcagccgggggugcccgugcgguggaagcgcugaggacuaguaauaaggaaacuguaugaaugucugugggcaggaagugaagagauccuucuguaaagguuuuuggaauuaugucugcugaauaauaaacuuuuuugaaauaauaaaucugguagaaaaaugagaucucaaaggcucuuuucagagccaccaaaaaaaaaaaaaaaaaaaaaaaaaaaaaaaaaaaaaaaaaaaaaaaaaaaaaaaaaaaaaaaaaaaaaaaaaaaaaaaaaaaaaaaaaaaaaaaaaaaaa

SEQ ID NO: 39306 - RNA, 1809 nt, Artificial Sequence
  mRNA product Design b-4 (hSL-A100) comprising derived and/or modified sequence from LASV(Togo/2016/7082;Clade VI)__AMR44577__GPCmut11 (opt1)
aggagagucccgcagucggcguccagcggcucugcuuguucgugugugugucguugcaggccuuauucaagcuuaccaugggccagaucaucaccuucuuccaggaggugccccacgucaucgaggaggugaugaacaucgugcugaucgcccucagccugcuggccauccucaagggggucuacaacguggcgaccugcggcaucaucgggcuggugacguuccuguuccucugcggccgcuccugcagccugaucuacaagggguccuacgagcugcagacccucgagcugaacauggagacccugaacaugaccaugccgcucagcugcacgaagaacuccagccaccacuacauccgggucggcaacgagaccggccuggagcugacccucaccaacacguccaucaucaaccacaaguucugcaaccugagcgacgcccacaagcgcaaccuguacgaccacgcccucauguccauccugagcaccuuccaccuguccauccccaacuucaaccaguacgaggccaugagcugcgacuucaacgggggcaagaucuccgugcaguacaaccucagccacgccuacgcgguggacgccgccgagcacugcgggaccgucgccaacggcgugcugcagaccuucaugcggauggcguggggcggguccuacaucgcccuggacagcggccgcgggaacugggacugcaucaugacguccuaccaguaccucaucauccagaacaccaccugggaggaccacugccaguucagccggcccucccccaucggcuaccuggggcugcucagccagcgcacccgggacaucuacaucagccgccggcugcugggcacguucaccuggacccucuccgacagcgagggcaacgagacccccgggggcuacugccugacgcgcuggaugcugaucgaggccgagcucaagugcuucgggaacaccgccguggccaagugcaacgagaagcacgacgaggaguucugcgacaugcugcggcuguucgacuucaacaagcaggcgauccagcgccucaaguccgaggcccagaugagcauccagcugaucaacaaggccgucaacgcccugaucaacgaccagcucaucaugaagaaccaccuccgggacaugaugggcauccccuacugcaacuacuccaaguacugcuaccugaaccacaccagcuccgggcgcaccagccugcccaagugcugccugguguccaacggcagcuaccugaacgagacgcacuucuccgacgacaucgagcagcaggccgacaacaugaucaccgagaugcuccagaaggaguacaucgaccggcagggcaagaccccgcuggggcugguggaccuguucgucuucagcaccuccuucuaccucaucagcaucuuccugcaccugaucaagaucccgacgcaccgccacaucgugggcaagcccugccccaagccccaccggcucaaccacauggggaucugcuccugcggccuguacaagcagccgggggugcccacccgcuggaagcggugaggacuaguaauaaggaaacuguaugaaugucugugggcaggaagugaagagauccuucuguaaagguuuuuggaauuaugucugcugaauaauaaacuuuuuugaaauaauaaaucugguagaaaaaugagaucucaaaggcucuuuucagagccaccaaaaaaaaaaaaaaaaaaaaaaaaaaaaaaaaaaaaaaaaaaaaaaaaaaaaaaaaaaaaaaaaaaaaaaaaaaaaaaaaaaaaaaaaaaaaaaaaaaaaa

SEQ ID NO: 39307 - RNA, 1809 nt, Artificial Sequence
  mRNA product Design b-4 (hSL-A100) comprising derived and/or modified sequence from LASV(KAK-428;Clade n.d. (VII))__ANH09740__GPCmut11 (opt1)
aggagagucccgcagucggcguccagcggcucugcuuguucgugugugugucguugcaggccuuauucaagcuuaccaugggccagaucgugaccuucuuccaggaggucccccacgugaucgaggaggugaugaacaucguccugaucgcccucagccugcuggccauccucaaggggcuguacaacuucgcgaccugcggcgugaucgggcugaucacguuccuccugcugugcggccgcuccugcagcgccaccuacaaggggcaguacgagcuccagacccuggagcugaacauggagucccucaacaugaccaugccgcugagcugcacgaagaacaacucccaccacuacauccgggccggcaacaacaccggccuggagcucacccugaccaacacgagcaucaucucccacaaguucugcaaccugagcgacgcccacaagaagaaccucuacgaccacacccugauguccaucaucaccaccuuccaccugagcauccccaacuucaaccaguacgaggccauguccugcgacuucaacgggggcaagaucagcauccaguacaaccucucccacagcuacgcgggggacgccgcccagcacugcggcacgguggccaacgggguccugcagaccuucaugcgcauggcguggggcggcuccuaccuggcccucgacagcgggcggcgcggcugggacugcaucaucuccagcuaccaguaccugaucauccagaacaccaccugggacgaccacugccaguucucccggcccagccccaucggguaccugggcuucgugagccagaagacgcgcgacaucuacaucucccggcgccuccugggcaccuucaccuggacccugagcgacuccgaggggcacgacaugccgggcggguacugccucacgcgguggaugcugaucgaggccgaccugaagugcuucggcaacaccgccguggccaagugcaacgagaagcacgacgaggaguucugcgacauguggcgccucuucgacuucaacaagcaggcgauccagcggcugaaggccgaggcccagaugaacauccagcugaucaacaaggccgucaacgcccucaucaacgaccagcugaugaugaagaaccaccuccgcgacaucauggggauccccuacugcaacuacagcaaguucugcuaccugaacaacaccaccacgggccggaccucccugccccgcugcugccugaucagcaacggcuccuaccucaacgagacccacuucagcgacgacaucgagcagcaggcggacaacaugaucaccgagaugcugcagaaggaguacauggaccggcaggggaagacgccccugggccucguggaccuguucguguucuccaccagcuucuaccugaucaccaucuuccugcaccucgucaagaucccgacccaccgccacaucguggggaagcccugccccaagccccaccggcugaaccacaugggcaucugcuccugcgggcuguacaagcagccgggcgugcccguccgcuggaagcggugaggacuaguaauaaggaaacuguaugaaugucugugggcaggaagugaagagauccuucuguaaagguuuuuggaauuaugucugcugaauaauaaacuuuuuugaaauaauaaaucugguagaaaaaugagaucucaaaggcucuuuucagagccaccaaaaaaaaaaaaaaaaaaaaaaaaaaaaaaaaaaaaaaaaaaaaaaaaaaaaaaaaaaaaaaaaaaaaaaaaaaaaaaaaaaaaaaaaaaaaaaaaaaaaa

SEQ ID NO: 39308 - RNA, 1809 nt, Artificial Sequence; identical to SEQ ID NO: 39302
  mRNA product Design b-4 (hSL-A100) comprising derived and/or modified sequence from LASV(Pinneo-NIG-1969;Clade I)__AIT17836__GPCmut11 (opt1)

SEQ ID NO: 39309 - RNA, 1809 nt, Artificial Sequence
  mRNA product Design b-4 (hSL-A100) comprising derived and/or modified sequence from LASV(ISTH0009-NIG-2011;Clade II)__AIT17404__GPCmut11 (opt1)
aggagagucccgcagucggcguccagcggcucugcuuguucgugugugugucguugcaggccuuauucaagcuuaccaugggccagaucaucaccuucuuccaggaggugccccacgucaucgaggaggugaugaacaucgugcugaucgcccucagccugcuggccauccucaaggggaucuacaacgucgcgaccugcggccuguucgggcugguguccuuccuccugcugugcggccgcagcugcuccacgaccuacaaggggguguacgagcuccagacccuggagcuggacauggccagccucaacaugaccaugccgcuguccugcacgaagaacaacagccaccacuacaucauggucggcaacgagaccggccuggagcucacccugaccaacacguccaucaucaaccacaaguucugcaaccugagcgacgcccacaagaagaaccucuacgaccacgcccugauguccaucaucagcaccuuccaccuguccauccccaacuucaaccaguacgaggccaugagcugcgacuucaacgggggcaagaucuccgugcaguacaaccucagccacgcguacgccguggacgccgccaaccacugcgggaccaucgcgaacggcguccugcagaccuucaugcggauggccuggggcggguccuacaucgcccuggacagcggcaagggguccugggacugcaucaugacgagcuaccaguaccucaucauccagaacaccaccugggaggaccacugccaguucucccgccccagccccaucggcuaccuggggcugcucagccagcggacccgcgacaucuacaucucccggcgccugcugggcacguucaccuggacccucagcgacuccgagggcaacgagacccccgggggcuacugccugacgcgguggaugcugaucgaggccgagcucaagugcuucgggaacaccgccguggcgaagugcaacgagaagcacgacgaggaguucugcgacaugcugcgccuguucgacuucaacaagcaggccauccggcgccucaagaccgaggcccagaugagcauccagcugaucaacaaggccgugaacgcccugaucaacgaccagcucaucaugaagaaccaccuccgggacaucaugggcaucccguacugcaacuacuccaaguacugcuaccugaaccacaccgucacggggaagaccagccugccccgcugcugccugguguccaacggcagcuaccugaacgagacccacuucuccgacgacaucgagcagcaggcggacaacaugaucaccgagcuccugcagaaggaguacauggaccggcagggcaagacgccccuggggcugguggaccucuucgucuucagcaccuccuucuaccugaucagcaucuuccugcaccucaucaagaucccgacccaccgccacaucaccggcaagcccugccccaagccccaccggcugaaccacauggggaucugcuccugcggccuguacaagcacccgggggugcccgugaaguggaagcgcugaggacuaguaauaaggaaacuguaugaaugucugugggcaggaagugaagagauccuucuguaaagguuuuuggaauuaugucugcugaauaauaaacuuuuuugaaauaauaaaucugguagaaaaaugagaucucaaaggcucuuuucagagccaccaaaaaaaaaaaaaaaaaaaaaaaaaaaaaaaaaaaaaaaaaaaaaaaaaaaaaaaaaaaaaaaaaaaaaaaaaaaaaaaaaaaaaaaaaaaaaaaaaaaaa

SEQ ID NO: 39310 - RNA, 1809 nt, Artificial Sequence
  mRNA product Design b-4 (hSL-A100) comprising derived and/or modified sequence from LASV(ISTH2010-NIG-2012;Clade II)__AIT17482__GPCmut11 (opt1)
aggagagucccgcagucggcguccagcggcucugcuuguucgugugugugucguugcaggccuuauucaagcuuaccaugggccagaucaucaccuucuuccaggaggugccccacgucaucgaggaggugaugaacaucgugcugaucgcccucagccugcuggccauccucaaggggaucuacaacgucgcgaccugcggccuguucgggcugguguccuuccuccugcugugcggccgcagcugcuccacgaccuacaaggggguguacgagcuccagacccuggagcuggacauggccagccucaacaugaccaugccgcuguccugcacgaagaacaacagccaccacuacaucauggucggcaacgagaccggccuggagcucacccugaccaacacguccaucaucaaccacaaguucugcaaccugagcgacgcccacaagaagaaccucuacgaccacgcccugauguccaucaucagcaccuuccaccuguccauccccaacuucaaccaguacgaggccaugagcugcgacuucaacgggggcaagaucuccgugcaguacaaccucagccacgcguacgccguggacgccgccaaccacugcgggaccaucgcgaacggcguccugcagaccuucaugcggauggccuggggcggguccuacaucgcccuggacagcggcaagggguccugggacugcaucaugacgagcuaccaguaccucaucauccagaacaucaccugggaggaccacugccaguucucccgccccagccccaucggcuaccuggggcugcucagccagcggacccgcgacaucuacaucucccggcgccugcugggcaccuucacguggacccucagcgacuccgagggcaacgagacccccgggggcuacugccugacccgguggaugcugaucgaggccgagcucaagugcuucgggaacacggccguggcgaagugcaacgagaagcacgacgaggaguucugcgacaugcugcgccuguucgacuucaacaagcaggccauccggcgccucaagaccgaggcccagaugagcauccagcugaucaacaaggccgugaacgcccugaucaacgaccagcucaucaugaagaaccaccuccgggacaucaugggcauccccuacugcaacuacuccaaguacugcuaccugaaccacaccgucaccgggaagacgagccugccccgcugcugccugguguccaacggcagcuaccugaacgagacccacuucuccgacgacaucgagcagcaggcggacaacaugaucaccgagcuccugcagaaggaguacaucgaccggcagggcaagaccccgcuggggcugguggaccucuucgucuucagcacguccuucuaccugaucagcaucuuccugcaccucgugaagaucccgacccaccgccacguggucggcaagcccugccccaagccccaccggcugaaccacauggggaucugcuccugcggccuguacaagcacccgggggugcccgugaaguggaagcgcugaggacuaguaauaaggaaacuguaugaaugucugugggcaggaagugaagagauccuucuguaaagguuuuuggaauuaugucugcugaauaauaaacuuuuuugaaauaauaaaucugguagaaaaaugagaucucaaaggcucuuuucagagccaccaaaaaaaaaaaaaaaaaaaaaaaaaaaaaaaaaaaaaaaaaaaaaaaaaaaaaaaaaaaaaaaaaaaaaaaaaaaaaaaaaaaaaaaaaaaaaaaaaaaaa

SEQ ID NO: 39311 - RNA, 1809 nt, Artificial Sequence
  mRNA product Design b-4 (hSL-A100) comprising derived and/or modified sequence from LASV(Lassa virus/H.sapiens-wt/NGA/2015/ISTH_0543;Clade II)__AVO03639__GPCmut11 (opt1)
aggagagucccgcagucggcguccagcggcucugcuuguucgugugugugucguugcaggccuuauucaagcuuaccaugggccagaucaucaccuucuuccaggaggugccccacgucaucgaggaggugaugaacaucgugcugaucgcccucagccugcuggccauccucaaggggaucuacaacgucgcgaccugcggccuguucgggcugguguccuuccuccugcugugcggccgcagcugcuccacgaccuacaaggggguguacgagcuccagacccuggagcuggacauggccaaccucaacaugaccaugccgcugagcugcacgaagaacaacucccaccacuacaucauggucggcaacgagaccggccuggagcucacccugaccaacacgagcaucaucaaccacaaguucugcaaccuguccgacgcccacaagaagaaccucuacgaccacgcccugaugagcaucaucuccaccuuccaccugagcauccccaacuucaaccaguacgaggccauguccugcgacuucaacgggggcaagaucagcgugcaguacaaccucucccacaccuacgcgguggacgccgccaaccacugcgggaccaucgccaacggcguccugcagacguucaugcggauggcguggggcgggagcuacaucgcccuggacuccggcaaggggagcugggacugcaucaugaccuccuaccaguaccucgugauccagaacaccaccugggaggaccacugccaguucagccgccccucccccaucggcuaccuggggcugcucagccagcggacgcgcgacaucuacaucagccggcgccugcugggcaccuucaccuggacccucuccgacagcgagggcaacgagacgcccgggggcuacugccugacccgguggaugcugaucgaggccgagcucaagugcuucgggaacaccgccguggccaagugcaacgagaagcacgacgaggaguucugcgacaugcugcgccuguucgacuucaacaagcaggcgauccggcgccucaagaccgaggcccagauguccauccagcugaucaacaaggccgucaacgcccugaucaacgaccagcucaucaugaagaaccaccuccgggacaucaugggcauccccuacugcaacuacagcaaguacugcuaccugaaccacacggugaccgggaagaccucccugccccgcugcugccuggugagcaacggcuccuaccugaacgagacccacuucagcgacgacaucgagcagcaggccgacaacaugaucacggagcuccugcagaaggaguacaucgaccggcagggcaagaccccgcuggggcuggucgaccucuucguguucuccaccagcuucuaccugaucuccaucuuccugcaccucgugaagaucccgacccaccgccacaucacgggcaagcccugccccaagccccaccggcugaaccacauggggaucugcagcugcggccuguacaagcacccggggguccccgugaaguggaagcgcugaggacuaguaauaaggaaacuguaugaaugucugugggcaggaagugaagagauccuucuguaaagguuuuuggaauuaugucugcugaauaauaaacuuuuuugaaauaauaaaucugguagaaaaaugagaucucaaaggcucuuuucagagccaccaaaaaaaaaaaaaaaaaaaaaaaaaaaaaaaaaaaaaaaaaaaaaaaaaaaaaaaaaaaaaaaaaaaaaaaaaaaaaaaaaaaaaaaaaaaaaaaaaaaaa

SEQ ID NO: 39312 - RNA, 1809 nt, Artificial Sequence
  mRNA product Design b-4 (hSL-A100) comprising derived and/or modified sequence from LASV(Lassa virus/H.sapiens-wt/NGA/2016/ISTH_0009;Clade II)__AVO03571__GPCmut11 (opt1)
aggagagucccgcagucggcguccagcggcucugcuuguucgugugugugucguugcaggccuuauucaagcuuaccaugggccagaucaucaccuucuuccaggaggugccccacgucaucgaggaggugaugaacaucgugcugaucgcccucagccugcuggccauccucaaggggaucuacaacgucgcgaccugcggccugcuggggcucguguccuuccugcugcucugcggccgcagcugcuccacgaccuacaaggggguguacgagcugcagacccuggagcucgacauggccagccugaacaugaccaugccgcuguccugcacgaagaacaacagccaccacuacaucauggucggcaacgagaccggccucgagcugacccugaccaacacguccaucaucaaccacaaguucugcaaccucagcgacgcccacaagaagaaccuguacgaccacgcccugauguccaucaucagcaccuuccaccucuccauccccaacuucaaccaguacgaggccaugagcugcgacuucaacgggggccggaucuccgugcaguacaaccugagccacuccuacgcgguggacgccgccaaccacugcgggaccaucgccaacggcguccugcagaccuucaugcgcauggcguggggcgggagcuacaucgcccucgacuccggcaaggggagcugggacugcaucaugacguccuaccaguaccugaucauccagaacaccaccugggaggaccacugccaguucagccggcccagccccaucggcuaccuggggcuccugucccagcgcacccgggacaucuacaucagccgccggcugcucggcacguucaccuggacccuguccgacagcgagggcaacgagacccccgggggcuacugccugacgcgcuggaugcucaucgaggccgagcugaagugcuucgggaacaccgccguggccaagugcaacgagaagcacgacgaggaguucugcgacaugcugcggcuguucgacuucaacaagcaggcgauccgccggcugaagaccgaggcccagauguccauccagcugaucaacaaggccgugaacgcccucaucaacgaccagcugaucaugaagaaccaccuccgcgacaucaugggcaucccguacugcaacuacagcaaguacugcuaccucaaccacaccgucacggggaagaccucccugccccggugcugccuggugagcaacggcuccuaccucaacgagacccacuucagcgacgacaucgagcagcaggccgacaacaugaucaccgagcugcugcagaaggaguacaucgaccgccagggcaagacgccccuggggcucguggaccuguucgucuucuccaccagcuucuaccugaucuccaucuuccuccaccuggugaagaucccgacccaccggcacaucaccggcaagcccugccccaagccccaccgccugaaccacauggggaucugcagcugcggccucuacaaccacccgggggugcccgucaaguggaagcggugaggacuaguaauaaggaaacuguaugaaugucugugggcaggaagugaagagauccuucuguaaagguuuuuggaauuaugucugcugaauaauaaacuuuuuugaaauaauaaaucugguagaaaaaugagaucucaaaggcucuuuucagagccaccaaaaaaaaaaaaaaaaaaaaaaaaaaaaaaaaaaaaaaaaaaaaaaaaaaaaaaaaaaaaaaaaaaaaaaaaaaaaaaaaaaaaaaaaaaaaaaaaaaaaa

SEQ ID NO: 39313 - RNA, 1809 nt, Artificial Sequence
  mRNA product Design b-4 (hSL-A100) comprising derived and/or modified sequence from LASV(Lassa virus/H.sapiens-wt/NGA/2016/ISTH_0017;Clade II)__AVO03567__GPCmut11 (opt1)
aggagagucccgcagucggcguccagcggcucugcuuguucgugugugugucguugcaggccuuauucaagcuuaccaugggccagaucaucaccuucuuccaggaggugccccacgucaucgaggaggugaugaacaucgugcugaucgcccucagccugcuggccauccucaaggggaucuacaacgucgcgaccugcggccuguucgggcugguguccuuccuccugcugugcggccgcagcugcuccacgaccuacaaggggguguacgagcuccagacccuggagcuggacauggccagccucaacaugaccaugccgcuguccugcacgaagaacaacagccaccacuacaucauggucggcaacgagaccggccuggagcucacccugaccaacacguccaucaucaaccacaaguucugcaaccugagcgacgcccacaagaagaaccucuacgaccacgcccugauguccaucaucagcaccuuccaccuguccauccccaacuucaaccaguacgaggccaugagcugcgacuucaacgggggcaagaucuccgugcaguacaaccucagccacaccuacgcgaucgacgccgccaaccacugcgggaccaucgccaacggcgugcugcagacguucaugcggauggcguggggcggguccuacaucgcccuggacagcggcaagggguccugggacugcaucaugaccagcuaccaguaccucaucauccagaacaccaccugggaggaccacugccaguucucccgccccagccccaucggcuaccuggggcugcucagccagcggacgcgcgacaucuacaucucccggcgccugcugggcaccuucaccuggacccucagcgacuccgagggcaacgagacgcccgggggcuacugccugacccgguggaugcugaucgaggccgagcucaagugcuucgggaacaccgccgucgccaagugcaacgagaagcacgacgaggaguucugcgacaugcugcgccuguucgacuucaacaagcaggcgauccggcgccucaagaccgaggcccagaugagcauccagcugaucaacaaggccgugaacgcccugaucaacgaccagcucaucaugaagaaccaccuccgggacaucaugggcauccccuacugcaacuacuccaaguacugcuaccugaaccacacggugaccgggaagaccagccugccccgcugcugccuggucuccaacggcagcuaccugaacgagacccacuucuccgacgacaucgagcagcaggccgacaacaugaucacggagcuccugcagaaggaguacauggaccggcagggcaagaccccgcuggggcugguggaccucuucguguucagcaccuccuucuaccugaucagcaucuuccugcaccucguccgcaucccgacccaccggcacgugaucggcaagcccugccccaagccccaccgccugaaccacauggggaucugcuccugcggccuguacaagcacccgggggugcccgucaaguggaagcggugaggacuaguaauaaggaaacuguaugaaugucugugggcaggaagugaagagauccuucuguaaagguuuuuggaauuaugucugcugaauaauaaacuuuuuugaaauaauaaaucugguagaaaaaugagaucucaaaggcucuuuucagagccaccaaaaaaaaaaaaaaaaaaaaaaaaaaaaaaaaaaaaaaaaaaaaaaaaaaaaaaaaaaaaaaaaaaaaaaaaaaaaaaaaaaaaaaaaaaaaaaaaaaaaa

SEQ ID NO: 39314 - RNA, 1809 nt, Artificial Sequence
  mRNA product Design b-4 (hSL-A100) comprising derived and/or modified sequence from LASV(Lassa virus/H.sapiens-wt/NGA/2018/ISTH_0959;Clade II)__AVV65099__GPCmut11 (opt1)
aggagagucccgcagucggcguccagcggcucugcuuguucgugugugugucguugcaggccuuauucaagcuuaccaugggccagaucaucaccuucuuccaggaggugccccacgucaucgaggaggugaugaacaucgugcugaucgcccucagccugcuggccauccucaaggggaucuacaacgucgugaccugcggccuguucgggcugguguccuuccuccugcugugcggccgcagcugcuccacgaccuacaagggggucuacgagcuccagacccuggagcuggacauggcgagccucaacaugaccaugccgcuguccugcacgaagaacaacagccaccacuacaucauggugggcaacgagaccggccuggagcucacccugaccaacacguccaucaucaaccacaaguucugcaaccugagcgacgcccacaagaagaaccucuacgaccacgcccugauguccaucaucagcaccuuccaccuguccauccccaacuucaaccaguacgaggccaugagcugcgacuucaacgggggcaagaucuccgugcaguacaaccucagccacgccuacgcgaucgacgccgccaaccacugcgggaccaucgccaacggcguccugcagaccuucaugcggauggcguggggcggguccuacaucgcccuggacagcggcaagggguccugggacugcaucaugacgagcuaccaguaccucaucauccagaacaccaccugggaggaccacugccaguucucccgccccagccccaucggcuaccuggggcugcucagccagcggacccgcgacaucuacaucucccggcgccugcugggcacguucaccuggacccucagcgacuccgagggcaacgagacccccgggggcuacugccugacgcgguggaugcugaucgaggccgagcucaagugcuucgggaacaccgccguggccaagugcaacgagaagcacgacgaggaguucugcgacaugcugcgccuguucgacuucaacaagcaggcgauccggcgccucaagaccgaggcccagaugagcauccagcugaucaacaaggccgugaacgcccugaucaacgaccagcucaucaugaagaaccaccuccgggacaucaugggcaucccguacugcaacuacuccaaguacugcuaccugaaccacaccgucacggggaagaccagccugccccgcugcugccugguguccaacggcagcuaccugaacgagacccacuucuccgacgacaucgagcagcaggccgacaacaugaucaccgagcuccugcagaaggaguacaucgaccggcagggcaagacgccccuggggcugguggaccucuucgucuucagcaccuccuucuaccugaucagcaucuuccugcaccucgugaagaucccgacccaccgccacgugaucggcaagcccugccccaagccccaccggcugaaccacauggggaucugcuccugcggccuguacaagcacccggggguccccgugaaguggaagcgcugaggacuaguaauaaggaaacuguaugaaugucugugggcaggaagugaagagauccuucuguaaagguuuuuggaauuaugucugcugaauaauaaacuuuuuugaaauaauaaaucugguagaaaaaugagaucucaaaggcucuuuucagagccaccaaaaaaaaaaaaaaaaaaaaaaaaaaaaaaaaaaaaaaaaaaaaaaaaaaaaaaaaaaaaaaaaaaaaaaaaaaaaaaaaaaaaaaaaaaaaaaaaaaaaa

SEQ ID NO: 39315 - RNA, 1809 nt, Artificial Sequence
  mRNA product Design b-4 (hSL-A100) comprising derived and/or modified sequence from LASV(LASV003-NIG-2008;Clade II)__AIT17580__GPCmut11 (opt1)
aggagagucccgcagucggcguccagcggcucugcuuguucgugugugugucguugcaggccuuauucaagcuuaccaugggccagaucaucaccuucuuccaggaggugccccacgucaucgaggaggugaugaacaucgugcugaucgcccucagccugcuggccauccucaaggggaucuacaacgucgcgaccugcggccuguucgggcugguguccuuccuccugcugugcggccgcagcugcuccacgaccuacaaggggguguacgagcuccagacccuggagcuggacauggccagccucaacaugaccaugccgcuguccugcacgaagaacaacagccaccacuacaucauggucggcaacgagaccggccuggagcucacccugaccaacacguccaucaucaaccacaaguucugcaaccugagcgacgcccacaagaagaaccucuacgaccacgcccugauguccaucaucagcaccuuccaccuguccauccccaacuucaaccaguacgaggccaugagcugcgacuucaacgggggcaagaucuccgugcaguacaaccucagccacaccuacgcgguggacgccgccaaccacugcgggaccaucgccaacggcguccugcagacguucaugcggauggcguggggcggguccuacaucgcccuggacagcggcaagggguccugggacugcaucaugaccagcuaccaguaccucaucauccagaacaccaccugggaggaccacugccaguucucccgccccagccccaucggcuaccuggggcugcucagccagcggacgcgcgacaucuacaucucccggcgccugcugggcaccuucaccuggacccucagcgacuccgagagcaacgagacgccgggcggguacugccugacccgguggaugcugaucgaggccgagcucaagugcuucggcaacaccgccguggccaagugcaacgagaagcacgacgaggaguucugcgacaugcugcgccuguucgacuucaacaagcaggcgauccggcgccucaaggccgaggcccagauguccauccagcugaucaacaaggccgugaacgcccugaucaacgaccagcucaucaugaagaaccaccuccgggacaucauggggauccccuacugcaacuacagcaaguacugcuaccugaaccacaccgucacgggccgcaccucccugccccggugcugccuggugagcaacggguccuaccugaacgagacccacuucagcgacgacaucgagcagcaggcggacaacaugaucaccgagcuccugcagaaggaguacauggaccgccagggcaagacgccccugggccugguggaccucuucgucuucuccaccagcuucuaccugaucuccaucuuccugcaccucgugaagaucccgacccaccggcacgugaucgggaagcccugccccaagccccaccgccugaaccacaugggcaucugcagcugcgggcuguacaagcacccgggcguccccgugaaguggaagcggugaggacuaguaauaaggaaacuguaugaaugucugugggcaggaagugaagagauccuucuguaaagguuuuuggaauuaugucugcugaauaauaaacuuuuuugaaauaauaaaucugguagaaaaaugagaucucaaaggcucuuuucagagccaccaaaaaaaaaaaaaaaaaaaaaaaaaaaaaaaaaaaaaaaaaaaaaaaaaaaaaaaaaaaaaaaaaaaaaaaaaaaaaaaaaaaaaaaaaaaaaaaaaaaaa

SEQ ID NO: 39316 - RNA, 1809 nt, Artificial Sequence
  mRNA product Design b-4 (hSL-A100) comprising derived and/or modified sequence from LASV(LASV035-NIG-2009;Clade II)__AIT17588__GPCmut11 (opt1)
aggagagucccgcagucggcguccagcggcucugcuuguucgugugugugucguugcaggccuuauucaagcuuaccaugggccagaucaucaccuucuuccaggaggugccccacgucaucgaggaggugaugaacaucgugcugaucgcccucagccugcuggccauccucaaggggaucuacaacgucgcgaccugcggccuguucgggcugguguccuuccuccugcugugcggccgcagcugcuccacgaccuacaaggggguguacgagcuccagacccuggagcuggacauggccagccucaacaugaccaugccgcuguccugcacgaagaacaacagccaccacuacaucauggucggcaacgagaccggccuggagcucacccugaccaacacguccaucaucaaccacaaguucugcaaccugagcgacgcccacaagaagaaccucuacgaccacgcccugauguccaucaucagcaccuuccaccuguccauccccaacuucaaccaguacgaggccaugagcugcgacuucaacgggggcaagaucuccgugcaguacaaccucagccacgcguacgccguggacgccgccaaccacugcgggaccaucgcgaacggcguccugcagaccuucaugcggauggccuggggcggguccuacaucgcccuggacagcggcaagggguccugggacugcaucaugacgagcuaccaguaccucaucauccagaacaccaccugggaggaccacugccaguucucccgccccagccccaucggcuaccuggggcugcucagccagcggacccgcgacaucuacaucucccggcgccugcugggcacguucaccuggacccucagcgacuccgagggcaacgagacccccgggggcuacugccugacgcgguggaugcugaucgaggccgagcucaagugcuucgggaacaccgccguggcgaagugcaacgagaagcacgacgaggaguucugcgacaugcugcgccuguucgacuucaacaagcaggccauccggcgccucaaggccgaggcccagaugagcauccagcugaucaacaaggccgugaacgcgcugaucaacgaccagcucaucaugaagaaccaccuccgggacaucaugggcauccccuacugcaacuacuccaaguacugcuaccugaaccacaccgucaccgggaagacgagccugccccgcugcugccugguguccaacggcagcuaccugaacgagacccacuucuccgacgacaucgagcagcaggccgacaacaugaucaccgagcuccugcagaaggaguacaucgaccggcagggcaagaccccgcuggggcugguggaccucuucgucuucagcacguccuucuaccugaucagcaucuuccugcaccucgugaagaucccgacccaccgccacgugaucggcaagcccugccccaagccccaccggcugaaccacauggggaucugcuccugcggccuguacaagcacccggggguccccgugaaguggaagcgcugaggacuaguaauaaggaaacuguaugaaugucugugggcaggaagugaagagauccuucuguaaagguuuuuggaauuaugucugcugaauaauaaacuuuuuugaaauaauaaaucugguagaaaaaugagaucucaaaggcucuuuucagagccaccaaaaaaaaaaaaaaaaaaaaaaaaaaaaaaaaaaaaaaaaaaaaaaaaaaaaaaaaaaaaaaaaaaaaaaaaaaaaaaaaaaaaaaaaaaaaaaaaaaaaa

SEQ ID NO: 39317 - RNA, 1809 nt, Artificial Sequence
  mRNA product Design b-4 (hSL-A100) comprising derived and/or modified sequence from LASV(LASV1000-NIG-2009;Clade II)__AIT17782__GPCmut11 (opt1)
aggagagucccgcagucggcguccagcggcucugcuuguucgugugugugucguugcaggccuuauucaagcuuaccaugggccagaucaucaccuucuuccaggaggugccccacgucaucgaggaggugaugaacaucgugcugaucgcccucagccugcuggccauccucaaggggaucuacaacgucgcgaccugcggccuguucgggcugguguccuuccuccugcugugcggccgcagcugcuccacgaccuacaaggggguguacgagcuccagacccuggagcuggacauggccagccucaacaugaccaugccgcuguccugcacgaagaacaacagccaccacuacaucauggucggcaacgagaccggccuggagcucacccugaccaacacguccaucaucaaccacaaguucugcaaccugagcgacgcccacaagaagaaccucuacgaccacgcccugauguccaucaucagcaccuuccaccuguccauccccaacuucaaccaguacgaggccaugagcugcgacuucaacgggggcaagaucuccgugcaguacaaccucagccacaccuacgcgguggacgccgccaaccacugcgggaccaucgccaacggcguccugcagacguucaugcggauggcguggggcggguccuacaucgcccuggacagcggcaagggguccugggacugcaucaugaccagcuaccaguaccucaucauccagaacaccaccugggaggaccacugccaguucucccgccccagccccaucggcuaccuggggcugcucagccagcggacgcgcgacaucuacaucucccggcgccugcugggcaccuucaccuggacccucagcgacuccgagggcaacgagacgcccgggggcuacugccugacccgguggaugcugaucgaggccgagcucaagugcuucgggaacaccgccguggccaagugcaacgagaagcacgacgaggaguucugcgacaugcugcgccuguucgacuucaacaagcaggcgaucaagcggcucaagaccgaggcccagaugagcauccagcugaucaacaaggccgugaacgcccugaucaacgaccagcucaucaugaagaaccaccuccgcgacaucaugggcauccccuacugcaacuacuccaaguacugcuaccugaaccacacggucaccgggaagaccagccugccccggugcugccugguguccaacggcagcuaccugaacgagacccacuucuccgacgacaucgagcagcaggccgacaacaugaucacggagcuccugcagaaggaguacaucgaccgccagggcaagaccccgcuggggcugguggaccucuucgucuucagcaccuccuucuaccugaucagcaucuuccugcaccucgugaagaucccgacccaccggcacguggucggcaagcccugccccaagccccaccgccugaaccacauggggaucugcuccugcggccuguacaagcacccgggggugcccgugaaguggaagcggugaggacuaguaauaaggaaacuguaugaaugucugugggcaggaagugaagagauccuucuguaaagguuuuuggaauuaugucugcugaauaauaaacuuuuuugaaauaauaaaucugguagaaaaaugagaucucaaaggcucuuuucagagccaccaaaaaaaaaaaaaaaaaaaaaaaaaaaaaaaaaaaaaaaaaaaaaaaaaaaaaaaaaaaaaaaaaaaaaaaaaaaaaaaaaaaaaaaaaaaaaaaaaaaaa

SEQ ID NO: 39318 - RNA, 1809 nt, Artificial Sequence
  mRNA product Design b-4 (hSL-A100) comprising derived and/or modified sequence from LASV(LASV221-NIG-2010;Clade II)__AIT17624__GPCmut11 (opt1)
aggagagucccgcagucggcguccagcggcucugcuuguucgugugugugucguugcaggccuuauucaagcuuaccaugggccagaucaucaccuucuuccaggaggugccccacgucaucgaggaggugaugaacaucgugcugaucgcccucagccugcuggccauccucaaggggaucuacaacgucgcgaccugcggccuguucgggcugguguccuuccuccugcugugcggccgcagcugcuccacgaccuacaaggggguguacgagcuccagacccuggagcuggacauggccagccucaacaugaccaugccgcuguccugcacgaagaacaacagccaccacuacaucauggucggcaacgagaccggccuggagcucacccugaccaacacguccaucaucaaccacaaguucugcaaccugagcgacgcccacaagaagaaccucuacgaccacgcccugauguccaucaucagcaccuuccaccuguccauccccaacuucaaccaguacgaggccaugagcugcgacuucaacgggggcaagaucuccgugcaguacaaccucagccacaccuacgcgaucgacgccgccaaccacugcgggaccaucgccaacggcgugcugcagacguucaugcggauggcguggggcggguccuacaucgcccuggacagcggcaagggguccugggacugcaucaugaccagcuaccaguaccucaucauccagaacaccaccugggaggaccacugccaguucucccgccccagccccaucggcuaccuggggcugcucagccagcggacgcgcgacaucuacaucucccggcgccugcugggcaccuucaccuggacccucagcgacuccgagggcaacgagacgcccgggggcuacugccugacccgguggaugcugaucgaggccgagcucaagugcuucgggaacaccgccgucgccaagugcaacgagaagcacgacgaggaguucugcgacaugcugcgccuguucgacuucaacaagcaggcgauccggcgccucaagaccgaggcccagaugagcauccagcugaucaacaaggccgugaacgcccugaucaacgaccagcucaucaugaagaaccaccuccgggacaucaugggcauccccuacugcaacuacuccaaguacugcuaccugaaccacacggugaccgggaagaccagccugccccgcugcugccuggucuccaacggcagcuaccugaacgagacccacuucuccgacgacaucgagcagcaggccgacaacaugaucacggagaugcuccagaaggaguacauggaccggcagggcaagaccccgcuggggcugguggaccuguucguguucagcaccuccuucuaccucaucagcaucuuccugcaccuggucaagaucccgacccaccgccacgugaucggcaagcccugccccaagccccaccggcucaaccacauggggaucugcuccugcggccuguacaagcacccgggggugcccgucaaguggaagcgcugaggacuaguaauaaggaaacuguaugaaugucugugggcaggaagugaagagauccuucuguaaagguuuuuggaauuaugucugcugaauaauaaacuuuuuugaaauaauaaaucugguagaaaaaugagaucucaaaggcucuuuucagagccaccaaaaaaaaaaaaaaaaaaaaaaaaaaaaaaaaaaaaaaaaaaaaaaaaaaaaaaaaaaaaaaaaaaaaaaaaaaaaaaaaaaaaaaaaaaaaaaaaaaaaa

SEQ ID NO: 39319 - RNA, 1809 nt, Artificial Sequence
  mRNA product Design b-4 (hSL-A100) comprising derived and/or modified sequence from LASV(LASV237-NIG-2010;Clade II)__AIT17638__GPCmut11 (opt1)
aggagagucccgcagucggcguccagcggcucugcuuguucgugugugugucguugcaggccuuauucaagcuuaccaugggccagaucaucaccuucuuccaggaggugccccacgucaucgaggaggugaugaacaucgugcugaucgcccucagccugcuggccauccucaaggggaucuacaacgucgcgaccugcggccuguucgggcugguguccuuccuccugcugugcggccgcagcugcuccacgaccuacaaggggguguacgagcuccagacccuggagcuggacauggccagccucaacaugaccaugccgcuguccugcacgaagaacaacagccaccacuacaucauggucggcaacgagaccggccuggagcucacccugaccaacacguccaucaucaaccacaaguucugcaaccugagcgacgcccacaagaaggaccucuacgaccacgcccugauguccaucaucagcaccuuccaccuguccauccccaacuucaaccaguacgaggccaugagcugcgacuucaacgggggcaagaucuccgugcaguacaaccucagccacaccuacgcgguggacgccgccaaccacugcgggaccaucgccaacggcguccugcagacguucaugcggauggcguggggcggguccuacaucgcccuggacagcggcaagggguccugggacugcaucaugaccagcuaccaguaccucaucauccagaacaccaccugggaggaccacugccaguucucccgccccagccccaucggcuaccuggggcugcucagccagcggacgcgcgacaucuacaucucccggcgccugcugggcaccuucaccuggacccucagcgacuccgagggcaacgagacgcccgggggcuacugccugacccgguggaugcugaucgaggccgagcucaagugcuucgggaacaccgccguggccaagugcaacgagaagcacgacgaggaguucugcgacaugcugcgccuguucgacuucaacaagcaggcgauccggcgccucaagaccgaggcccagaugagcauccagcugaucaacaaggccgugaacgcccugaucaacgaccagcucaucaugaagaaccaccuccgggacaucaugggcauccccuacugcaacuacuccaaguacugcuaccugaaccacacggucaccgggaagaccagccugccccgcugcugccugguguccaacggcagcuaccugaacgagacccacuucuccgacgacaucgagcagcaggccgacaacaugaucacggagcuccugcagaaggaguacauggaccggcagggcaagaccccgcuggggcugguggaccucuucgucuucagcaccuccuucuaccugaucagcaucuuccugcaccucaucaagaucccgacccaccgccacaucacgggcaagcccugccccaagccccaccggcugaaccacauggggaucugcuccugcggccuguacaagcacccgggggugcccgugaaguggaagcgcugaggacuaguaauaaggaaacuguaugaaugucugugggcaggaagugaagagauccuucuguaaagguuuuuggaauuaugucugcugaauaauaaacuuuuuugaaauaauaaaucugguagaaaaaugagaucucaaaggcucuuuucagagccaccaaaaaaaaaaaaaaaaaaaaaaaaaaaaaaaaaaaaaaaaaaaaaaaaaaaaaaaaaaaaaaaaaaaaaaaaaaaaaaaaaaaaaaaaaaaaaaaaaaaaa

SEQ ID NO: 39320 - RNA, 1809 nt, Artificial Sequence
  mRNA product Design b-4 (hSL-A100) comprising derived and/or modified sequence from LASV(LASV253-NIG-2011;Clade II)__AIT17670__GPCmut11 (opt1)
aggagagucccgcagucggcguccagcggcucugcuuguucgugugugugucguugcaggccuuauucaagcuuaccaugggccagaucaucaccuucuuccaggaggugccccacgucaucgaggaggugaugaacaucgugcugaucgcccucagccugcuggccauccucaaggggaucuacaacgucgcgaccugcggccuguucgggcugguguccuuccuccugcugugcggccgcagcugcuccacgaccuacaaggggguguacgagcuccagacccuggagcuggacauggccagccucaacaugaccaugccgcuguccugcacgaagaacaacagccaccacuacaucauggucggcaacgagaccggccuggagcucacccugaccaacacguccaucaucaaccacaaguucugcaaccugagcgacgcccacaagaagaaccucuacgaccacgcccugauguccaucaucagcaccuuccaccuguccauccccaacuucaaccaguacgaggccaugagcugcgacuucaacgggggcaagaucuccgugcaguacaaccucagccacaccuacgcgguggacgccgccaaccacugcgggaccaucgccaacggcguccugcagacguucaugcggauggcguggggcggguccuacaucgcccuggacagcggcaagggguccugggacugcaucaugaccagcuaccaguaccucaucauccagaacaccaccugggaggaccacugccaguucucccgccccagccccaucggcuaccuggggcugcucagccagcggacgcgcgacaucuacaucucccggcgccugcugggcaccuucaccuggacccucagcgacuccgagggcaacgagacgcccgggggcuacugccugacccgguggaugcugaucgaggccgagcucaagugcuucgggaacaccgccguggccaagugcaacgagaagcacgacgaggaguucugcgacaugcugcgccuguucgacuucaacaagcaggcgauccggcgccucaaggccgaggcccagaugagcauccagcugaucaacaaggccgugaacgcccugaucaacgaccagcucaucaugaagaaccaccuccgggacaucaugggcaucccguacugcaacuacuccaaguacugcuaccugaaccacaccgucacggggcgcaccagccugccccggugcugccugguguccaacggcagcuaccugaacgagacccacuucuccgacgacaucgagcagcaggcggacaacaugaucaccgagcuccugcagaaggaguacaucgaccgccagggcaagacgccccuggggcugguggaccucuucgucuucagcaccuccuucuaccugaucagcaucuuccugcaccucgugaagaucccgacccaccggcacaucaucggcaagcccugccccaagccccaccgccugaaccacauggggaucugcuccugcggccuguacaagcacccgggggugcccgucaaguggaagcggugaggacuaguaauaaggaaacuguaugaaugucugugggcaggaagugaagagauccuucuguaaagguuuuuggaauuaugucugcugaauaauaaacuuuuuugaaauaauaaaucugguagaaaaaugagaucucaaaggcucuuuucagagccaccaaaaaaaaaaaaaaaaaaaaaaaaaaaaaaaaaaaaaaaaaaaaaaaaaaaaaaaaaaaaaaaaaaaaaaaaaaaaaaaaaaaaaaaaaaaaaaaaaaaaa

SEQ ID NO: 39321 - RNA, 1809 nt, Artificial Sequence
  mRNA product Design b-4 (hSL-A100) comprising derived and/or modified sequence from LASV(LASV254-NIG-2011;Clade II)__AIT17674__GPCmut11 (opt1)
aggagagucccgcagucggcguccagcggcucugcuuguucgugugugugucguugcaggccuuauucaagcuuaccaugggccagaucaucaccuucuuccaggaggugccccacgucaucgaggaggugaugaacaucgugcugaucgcccucagccugcuggccauccucaaggggaucuacaacgucgcgaccugcggccuguucgggcugguguccuuccuccugcugugcggccgcagcugcuccacgaccuacaaggggguguacgagcuccagacccuggagcuggacaugaccaaccucaacaugacgaugccgcugagcugcaccaagaacaacucccaccacuacaucauggucggcaacgagaccggccuggagcucacccugacgaacaccagcaucaucaaccacaaguucugcaaccuguccgacgcccacaagaagaaccucuacaaccacgcccugaugagcaucaucuccaccuuccaccugagcauccccaacuucaaccaguacgaggccauguccugcgacuucaacgggggcaagaucagcgugcaguacaaccucucccacagcuacgccguggacgcggccaaccacugcgggaccaucgccaacggcguccugcagacguucaugcggauggccuggggcggguccuacaucgcgcuggacagcggcaaggggaacugggacugcaucaugaccuccuaccaguaccucaucauccagaacaccaccugggaggaccacugccaguucagccgccccucccccaucggcuaccuggggcugcucagccagcggacgcgcgacaucuacaucagccggcgccugcugggcaccuucaccuggacccucuccgacagcgagggcaacgagacgcccgggggcuacugccugacccgguggaugcugaucgaggccgagcucaagugcuucgggaacaccgccguggccaagugcaacgagaagcacgacgaggaguucugcgacaugcugcgccuguucgacuucaacaagcaggccauccggcgccucaagaccgaggcgcaggccaacauccagcugaucaacaaggccgugaacgcccugaucaacgaccagcucaucaugaagaaccaccuccgggacaucaugggcauccccuacugcaacuacuccaaguacugcuaccugaaccacacggucaccgggaagaccagccugccccgcugcugccugguguccaacggcagcuaccugaacgagacccacuucuccgacgacaucgagcagcaggccgacaacaugaucacggagcuccugcagaaggaguacauggaccggcagggcaagaccccgcuggggcugguggaccucuucgucuucagcaccuccuucuaccugaucagcaucuuccugcaccucgugaagaucccgacccaccgccacgugaucggcaagcccugccccaagccccaccggcugaaccacauggggaucugcuccugcggccuguacaagcacccggggguccccgugaaguggaagcgcugaggacuaguaauaaggaaacuguaugaaugucugugggcaggaagugaagagauccuucuguaaagguuuuuggaauuaugucugcugaauaauaaacuuuuuugaaauaauaaaucugguagaaaaaugagaucucaaaggcucuuuucagagccaccaaaaaaaaaaaaaaaaaaaaaaaaaaaaaaaaaaaaaaaaaaaaaaaaaaaaaaaaaaaaaaaaaaaaaaaaaaaaaaaaaaaaaaaaaaaaaaaaaaaaa

SEQ ID NO: 39322 - RNA, 1809 nt, Artificial Sequence
  mRNA product Design b-4 (hSL-A100) comprising derived and/or modified sequence from LASV(Nig08-A19;Clade III)__ADU56618__GPCmut11 (opt1)
aggagagucccgcagucggcguccagcggcucugcuuguucgugugugugucguugcaggccuuauucaagcuuaccaugggccagaucgugaccuucuuccaggaggucccccacgugaucgaggaggugaugaacaucguccugaucgcccucagcauccuggccauccugaaggggcucuacaacaucgcgaccugcggccugaucgggcuggugacguuccuccugcuguccggccgcagcugcuccaugaccuacaaggggguguacgagcuccagacccuggagcugaacaugaacacccucaacaugacgaugccgcugagcugcaccaagaacaacucccaccacuacaucauggucggcaacgagaccggccuggagcucacccugacgaacaccagccugcuccaccacaaguucugcaaccuguccgacgcccacaagaagaaccuguacgaccacacccucaugagcaucaucuccaccuuccaccugagcauccccaacuucaaccaguacgaggccauguccugcgacuucaacgggggcaagaucacggugcaguacaaccugagccacuccuacgccaucgacgccgcgaaccacugcgggaccguggccaacggcguccuccagaccuucaugcggauggccuggggcgggagcuacaucgcccuggacuccggccgcgggaagugggacugcaucaugaccagcuaccaguaccugaucauccagaacacgaccugggaggaccacugccaguucucccggcccagccccaucggcuaccucgggcugcugucccagcgcacccgggacaucuacaucagccgccggcuccugggcaccuucacguggacccugagcgacuccgagggcaacgagacccccgggggcuacugccucacccgcuggaugcugaucgaggcggagcugaagugcuucgggaacacggccguggccaagugcaacgagaagcacgacgaggaguucugcgacaugcuccggcuguucgacuucaacaagcaggccauccgccggcugaaggccgaggcgcagaugagcauccagcucaucaacaaggccgugaacgcccugaucaacgaccagcugaucaugaagaaccaccuccgcgacaucaugggcauccccuacugcaacuacuccaaguacugcuaccugaaccacaccagcaccgggcggaccucccugccccgcugcugccucgucagcaacggcuccuaccugaacgagacgcacuucagcgacgacaucgagcagcaggccgacaacaugaucaccgagaugcugcagaaggaguaccuggaccggcagggcaagaccccgcucgggcugguggaccuguucguguucuccaccagcuucuaccucaucuccaucuuccugcaccuggucaagaucccgacgcaccgccacaucgugggcaagcccugccccaagccccaccggcucaaccacauggggaucugcagcugcggccuguacaagcagccgggggugcccguccgcuggaagcggugaggacuaguaauaaggaaacuguaugaaugucugugggcaggaagugaagagauccuucuguaaagguuuuuggaauuaugucugcugaauaauaaacuuuuuugaaauaauaaaucugguagaaaaaugagaucucaaaggcucuuuucagagccaccaaaaaaaaaaaaaaaaaaaaaaaaaaaaaaaaaaaaaaaaaaaaaaaaaaaaaaaaaaaaaaaaaaaaaaaaaaaaaaaaaaaaaaaaaaaaaaaaaaaaa

SEQ ID NO: 39323 - RNA, 1812 nt, Artificial Sequence
  mRNA product Design b-4 (hSL-A100) comprising derived and/or modified sequence from LASV(G1180-SLE-2010;Clade IV)__AIT17168__GPCmut11 (opt1)
aggagagucccgcagucggcguccagcggcucugcuuguucgugugugugucguugcaggccuuauucaagcuuaccaugggccagaucgugaccuucuuccaggaggucccccacgugaucgaggaggugaugaacaucguccugaucgcccucagcauccuggccgugcugaaggggcucuacaacuucgcgaccugcggccugguggggcugcucaccuuccugcugcucugcggccgcuccugcaccgccagccgguacaagggggucuacgagcugcagacccuggagcucaacauggagacccugaacaugacgaugccgcuguccugcaccaagaacaacagccaccacuacaucauggugggcaacgagaccggccucgagcugacccugacgaacaccuccaucaucaaccacaaguucugcaaccucagcgacgcccacaagaagaaccuguacgaccacgcccugauguccaucaucagcaccuuccaccucuccauccccaacuucaaccaguacgaggccaugagcugcgacuucaacgggggcaagaucuccgugcaguacaaccugagccacuccuacgcgggggacgccgccaaccacugcggcaccgucgccaacggggugcugcagacguucaugcgcauggcguggggcggcagcuacaucgcccucgacuccgggcacggcagcugggacugcaucaugaccuccuaccaguaccugaucauccagaacaccaccugggaggaccacugccaguucagccggcccucccccaucggguaccugggccuccugagccagcgcacgcgggacaucuacaucagccgccggcugcucggcaccuucaccuggacccuguccgacagcgaggggaaggacacgccgggcggguacugccugacccgcuggaugcucaucgaggccgagcugaagugcuucggcaacaccgccguggccaagugcaacgagaagcacgacgaggaguucugcgacaugcugcggcuguucgacuucaacaagcaggcgauccagcgccugaaggccgaggcccagauguccauccagcugaucaacaaggccgucaacgcccucaucaacgaccagcugaucaugaagaaccaccuccgggacaucauggggauccccuacugcaacuacagcaaguacugcuaccucaaccacaccacgaccggcaagaccucccugcccaagugcugccuggugagcaacggcuccuaccucaacgagacccacuucagcgacgacaucgagcagcaggcggacaacaugaucacggagaugcugcagaaggaguacauggagcgccaggggaagacgccccugggccugguggaccucuucgucuucuccaccagcuucuaccugaucuccaucuuccugcaccucgugaagaucccgacccaccggcacaucgugggcaagagcugccccaagccccaccgccugaaccacauggggaucugcuccugcgggcuguacaagcagcccggcgucccggugaaguggaagcggugaggacuaguaauaaggaaacuguaugaaugucugugggcaggaagugaagagauccuucuguaaagguuuuuggaauuaugucugcugaauaauaaacuuuuuugaaauaauaaaucugguagaaaaaugagaucucaaaggcucuuuucagagccaccaaaaaaaaaaaaaaaaaaaaaaaaaaaaaaaaaaaaaaaaaaaaaaaaaaaaaaaaaaaaaaaaaaaaaaaaaaaaaaaaaaaaaaaaaaaaaaaaaaaaa

SEQ ID NO: 39324 - RNA, 1812 nt, Artificial Sequence
  mRNA product Design b-4 (hSL-A100) comprising derived and/or modified sequence from LASV(G1442-SLE-2011;Clade IV)__AIT17180__GPCmut11 (opt1)
aggagagucccgcagucggcguccagcggcucugcuuguucgugugugugucguugcaggccuuauucaagcuuaccaugggccagaucgugaccuucuuccaggaggucccccacgugaucgaggaggugaugaacaucguccugaucgcccucagcauccuggccgugcugaaggggcucuacaacguggcgaccugcggccugaucgggcuggucacguuccuccugcugugcggccgcuccugcaccaccacccucuacaaggggguguacgagcugcagacgcuggagcucaacauggagacccugaacaugaccaugccgcugagcugcaccaagaacaacucccaccacuacauccgggugggcaacgagacgggccucgagcugacccugaccaacaccagcaucaucaaccacaaguucugcaaccucuccgacgcccacaagaagaaccuguacgaccacgcccugaugagcaucaucuccacguuccaccucagcauccccaacuucaaccaguacgaggccauguccugcgacuucaacgggggcaagaucagcguccaguacaaccugucccacagcuacgccggggacgcggccaaccacugcggcaccguggccaacggggugcugcagaccuucaugcgcauggccuggggcggcuccuacaucgcgcucgacagcgggcggggcaacugggacugcaucaugaccuccuaccaguaccugaucauccagaacacgaccugggacgaccacugccaguucagccgccccucccccaucggguaccugggccuccugagccagcggacccgcgacgucuacaucucccggcgccugcucggcaccuucacguggacccugagcgacagcgaggggaaggacaccccgggcggguacugccugacccgguggaugcucaucgaggccgagcugaagugcuucggcaacacggccguggccaagugcaacgagaagcacgacgaggaguucugcgacaugcugcgccucuucgacuucaacaagcaggccauccagcggcugaaggcggaggcccagauguccauccagcugaucaacaaggccgugaacgcccucaucaacgaccagcugaucaugaagaaccaccuccgcgacaucauggggauccccuacugcaacuacagcaaguacugcuaccugaacaacaccgccaccggcaagaccucccugcccaagugcugccugaucagcaacggcuccuaccucaacgagacgcacuucagcgacgacaucgagcaggaggcggacaacaugaucaccgagaugcugcagaaggaguacauggagcggcaggggaagacgccccugggccuggucgaccucuucguguucuccaccagcuucuaccugaucuccaucuuccugcaccucgugaagaucccgacccaccgccacaucgucggcaagagcugccccaagccccaccggcugaaccacauggggaucugcuccugcgggcuguacaagcagcccggcgugccggugcgcuggaagcggugaggacuaguaauaaggaaacuguaugaaugucugugggcaggaagugaagagauccuucuguaaagguuuuuggaauuaugucugcugaauaauaaacuuuuuugaaauaauaaaucugguagaaaaaugagaucucaaaggcucuuuucagagccaccaaaaaaaaaaaaaaaaaaaaaaaaaaaaaaaaaaaaaaaaaaaaaaaaaaaaaaaaaaaaaaaaaaaaaaaaaaaaaaaaaaaaaaaaaaaaaaaaaaaaa

SEQ ID NO: 39325 - RNA, 1812 nt, Artificial Sequence
  mRNA product Design b-4 (hSL-A100) comprising derived and/or modified sequence from LASV(G3010-SLE-2013;Clade IV)__AIT17344__GPCmut11 (opt1)
aggagagucccgcagucggcguccagcggcucugcuuguucgugugugugucguugcaggccuuauucaagcuuaccaugggccagaucgugaccuucuuccaggaggucccccacgugaucgaggaggugaugaacaucguccugaucgcccucagcauccuggccgugcugaaggggcucuacaacuucgcgaccugcggccugguggggcuggucacguuccuccugcugugcggccgcuccugcaccaccagccucuacaaggggguguacgagcugcagacccuggagcucaacauggagacgcugaacaugaccaugccgcuguccugcaccaagaacaacagccaccacuacaucauggugggcaacgagaccggccucgagcugacgcugaccaacaccuccaucaucaaccacaaguucugcaaccucagcgacgcccacaagaagaaccuguacaaccacgcccugauguccaucaucagcaccuuccaccucuccauccccaacuucaaccaguacgaggccaugagcugcgacuucaacgggggcaagaucuccguccaguacaaccugagccacuccuacgccggggacgcggccagccacugcggcacgguggccaacggggugcugcagaccuucaugcggauggccuggggcggcuccuacaucgcgcucgacagcggguacggcaagugggacugcaucaugaccuccuaccaguaccugaucauccagaacaccacgugggaggaccacugccaguucagccgccccucccccaucggguaccugggccuccugagccagcggacccgcgacaucuacaucagccggcgccugcucggcaccuucaccuggacgcuguccgacagcgaggggaaggacaccccgggcggguacugccugacccgguggaugcucaucgaggccgagcugaagugcuucggcaacaccgccgucgccaagugcaacgagaagcacgacgaggaguucugcgacaugcugcgccucuucgacuucaacaagcaggccauccagcggcugaagacggaggcgcagauguccauccagcugaucaacaaggccgugaacgcccucaucaacgaccagcugaucaugaagaaccaccuccgcgacaucauggggauccccuacugcaacuacagcaaguacugcuaccugaaccacaccaccaccggcaagacgucccugcccaagugcugccuggugagcaacggcuccuaccucaacgagacccacuucagcgacgacaucgagcagcaggccgacaacaugaucaccgagaugcugcagaaggaguacauggagcggcaggggaagacgccccugggccuggucgaccucuucguguucuccaccagcuucuaccugaucuccaucuuccugcaccucgugaagaucccgacccaccgccacaucgucggcaagagcugccccaagccccaccggcugaaccacauggggaucugcuccugcgggcuguacaagcagcccggcgugccggugcgcuggaagcggugaggacuaguaauaaggaaacuguaugaaugucugugggcaggaagugaagagauccuucuguaaagguuuuuggaauuaugucugcugaauaauaaacuuuuuugaaauaauaaaucugguagaaaaaugagaucucaaaggcucuuuucagagccaccaaaaaaaaaaaaaaaaaaaaaaaaaaaaaaaaaaaaaaaaaaaaaaaaaaaaaaaaaaaaaaaaaaaaaaaaaaaaaaaaaaaaaaaaaaaaaaaaaaaaa

SEQ ID NO: 39326 - RNA, 1812 nt, Artificial Sequence
  mRNA product Design b-4 (hSL-A100) comprising derived and/or modified sequence from LASV(G502-SLE-2009;Clade IV)__AIT17126__GPCmut11 (opt1)
aggagagucccgcagucggcguccagcggcucugcuuguucgugugugugucguugcaggccuuauucaagcuuaccaugggccagaucgugaccuucuuccaggaggucccccacgugaucgaggaggugaugaacaucguccugaucgcccucagcauccuggccgugcugaaggggcucuacaacuucgcgaccugcggccugguggggcugcucacguuccugcugcucugcggccgcuccugcaccaccgggcuguacaagggcgucuacgagcugcagacccucgagcugaacauggagacgcugaacaugaccaugccgcucagcugcaccaagaacaacucccaccacuacaucauggugggcaacgagaccgggcuggagcugacgcucaccaacaccagcaucaucaaccacaaguucugcaaccuguccgacgcccacaagaagaaccuguacgaccacgcccucaugagcaucaucuccaccuuccaccugagcauccccaacuucaaccaguacgaggccauguccugcgacuucaacggcgggaagaucagcgugcaguacaaccugucccacagcuacgccggcgacgcggccgaccacugcgggacggucgccaacggcgugcuccagaccuucaugcggauggccuggggcggguccuacaucgcgcuggacagcggccgcgggcggugggacugcaucaugaccuccuaccaguaccugaucauccagaacaccacgugggaggaccacugccaguucagccgccccucccccaucggcuaccucggccugcugagccagcggacccgcgacaucuacaucucccggcgccuccuggggaccuucaccuggacgcugagcgacagcgagggcaaggacacccccgggggcuacugccucacccgguggaugcugaucgaggccgagcugaagugcuucgggaacaccgccguggccaagugcaacgagaagcacgacgaggaguucugcgacaugcuccgccuguucgacuucaacaagcaggccauccagcggcugaaggcggaggcccagauguccauccagcucaucaacaaggccgucaacgcccugaucaacgaccagcuggugaugaagaaccaccuccgcgacaucaugggcauccccuacugcaacuacagccgguacugcuaccugaaccacacgaccaccggccgcaccucccugcccaagugcugccucgugagcaacggguccuaccugaacgagacgcacuucagcgacgacaucgagcagcaggccgacaacaugaucaccgagaugcugcagaaggaguacauggagcggcagggcaagaccccgcuggggcucgucgaccuguucguguucuccaccagcuucuaccugaucuccaucuuccuccaccuggugaagaucccgacgcaccgccacaucgucggcaagagcugccccaagccccaccggcugaaccacauggggaucugcuccugcggccucuacaagcagcccggcgugccggugaaguggaagcgcugaggacuaguaauaaggaaacuguaugaaugucugugggcaggaagugaagagauccuucuguaaagguuuuuggaauuaugucugcugaauaauaaacuuuuuugaaauaauaaaucugguagaaaaaugagaucucaaaggcucuuuucagagccaccaaaaaaaaaaaaaaaaaaaaaaaaaaaaaaaaaaaaaaaaaaaaaaaaaaaaaaaaaaaaaaaaaaaaaaaaaaaaaaaaaaaaaaaaaaaaaaaaaaaaa

SEQ ID NO: 39327 - RNA, 1812 nt, Artificial Sequence
  mRNA product Design b-4 (hSL-A100) comprising derived and/or modified sequence from LASV(G733-SLE-2010;Clade IV)__AIT17154__GPCmut11 (opt1)
aggagagucccgcagucggcguccagcggcucugcuuguucgugugugugucguugcaggccuuauucaagcuuaccaugggccagaucgugaccuucuuccaggaggucccccacgugaucgaggaggugaugaacaucguccugaucgcccucagcauccuggccgugcugaaggggcucuacaacuucgcgaccugcggcaucguggggcuggucuccuuccugcuccugugcggccgcagcugcacgaccucccuguacaaggggguguacgagcuccagacccuggagcugaacauggagacccucaacaugacgaugccgcugagcugcaccaagaacaacucccaccacuacaucauggugggcaacgagaccggccuggagcucacccugacgaacaccagcaucaucaaccacaaguucugcaaccuguccgacgcccacaagaagaaccucuacgaccacgcccugaugagcaucaucuccaccuuccaccugagcauccccaacuucaaccaguacgaggccauguccugcgacuucaacgggggcaagaucagcguccaguacaaccucucccacagcuacgccggggacgcggccaaccacugcggcaccaucgccaacggggugcugcagacguucaugcggauggccuggggcggcuccuacaucgcgcuggacagcgggcgcgaccggugggacugcaucaugaccuccuaccaguaccucaucauccagaacaccaccugggaggaccacugccaguucagccgccccucccccaucggcuaccuggggcugcucagccagcggacgcgcgacaucuacaucagccggcgccugcugggcaccuucaccuggacccucuccgacagcgagggcaaggacacgcccgggggcuacugccugacccgguggaugcugaucgaggccgagcucaagugcuucgggaacaccgccguggccaagugcaacgagaagcacgacgaggaguucugcgacaugcugcgccuguucgacuucaacaagcaggccauccagcggcucaaggcggaggcccagauguccauccagcugaucaacaaggccgucaacgcccugaucaacgaccagcucaucaugaagaaccaccuccgcgacaucaugggcauccccuacugcaacuacagcaaguacugcuaccugaaccacaccacgaccgggaagaccucccugcccaagugcugccuggugagcaacggcuccuaccugaacgagacccacuucagcgacgacaucgagcagcaggccgacaacaugaucacggagaugcuccagaaggaguacauggagcggcagggcaagaccccgcuggggcugguggaccuguucgucuucuccaccagcuucuaccucaucuccaucuuccugcaccuggugaagaucccgacccaccgccacguggucggcaagagcugccccaagccccaccggcucaaccacauggggaucugcuccugcggccuguacgggcagcccggcgugccggugaaguggaagcgcugaggacuaguaauaaggaaacuguaugaaugucugugggcaggaagugaagagauccuucuguaaagguuuuuggaauuaugucugcugaauaauaaacuuuuuugaaauaauaaaucugguagaaaaaugagaucucaaaggcucuuuucagagccaccaaaaaaaaaaaaaaaaaaaaaaaaaaaaaaaaaaaaaaaaaaaaaaaaaaaaaaaaaaaaaaaaaaaaaaaaaaaaaaaaaaaaaaaaaaaaaaaaaaaaa

SEQ ID NO: 39328 - RNA, 1812 nt, Artificial Sequence
  mRNA product Design b-4 (hSL-A100) comprising derived and/or modified sequence from MOPV/LASV reassortant(IGS-1;Clade IV)__AFY05576__GPCmut11 (opt1)
aggagagucccgcagucggcguccagcggcucugcuuguucgugugugugucguugcaggccuuauucaagcuuaccaugggccagaucgugaccuucuuccaggaggucccccacgugaucgaggaggugaugaacaucguccugaucgcccucagcgugcuggccgugcugaaggggcucuacaacuucgcgaccugcggccuggucgggcuggugacguuccuccugcugugcggccgcuccugcaccaccagccucuacaaggggguguacgagcugcagacccuggagcucaacauggagacgcugaacaugaccaugccgcuguccugcaccaagaacaacagccaccacuacaucauggucggcaacgagaccggccucgagcugacgcugaccaacaccuccaucaucaaccacaaguucugcaaccucagcgacgcccacaagaagaaccuguacgaccacgcccugauguccaucaucagcaccuuccaccucuccauccccaacuucaaccaguacgaggccaugagcugcgacuucaacgggggcaagaucuccgugcaguacaaccugagccacuccuacgccggggacgcggccaaccacugcggcacgguggccaacgggguccugcagaccuucaugcggauggccuggggcggcagcuacaucgcgcucgacuccgggcgcggcaacugggacugcaucaugaccagcuaccaguaccugaucauccagaacaccacgugggaggaccacugccaguucucccggcccagccccaucggguaccugggccuccugucccagcgcacccgggacaucuacaucagccgccggcugcucggcaccuucaccuggacgcugagcgacuccgagggggaggacaccccgggcggguacugccugacccgcuggaugcucaucgaggccgagcugaagugcuucggcaacaccgccguggccaagugcaacgagaagcacgacgaggaguucugcgacaugcugcggcuguucgacuucaacaagcaggccauccagcgccugaaggcggaggcccagaugagcauccagcugaucaacaaggccgugaacgcccucaucaacgaccagcugaucaugaagaaccaccuccgggacaucauggggauccccuacugcaacuacuccaaguacugcuaccucaaccacacgaccaccggccgcaccagccugcccaagugcugccuggucuccaacggcagcuaccucaacgagacgcacuucuccgacgacaucgagcagcaggccgacaacaugaucaccgagaugcugcagaaggaguacauggagcggcaggggaagacgccccugggccugguggaccucuucguguucagcaccuccuucuaccugaucagcaucuuccugcaccucgucaagaucccgacccaccgccacaucguggggaaguccugccccaagccccaccggcugaaccacaugggcaucugcagcugcgggcuguacaagcagcccggcgugccggucaaguggaagcgcugaggacuaguaauaaggaaacuguaugaaugucugugggcaggaagugaagagauccuucuguaaagguuuuuggaauuaugucugcugaauaauaaacuuuuuugaaauaauaaaucugguagaaaaaugagaucucaaaggcucuuuucagagccaccaaaaaaaaaaaaaaaaaaaaaaaaaaaaaaaaaaaaaaaaaaaaaaaaaaaaaaaaaaaaaaaaaaaaaaaaaaaaaaaaaaaaaaaaaaaaaaaaaaaaa

SEQ ID NO: 39329 - RNA, 1812 nt, Artificial Sequence
  mRNA product Design b-4 (hSL-A100) comprising derived and/or modified sequence from LASV(LM765-SLE-2012;Clade IV)__AIT17814__GPCmut11 (opt1)
aggagagucccgcagucggcguccagcggcucugcuuguucgugugugugucguugcaggccuuauucaagcuuaccaugggccagaucgugaccuucuuccaggaggucccccacgugaucgaggaggugaugaacaucguccugaucgcccucagcauccuggccgugcugaaggggcucuacaacuucgcgaccugcggccugguggggcuggucacguuccuccugcugugcggccgcuccugcaccaccagccucuacaaggggguguacgagcugcagacccuggagcucaacauggagacgcugaacaugaccaugccgcuguccugcaccaagaacaacagccaccacuacaucauggugggcaacgagaccggccucgagcugacgcugaccaacaccuccaucaucgaccacaaguucugcaaccucagcgacgcccaccggaagaaccuguacgaccacgcccugauguccaucaucagcaccuuccaccucuccauccccaacuucaaccaguacgaggccaugagcugcgacuucaacgggggcaagaucuccguccaguacaaccugagccacuccuacgccaaggacgcggccgaccacugcgggacgguggccaacggcgugcugcagaccuucaugcgcauggccuggggcgggagcuacaucgcgcucgacuccggccgggggcgcugggacugcaucaugaccagcuaccaguaccugaucauccagaacaccacgugggaggaccacugccaguucucccggcccagccccaucggcuaccuggggcuccugucccagcgcacccgggacaucuacaucagccgccggcugcucggcaccuucaccuggacgcugagcgacuccgagggcaaggacacccccgggggcuacugccugacccgcuggaugcucaucgaggccgagcugaagugcuucgggaacaccgccgucgccaagugcaacgagaagcacgacgaggaguucugcgacaugcugcggcuguucgacuucaacaagcaggccauccagcgccugaaggcggaggcccagaugagcauccagcugaucaacaaggccgugaacgcccucaucaacgaccagcugaucaugaagaaccaccuccgggacaucaugggcauccccuacugcaacuacuccaaguacugcuaccucaaccacacgaccaccgggaagaccagccugcccaagugcugccugguguccaacggcagcuaccucaacgagacgcacuucuccgacgacaucgagcagcaggccgacaacaugaucaccgagaugcugcagaaggaguacauggagcgccagggcaagaccccgcuggggcuggucgaccucuucguguucagcaccuccuucuaccugaucagcaucuuccugcaccucgugaagaucccgacgcaccggcacaucgucggcaagcccugccccaagccccaccgccugaaccacauggggaucugcuccugcggccuguacaagcagccgggggugcccgugaaguggaagcggugaggacuaguaauaaggaaacuguaugaaugucugugggcaggaagugaagagauccuucuguaaagguuuuuggaauuaugucugcugaauaauaaacuuuuuugaaauaauaaaucugguagaaaaaugagaucucaaaggcucuuuucagagccaccaaaaaaaaaaaaaaaaaaaaaaaaaaaaaaaaaaaaaaaaaaaaaaaaaaaaaaaaaaaaaaaaaaaaaaaaaaaaaaaaaaaaaaaaaaaaaaaaaaaaa

SEQ ID NO: 39330 - RNA, 1812 nt, Artificial Sequence
  mRNA product Design b-4 (hSL-A100) comprising derived and/or modified sequence from LASV(LM776-SLE-2012;Clade IV)__AIT17824__GPCmut11 (opt1)
aggagagucccgcagucggcguccagcggcucugcuuguucgugugugugucguugcaggccuuauucaagcuuaccaugggccagaucgugaccuucuuccaggaggucccccacgugaucgaggaggugaugaacaucguccugaucgcccucagcauccuggccgugcugaaggggcucuacaacuucgcgaccugcggccugguggggcuggucacguuccuccugcugugcggccgcuccugcaccaccagcguguacaaggggguguacgagcuccagacccuggagcugaacauggagacgcucaacaugaccaugccgcuguccugcaccaagaacaacagccaccacuacaucauggucggcaacgagaccggccuggagcucacgcugaccaacaccuccaucaucaaccacaaguucugcaaccugagcgacgcccacaagaagaaccucuacgaccacgcccugauguccaucaucagcaccuuccaccuguccauccccaacuucaaccaguacgaggccaugagcugcgacuucaacgggggcaagaucuccgugcaguacaaccucagccacuccuacgccggggacgcggccaaccacugcggcacgguggccaacgggguccugcagaccuucaugcggauggccuggggcggcagcuacaucgcgcuggacuccgggcacggcaagugggacugcaucaugaccagcuaccaguaccucaucauccagaacaccacgugggaggaccacugccaguucucccgccccagccccaucggguaccugggccugcucucccagcggacccgcgacaucuacaucagccggcgccugcugggcaccuucaccuggacgcucagcgacuccgaggggaaggacaccccgggcggguacugccugacccgguggaugcugaucgaggccgagcucaagugcuucggcaacaccgccguggccaagugcaacgagaagcacgacgaggaguucugcgacaugcugcgccuguucgacuucaacaagcaggccauccagcggcucaaggcggaggcccagaugagcauccagcugaucaacaaggccgugaacgcccugaucaacgaccagcucaucaugaagaaccaccuccgcgacaucauggggauccccuacugcaacuacuccaaguacugcuaccugaaccacacgaccaccggcaagaccagccugcccaagugcugccuggucuccaacggcagcuaccugaacgagacgcacuucuccgacgacaucgagcagcaggccgacaacaugaucaccgagaugcuccagaaggaguacauggagcggcaggggaagacgccccugggccugguggaccuguucguguucagcaccuccuucuaccucaucagcaucuuccugcaccuggucaagaucccgacccaccgccacaucguggggaaguccugccccaagccccaccggcucaaccacaugggcaucugcagcugcgggcuguacaagcagcccggcgugccgguccgcuggaagcggugaggacuaguaauaaggaaacuguaugaaugucugugggcaggaagugaagagauccuucuguaaagguuuuuggaauuaugucugcugaauaauaaacuuuuuugaaauaauaaaucugguagaaaaaugagaucucaaaggcucuuuucagagccaccaaaaaaaaaaaaaaaaaaaaaaaaaaaaaaaaaaaaaaaaaaaaaaaaaaaaaaaaaaaaaaaaaaaaaaaaaaaaaaaaaaaaaaaaaaaaaaaaaaaaa

SEQ ID NO: 39331 - RNA, 1812 nt, Artificial Sequence
  mRNA product Design b-4 (hSL-A100) comprising derived and/or modified sequence from LASV(Mad39;Clade IV)__ANH09722__GPCmut11 (opt1)
aggagagucccgcagucggcguccagcggcucugcuuguucgugugugugucguugcaggccuuauucaagcuuaccaugggccagaucgugaccuucuuccaggaggucccccacgugaucgaggaggugaugaacaucguccugaucgcccucagcauccuggccgugcugaaggggcucuacaacguggcgaccugcggccugaucgggcuggucacguuccuccugcugugcggccgcuccugcaccaccacccucuacaaggggguguacgagcugcaggcccuggagcucaacauggagacgcugaacaugaccaugccgcugagcugcaccaagaacaacucccaccacuacauccgggugggcaacgagaccggccucgagcugacgcugaccaacaccagccucaucaaccacaaguucugcaaccuguccgacgcccacaagaagaaccuguacgaccacgcccucaugagcaucaucuccaccuuccaccugagcauccccaacuucaaccaguacgaggccauguccugcgacuucaacgacgggaagaucagcguccaguacaaccugucccacacguacgcgggcgacaccgccaaccacugcgggaccguggccaacggcgugcuccagaccuucaugcgcauggccuggggcgggagcuacaucgcgcuggacuccggccgcgggggcugggacugcaucaugacgagcuaccaguaccugaucauccagaacaccaccugggaggaccacugccaguucucccggcccagccccaucggguaccucggccugcugucccagcggacccgcgacaucuacaucagccggcgccuccugggcacguucaccuggacccuguccgacagcgaggggaaggacaccccgggcggguacugccucacgcgguggaugcugaucgaggccgagcugaagugcuucggcaacaccgccgucgccaagugcaacgagaagcacgacgaggaguucugcgacaugcuccgccuguucgacuucaacaagcaggccauccagcggcugaaggcggaggcccagaugagcauccagcucaucaacaaggccgugaacgcccugaucaacgaccagcugaucaugaagaaccaccuccgcgacaucauggggauccccuacugcaacuacuccaaguacugcuaccugaaccacaccgugaccggcaagacgagccugcccaagugcugccucgucuccaacggcagcuaccugaacgagacccacuucuccgacgacaucgagcagcaggccgacaacaugaucaccgagaugcugcagaaggaguacauggagcggcaggggaagacgccccugggccucguggaccuguucguguucagcaccuccuucuaccugaucagcaucuuccuccaccuggucaagaucccgacccaccgccacgugguggggaagcccugccccaagccccaccggcugaaccacaugggcaucugcuccugcggguucuacaagcagccgggcguccccgugcgcuggaagcggugaggacuaguaauaaggaaacuguaugaaugucugugggcaggaagugaagagauccuucuguaaagguuuuuggaauuaugucugcugaauaauaaacuuuuuugaaauaauaaaucugguagaaaaaugagaucucaaaggcucuuuucagagccaccaaaaaaaaaaaaaaaaaaaaaaaaaaaaaaaaaaaaaaaaaaaaaaaaaaaaaaaaaaaaaaaaaaaaaaaaaaaaaaaaaaaaaaaaaaaaaaaaaaaaa

SEQ ID NO: 39332 - RNA, 1812 nt, Artificial Sequence
  mRNA product Design b-4 (hSL-A100) comprising derived and/or modified sequence from LASV(Z0947-SLE-2011;Clade IV)__AIT17840__GPCmut11 (opt1)
aggagagucccgcagucggcguccagcggcucugcuuguucgugugugugucguugcaggccuuauucaagcuuaccaugggccagaucgugaccuucuuccaggaggucccccacgugaucgaggaggugaugaacaucguccugaucgcccucagcauccuggccgugcugaaggggcucuacaacuucgcgaccugcggccugguggggcuggucacguuccuccugcugugcggccgcuccugcaccaucagccucuacaaggggguguacgagcugcagacccuggagcucaacauggagacccugaacaugacgaugccgcuguccugcaccaagaacaacagccaccacuacaucauggugggcaacgagaccggccucgagcugacccugacgaacaccuccaucaucaaccacaaguucugcaaccucagcgacgcccacaagaagaaccuguacgaccacgcccugauguccaucaucagcaccuuccaccucuccauccccaacuucaaccaguacgaggccaugagcugcgacuucaacgggggcaagaucuccguccaguacaaccugagccacuccuacgccggggacgcggccaaccacugcggcaccguggccaacggggugcugcagacguucaugcggauggccuggggcggcagcuacaucgcgcucgacuccgggcgcgaccggugggacugcaucaugaccagcuaccaguaccugaucauccagaacaccaccugggaggaccacugccaguucucccgccccagccccaucggcuaccuggggcuccugucccagcggacgcgcgacaucuacaucagccggcgccugcucggcaccuucaccuggacccugagcgacuccgagggcaaggacacgcccgggggcuacugccugacccgguggaugcucaucgaggccgagcugaagugcuucgggaacaccgccgucgccaagugcaacgagaagcacgacgaggaguucugcgacaugcugcgccucuucgacuucaacaagcaggccauccagcggcugaaggcggaggcccagaugagcauccagcugaucaacaaggccgugaacgcccucaucaacgaccagcugaucaugaagaaccaccuccgcgacaucaugggcauccccuacugcaacuacuccaaguacugcuaccugaaccacaccacgaccgggaagaccagccugcccaagugcugccugguguccaacggcagcuaccucaacgagacccacuucuccgacgacaucgagcagcaggccgacaacaugaucacggagaugcugcagaaggaguacauggagcggcagggcaagaccccgcuggggcuggucgaccucuucguguucagcaccuccuucuaccugaucagcaucuuccugcaccucgugaagaucccgacccaccgccacaucgucggcaagcccugccccaagccccaccggcugaaccacauggggaucugcuccugcggccuguacaagcagccgggggugcccgugaaguggaagcgcugaggacuaguaauaaggaaacuguaugaaugucugugggcaggaagugaagagauccuucuguaaagguuuuuggaauuaugucugcugaauaauaaacuuuuuugaaauaauaaaucugguagaaaaaugagaucucaaaggcucuuuucagagccaccaaaaaaaaaaaaaaaaaaaaaaaaaaaaaaaaaaaaaaaaaaaaaaaaaaaaaaaaaaaaaaaaaaaaaaaaaaaaaaaaaaaaaaaaaaaaaaaaaaaaa

SEQ ID NO: 39333 - RNA, 1812 nt, Artificial Sequence
  mRNA product Design b-4 (hSL-A100) comprising derived and/or modified sequence from LASV(Josiah;Clade IV)__NP_694870__GPCmut11 (opt4)
aggagagucccgcagucggcguccagcggcucugcuuguucgugugugugucguugcaggccuuauucaagcuuaccaugggccagaucgugaccuucuuccaggaggugccccacgugaucgaggaggugaugaacaucgugcugaucgcccugagcgugcuggccgugcugaagggccuguacaacuucgccaccugcggccuggugggccuggugaccuuccugcugcugugcggcagaagcugcaccaccagccuguacaagggcguguacgagcugcagacccuggagcugaacauggagacccugaacaugaccaugccccugagcugcaccaagaacaacagccaccacuacaucauggugggcaacgagaccggccuggagcugacccugaccaacaccagcaucaucaaccacaaguucugcaaccugagcgacgcccacaagaagaaccuguacgaccacgcccugaugagcaucaucagcaccuuccaccugagcauccccaacuucaaccaguacgaggccaugagcugcgacuucaacggcggcaagaucagcgugcaguacaaccugagccacagcuacgccggcgacgccgccaaccacugcggcaccguggccaacggcgugcugcagaccuucaugagaauggccuggggcggcagcuacaucgcccuggacagcggcagaggcaacugggacugcaucaugaccagcuaccaguaccugaucauccagaacaccaccugggaggaccacugccaguucagcagacccagccccaucggcuaccugggccugcugagccagagaaccagagacaucuacaucagcagaagacugcugggcaccuucaccuggacccugagcgacagcgagggcaaggacacccccggcggcuacugccugaccagauggaugcugaucgaggccgagcugaagugcuucggcaacaccgccguggccaagugcaacgagaagcacgacgaggaguucugcgacaugcugagacuguucgacuucaacaagcaggccauccagagacugaaggccgaggcccagaugagcauccagcugaucaacaaggccgugaacgcccugaucaacgaccagcugaucaugaagaaccaccugagagacaucaugggcauccccuacugcaacuacagcaaguacugcuaccugaaccacaccaccaccggcagaaccagccugcccaagugcugccuggugagcaacggcagcuaccugaacgagacccacuucagcgacgacaucgagcagcaggccgacaacaugaucaccgagaugcugcagaaggaguacauggagagacagggcaagaccccccugggccugguggaccuguucguguucagcaccagcuucuaccugaucagcaucuuccugcaccuggugaagauccccacccacagacacaucgugggcaagagcugccccaagccccacagacugaaccacaugggcaucugcagcugcggccuguacaagcagcccggcgugcccgugaaguggaagagaugaggacuaguaauaaggaaacuguaugaaugucugugggcaggaagugaagagauccuucuguaaagguuuuuggaauuaugucugcugaauaauaaacuuuuuugaaauaauaaaucugguagaaaaaugagaucucaaaggcucuuuucagagccaccaaaaaaaaaaaaaaaaaaaaaaaaaaaaaaaaaaaaaaaaaaaaaaaaaaaaaaaaaaaaaaaaaaaaaaaaaaaaaaaaaaaaaaaaaaaaaaaaaaaaa

SEQ ID NO: 39334 - RNA, 1809 nt, Artificial Sequence
  mRNA product Design b-4 (hSL-A100) comprising derived and/or modified sequence from LASV(LP;Clade I)__AAF86701__GPCmut11 (opt4)
aggagagucccgcagucggcguccagcggcucugcuuguucgugugugugucguugcaggccuuauucaagcuuaccaugggccagaucaucaccuucuuccaggaggugccccacgugaucgaggaggugaugaacaucgugcugaucgcccugagccugcuggccauccugaagggccuguacaacaucgccaccugcggcaucaucggccugguggccuuccuguuccugugcggcaagagcugcagccugacccugaagggcggcuacgagcugcagacccuggagcugaacauggagacccugaacaugaccaugccccugagcugcaccaagaacagcagccaccacuacaucagagugggcaacgagaccggccuggagcugacccugaccaacaccagcaucaucaaccacaaguucugcaaccugagcgacgcccacaagaagaaccuguacgaccacgcccugaugagcaucaucagcaccuuccaccugagcauccccaacuucaaccaguacgaggccaugagcugcgacuucaacggcggcaagaucagcgugcaguacaaccugagccacagcuacgccggcgacgccgccgagcacugcggcaccguggccaacggcgugcugcagaccuucaugagaauggccuggggcggcagauacaucgcccuggacagcggcaagggcaacugggacugcaucaugaccagcuaccaguaccugaucauccagaacaccaccugggaggaccacugccaguucagcagacccagccccaucggcuaccugggccugcugagccagagaaccagagacaucuacaucagcagaagacugcugggcaccuucaccuggacccugagcgacagcgagggcaacgagacccccggcggcuacugccugaccagauggaugcugaucgaggccgagcugaagugcuucggcaacaccgccguggccaagugcaacgagaagcacgacgaggaguucugcgacaugcugagacuguucgacuucaacaagcaggccaucagaagacugaaggccgaggcccagaugagcauccagcugaucaacaaggccgugaacgcccugaucaacgaccagcugaucaugaagaaccaccugagagacaucaugggcauccccuacugcaacuacagcaaguacugcuaccugaaccacaccagcagcggcagaaccagccugcccaagugcugccugaucagcaacggcagcuaccugaacgagacccaguucagcgacgacaucgagcagcaggccgacaacaugaucaccgagaugcugcagaaggaguacaucgagagacagggcaagaccccccugggccugguggacaucuucaucuucagcaccagcuucuaccugaucagcaucuuccugcaccugaucaagauccccacccacagacacaucgugggcaagcccugccccaagccccacagacugaaccacaugggcgugugcagcugcggccuguacaagcaccccggcgugcccaccaaguggaagagaugaggacuaguaauaaggaaacuguaugaaugucugugggcaggaagugaagagauccuucuguaaagguuuuuggaauuaugucugcugaauaauaaacuuuuuugaaauaauaaaucugguagaaaaaugagaucucaaaggcucuuuucagagccaccaaaaaaaaaaaaaaaaaaaaaaaaaaaaaaaaaaaaaaaaaaaaaaaaaaaaaaaaaaaaaaaaaaaaaaaaaaaaaaaaaaaaaaaaaaaaaaaaaaaaa

SEQ ID NO: 39335 - RNA, 1809 nt, Artificial Sequence
  mRNA product Design b-4 (hSL-A100) comprising derived and/or modified sequence from LASV(803213;Clade II)__AAF86703__GPCmut11 (opt4)
aggagagucccgcagucggcguccagcggcucugcuuguucgugugugugucguugcaggccuuauucaagcuuaccaugggccagaucaucaccuucuuccaggaggugccccacgugaucgaggaggugaugaacaucgugcugaucgcccugagccugcuggccauccugaagggcaucuacaacguggccaccugcggccuguucggccugaucagcuuccugcugcugugcggcagaagcugcagcgugaccuacaagggcguguacgagcugcagacccuggagcugaacauggccaaccugaacaugaccaugccccugagcugcaccaagaacaacagccaccacuacaucauggugggcaacgagaccggccuggagcugacccugaccaacaccagcaucaucaaccacaaguucugcaaccugagcgacgcccacaagaagaaccuguacgaccacgcccugaugagcaucaucagcaccuuccaccugagcauccccaacuucaaccaguacgaggccaugagcugcgacuucaacggcggcaagaucagcgugcaguacaaccugagccacagcuucgccguggacgccgccaaccacugcggcaccaucgccaacggcgugcugcagaccuucaugagaauggccuggggcggcagcuacaucgcccuggacagcggcaagggcaacugggacugcaucaugaccagcuaccaguaccugaucauccagaacaccaccugggaggaccacugccaguucagcagacccagccccaucggcuaccugggccugcugagccagagaaccagagacaucuacaucagcagaagacugcugggcaccuucaccuggacccugagcgacagcgagggcaacgaggcccccggcggcuacugccugaccagauggaugcugaucgaggccgagcugaagugcuucggcaacaccgccguggccaagugcaacgagaagcacgacgaggaguucugcgacaugcugagacuguucgacuucaacaagcaggccaucaagagacugaagaccgaggcccagaugagcauccagcugaucaacaaggccgugaacgcccugaucaacgaccagcugaucaugaagaaccaccugagagacaucaugggcauccccuacugcaacuacagcagauacugcuaccugaaccacaccgugaccggcaagaccagccugcccagaugcugccuggugagcaacggcagcuaccugaacgagacccacuucagcgacgacaucgagcagcaggccgacaacaugaucaccgagaugcugcagaaggaguacauggacagacagggcaagaccccccugggccugguggaccuguucguguucagcaccagcuucuaccugaucagcaucuuccugcaccuggugaagauccccacccacagacacaucgugggcaagcccugccccaagccccacagacugaaccacaugggcaucugcagcugcggccuguacaagcaccccggcgugcccgugaaguggaagagaugaggacuaguaauaaggaaacuguaugaaugucugugggcaggaagugaagagauccuucuguaaagguuuuuggaauuaugucugcugaauaauaaacuuuuuugaaauaauaaaucugguagaaaaaugagaucucaaaggcucuuuucagagccaccaaaaaaaaaaaaaaaaaaaaaaaaaaaaaaaaaaaaaaaaaaaaaaaaaaaaaaaaaaaaaaaaaaaaaaaaaaaaaaaaaaaaaaaaaaaaaaaaaaaaa

SEQ ID NO: 39336 - RNA, 1809 nt, Artificial Sequence
  mRNA product Design b-4 (hSL-A100) comprising derived and/or modified sequence from LASV(GA391;Clade III)__CAA36645__GPCmut11 (opt4)
aggagagucccgcagucggcguccagcggcucugcuuguucgugugugugucguugcaggccuuauucaagcuuaccaugggccagaucgugaccuucuuccaggaggugccccacgugaucgaggaggugaugaacaucgugcugaucgcccugagcauccuggccauccugaagggccuguacaacguggccaccugcggccugaucggccuggugaccuuccugcugcugagcggcagaagcugcagccugaucuacaagggcaccuacgagcugcagacccuggagcugaacauggagacccugaacaugaccaugccccugagcugcaccaagaacaacagccaccacuacaucagagugggcaacgagaccggccuggagcugacccugaccaacaccagcauccugaaccacaaguucugcaaccugagcgacgcccacaagagaaaccuguacgaccacagccugaugagcaucaucagcaccuuccaccugagcauccccaacuucaaccaguacgaggccaugagcugcgacuucaacggcggcaagaucaccgugcaguacaaccugagccacagcuucgccguggacgccgccggccacugcggcacccuggccaacggcgugcugcagaccuucaugagaauggccuggggcggcagcuacaucgcccuggacagcggcagaggcaacugggacugcaucaugaccagcuaccaguaccugaucauccagaacaccaccugggacgaccacugccaguucagcagacccagccccaucggcuaccugggccugcugagccagagaaccagagacaucuacaucagcagaagacugcugggcaccuucaccuggacccugagcgacagcgagggcaacgagacccccggcggcuacugccugaccagauggaugcugaucgaggccgagcugaagugcuucggcaacaccgccguggccaagugcaacgagaagcacgacgaggaguucugcgacaugcugagacuguucgacuucaacaagcaggccaucagaagacugaagaccgaggcccagaugagcauccagcugaucaacaaggccgugaacgcccugaucaacgaccagcugaucaugaagaaccaccugagagacaucaugggcauccccuacugcaacuacagcagauacugcuaccugaaccacaccagcaccggcaagaccagccugcccagaugcugccugaucagcaacggcagcuaccugaacgagaccaaguucagcgacgacaucgagcagcaggccgacaacaugaucaccgagaugcugcagaaggaguacaucgacagacagggcaagaccccccugggccugguggaccuguucguguucagcaccagcuucuaccugaucagcaucuuccugcaccuggugaagauccccacccacagacacaucgugggcaagcccugccccaagccccacagacugaaccacaugggcaucugcagcugcggccuguacaagcagcccggcgugcccgugagauggaagagaugaggacuaguaauaaggaaacuguaugaaugucugugggcaggaagugaagagauccuucuguaaagguuuuuggaauuaugucugcugaauaauaaacuuuuuugaaauaauaaaucugguagaaaaaugagaucucaaaggcucuuuucagagccaccaaaaaaaaaaaaaaaaaaaaaaaaaaaaaaaaaaaaaaaaaaaaaaaaaaaaaaaaaaaaaaaaaaaaaaaaaaaaaaaaaaaaaaaaaaaaaaaaaaaaa

SEQ ID NO: 39337 - RNA, 1812 nt, Artificial Sequence
  mRNA product Design b-4 (hSL-A100) comprising derived and/or modified sequence from LASV(AV;Clade V)__CCA30314__GPCmut11 (opt4)
aggagagucccgcagucggcguccagcggcucugcuuguucgugugugugucguugcaggccuuauucaagcuuaccaugggccagaucgugaccuucuuccaggaggugccccacgugaucgaggaggugaugaacaucgugcugaucgcccugagcauccuggccgugcugaagggccuguacaacaucgccaccugcggccugaucggccugaucaccuuccugcugcugugcggcagaagcugcagcagcaaccuguacaagggcguguacgagcugcagagccuggaccugaacauggagacccugaacaugaccaugccccugagcugcaccaagaacaacagccaccacuacaucagagugggcaacgacaccggccuggagcugacccugaccaacaccagcauccugaaccacaaguucugcaaccugagcgacgcccacaagaaggaccuguacgaccacgcccugaugagcaucaucagcaccuuccaccugagcauccccaacuucaaccaguacgaggccaugagcugcgacuucaacggcggcaagaucagcgugcaguacaaccugagccacagcuacgccaucgacgccgccaaccacugcggcaccguggccaacggcauccugcagaccuucaugagaauggccuggggcggcagcuacaucgcccuggacagcggcagaggcaacugggacugcaucaugaccagcuaccaguaccugaucauccagaacaccaccugggagaaccacugccaguucagcagacccagccccaucggcuaccugggccugcugagccagagaaccagagacaucuacaucagcagaagacugcugggcaccuucaccuggacccugagcgacagcgagggcaacgccacccccggcggcuacugccugaccagauggaugcugaucgaggccgagcugaagugcuucggcaacaccgccguggccaagugcaacgagaagcacgacgaggaguucugcgacaugcugagacuguucgacuucaacaagcaggccaucagcagacugaagagcgaggcccagaugagcauccagcugaucaacaaggccgugaacgcccugaucaacgaccagcugaucaugaagaaccaccugagagacaucaugggcauccccuacugcaacuacagcaaguacugcuaccugaaccacaccaucaccggcaagaccagccugcccaagugcugccuggugagcaacggcagcuaccugaacgagacccacuucagcgacgacaucgagcagcaggccgacaacaugaucaccgagaugcugcagaaggaguacauggagagacagggcaagaccccccugggccugguggaccuguucguguucagcaccagcuucuaccugaucagcaucuuccugagacuggugaagauccccacccacagacacaucgugggcaagcccugccccaagccccacagacugaaccacaugggcaucugcagcugcggccuguacaagcagcccggcgugcccgugagauggaagagaugaggacuaguaauaaggaaacuguaugaaugucugugggcaggaagugaagagauccuucuguaaagguuuuuggaauuaugucugcugaauaauaaacuuuuuugaaauaauaaaucugguagaaaaaugagaucucaaaggcucuuuucagagccaccaaaaaaaaaaaaaaaaaaaaaaaaaaaaaaaaaaaaaaaaaaaaaaaaaaaaaaaaaaaaaaaaaaaaaaaaaaaaaaaaaaaaaaaaaaaaaaaaaaaaa

SEQ ID NO: 39338 - RNA, 1809 nt, Artificial Sequence
  mRNA product Design b-4 (hSL-A100) comprising derived and/or modified sequence from LASV(Togo/2016/7082;Clade VI)__AMR44577__GPCmut11 (opt4)
aggagagucccgcagucggcguccagcggcucugcuuguucgugugugugucguugcaggccuuauucaagcuuaccaugggccagaucaucaccuucuuccaggaggugccccacgugaucgaggaggugaugaacaucgugcugaucgcccugagccugcuggccauccugaagggcguguacaacguggccaccugcggcaucaucggccuggugaccuuccuguuccugugcggcagaagcugcagccugaucuacaagggcagcuacgagcugcagacccuggagcugaacauggagacccugaacaugaccaugccccugagcugcaccaagaacagcagccaccacuacaucagagugggcaacgagaccggccuggagcugacccugaccaacaccagcaucaucaaccacaaguucugcaaccugagcgacgcccacaagagaaaccuguacgaccacgcccugaugagcauccugagcaccuuccaccugagcauccccaacuucaaccaguacgaggccaugagcugcgacuucaacggcggcaagaucagcgugcaguacaaccugagccacgccuacgccguggacgccgccgagcacugcggcaccguggccaacggcgugcugcagaccuucaugagaauggccuggggcggcagcuacaucgcccuggacagcggcagaggcaacugggacugcaucaugaccagcuaccaguaccugaucauccagaacaccaccugggaggaccacugccaguucagcagacccagccccaucggcuaccugggccugcugagccagagaaccagagacaucuacaucagcagaagacugcugggcaccuucaccuggacccugagcgacagcgagggcaacgagacccccggcggcuacugccugaccagauggaugcugaucgaggccgagcugaagugcuucggcaacaccgccguggccaagugcaacgagaagcacgacgaggaguucugcgacaugcugagacuguucgacuucaacaagcaggccauccagagacugaagagcgaggcccagaugagcauccagcugaucaacaaggccgugaacgcccugaucaacgaccagcugaucaugaagaaccaccugagagacaugaugggcauccccuacugcaacuacagcaaguacugcuaccugaaccacaccagcagcggcagaaccagccugcccaagugcugccuggugagcaacggcagcuaccugaacgagacccacuucagcgacgacaucgagcagcaggccgacaacaugaucaccgagaugcugcagaaggaguacaucgacagacagggcaagaccccccugggccugguggaccuguucguguucagcaccagcuucuaccugaucagcaucuuccugcaccugaucaagauccccacccacagacacaucgugggcaagcccugccccaagccccacagacugaaccacaugggcaucugcagcugcggccuguacaagcagcccggcgugcccaccagauggaagagaugaggacuaguaauaaggaaacuguaugaaugucugugggcaggaagugaagagauccuucuguaaagguuuuuggaauuaugucugcugaauaauaaacuuuuuugaaauaauaaaucugguagaaaaaugagaucucaaaggcucuuuucagagccaccaaaaaaaaaaaaaaaaaaaaaaaaaaaaaaaaaaaaaaaaaaaaaaaaaaaaaaaaaaaaaaaaaaaaaaaaaaaaaaaaaaaaaaaaaaaaaaaaaaaaa

SEQ ID NO: 39339 - RNA, 1809 nt, Artificial Sequence
  mRNA product Design b-4 (hSL-A100) comprising derived and/or modified sequence from LASV(KAK-428;Clade n.d. (VII))__ANH09740__GPCmut11 (opt4)
aggagagucccgcagucggcguccagcggcucugcuuguucgugugugugucguugcaggccuuauucaagcuuaccaugggccagaucgugaccuucuuccaggaggugccccacgugaucgaggaggugaugaacaucgugcugaucgcccugagccugcuggccauccugaagggccuguacaacuucgccaccugcggcgugaucggccugaucaccuuccugcugcugugcggcagaagcugcagcgccaccuacaagggccaguacgagcugcagacccuggagcugaacauggagagccugaacaugaccaugccccugagcugcaccaagaacaacagccaccacuacaucagagccggcaacaacaccggccuggagcugacccugaccaacaccagcaucaucagccacaaguucugcaaccugagcgacgcccacaagaagaaccuguacgaccacacccugaugagcaucaucaccaccuuccaccugagcauccccaacuucaaccaguacgaggccaugagcugcgacuucaacggcggcaagaucagcauccaguacaaccugagccacagcuacgccggcgacgccgcccagcacugcggcaccguggccaacggcgugcugcagaccuucaugagaauggccuggggcggcagcuaccuggcccuggacagcggcagaagaggcugggacugcaucaucagcagcuaccaguaccugaucauccagaacaccaccugggacgaccacugccaguucagcagacccagccccaucggcuaccugggcuucgugagccagaagaccagagacaucuacaucagcagaagacugcugggcaccuucaccuggacccugagcgacagcgagggccacgacaugcccggcggcuacugccugaccagauggaugcugaucgaggccgaccugaagugcuucggcaacaccgccguggccaagugcaacgagaagcacgacgaggaguucugcgacauguggagacuguucgacuucaacaagcaggccauccagagacugaaggccgaggcccagaugaacauccagcugaucaacaaggccgugaacgcccugaucaacgaccagcugaugaugaagaaccaccugagagacaucaugggcauccccuacugcaacuacagcaaguucugcuaccugaacaacaccaccaccggcagaaccagccugcccagaugcugccugaucagcaacggcagcuaccugaacgagacccacuucagcgacgacaucgagcagcaggccgacaacaugaucaccgagaugcugcagaaggaguacauggacagacagggcaagaccccccugggccugguggaccuguucguguucagcaccagcuucuaccugaucaccaucuuccugcaccuggugaagauccccacccacagacacaucgugggcaagcccugccccaagccccacagacugaaccacaugggcaucugcagcugcggccuguacaagcagcccggcgugcccgugagauggaagagaugaggacuaguaauaaggaaacuguaugaaugucugugggcaggaagugaagagauccuucuguaaagguuuuuggaauuaugucugcugaauaauaaacuuuuuugaaauaauaaaucugguagaaaaaugagaucucaaaggcucuuuucagagccaccaaaaaaaaaaaaaaaaaaaaaaaaaaaaaaaaaaaaaaaaaaaaaaaaaaaaaaaaaaaaaaaaaaaaaaaaaaaaaaaaaaaaaaaaaaaaaaaaaaaaa

SEQ ID NO: 39340 - RNA, 1809 nt, Artificial Sequence; identical to SEQ ID NO: 39334
  mRNA product Design b-4 (hSL-A100) comprising derived and/or modified sequence from LASV(Pinneo-NIG-1969;Clade I)__AIT17836__GPCmut11 (opt4)

SEQ ID NO: 39341 - RNA, 1809 nt, Artificial Sequence
  mRNA product Design b-4 (hSL-A100) comprising derived and/or modified sequence from LASV(ISTH0009-NIG-2011;Clade II)__AIT17404__GPCmut11 (opt4)
aggagagucccgcagucggcguccagcggcucugcuuguucgugugugugucguugcaggccuuauucaagcuuaccaugggccagaucaucaccuucuuccaggaggugccccacgugaucgaggaggugaugaacaucgugcugaucgcccugagccugcuggccauccugaagggcaucuacaacguggccaccugcggccuguucggccuggugagcuuccugcugcugugcggcagaagcugcagcaccaccuacaagggcguguacgagcugcagacccuggagcuggacauggccagccugaacaugaccaugccccugagcugcaccaagaacaacagccaccacuacaucauggugggcaacgagaccggccuggagcugacccugaccaacaccagcaucaucaaccacaaguucugcaaccugagcgacgcccacaagaagaaccuguacgaccacgcccugaugagcaucaucagcaccuuccaccugagcauccccaacuucaaccaguacgaggccaugagcugcgacuucaacggcggcaagaucagcgugcaguacaaccugagccacgccuacgccguggacgccgccaaccacugcggcaccaucgccaacggcgugcugcagaccuucaugagaauggccuggggcggcagcuacaucgcccuggacagcggcaagggcagcugggacugcaucaugaccagcuaccaguaccugaucauccagaacaccaccugggaggaccacugccaguucagcagacccagccccaucggcuaccugggccugcugagccagagaaccagagacaucuacaucagcagaagacugcugggcaccuucaccuggacccugagcgacagcgagggcaacgagacccccggcggcuacugccugaccagauggaugcugaucgaggccgagcugaagugcuucggcaacaccgccguggccaagugcaacgagaagcacgacgaggaguucugcgacaugcugagacuguucgacuucaacaagcaggccaucagaagacugaagaccgaggcccagaugagcauccagcugaucaacaaggccgugaacgcccugaucaacgaccagcugaucaugaagaaccaccugagagacaucaugggcauccccuacugcaacuacagcaaguacugcuaccugaaccacaccgugaccggcaagaccagccugcccagaugcugccuggugagcaacggcagcuaccugaacgagacccacuucagcgacgacaucgagcagcaggccgacaacaugaucaccgagcugcugcagaaggaguacauggacagacagggcaagaccccccugggccugguggaccuguucguguucagcaccagcuucuaccugaucagcaucuuccugcaccugaucaagauccccacccacagacacaucaccggcaagcccugccccaagccccacagacugaaccacaugggcaucugcagcugcggccuguacaagcaccccggcgugcccgugaaguggaagagaugaggacuaguaauaaggaaacuguaugaaugucugugggcaggaagugaagagauccuucuguaaagguuuuuggaauuaugucugcugaauaauaaacuuuuuugaaauaauaaaucugguagaaaaaugagaucucaaaggcucuuuucagagccaccaaaaaaaaaaaaaaaaaaaaaaaaaaaaaaaaaaaaaaaaaaaaaaaaaaaaaaaaaaaaaaaaaaaaaaaaaaaaaaaaaaaaaaaaaaaaaaaaaaaaa

SEQ ID NO: 39342 - RNA, 1809 nt, Artificial Sequence
  mRNA product Design b-4 (hSL-A100) comprising derived and/or modified sequence from LASV(ISTH2010-NIG-2012;Clade II)__AIT17482__GPCmut11 (opt4)
aggagagucccgcagucggcguccagcggcucugcuuguucgugugugugucguugcaggccuuauucaagcuuaccaugggccagaucaucaccuucuuccaggaggugccccacgugaucgaggaggugaugaacaucgugcugaucgcccugagccugcuggccauccugaagggcaucuacaacguggccaccugcggccuguucggccuggugagcuuccugcugcugugcggcagaagcugcagcaccaccuacaagggcguguacgagcugcagacccuggagcuggacauggccagccugaacaugaccaugccccugagcugcaccaagaacaacagccaccacuacaucauggugggcaacgagaccggccuggagcugacccugaccaacaccagcaucaucaaccacaaguucugcaaccugagcgacgcccacaagaagaaccuguacgaccacgcccugaugagcaucaucagcaccuuccaccugagcauccccaacuucaaccaguacgaggccaugagcugcgacuucaacggcggcaagaucagcgugcaguacaaccugagccacgccuacgccguggacgccgccaaccacugcggcaccaucgccaacggcgugcugcagaccuucaugagaauggccuggggcggcagcuacaucgcccuggacagcggcaagggcagcugggacugcaucaugaccagcuaccaguaccugaucauccagaacaucaccugggaggaccacugccaguucagcagacccagccccaucggcuaccugggccugcugagccagagaaccagagacaucuacaucagcagaagacugcugggcaccuucaccuggacccugagcgacagcgagggcaacgagacccccggcggcuacugccugaccagauggaugcugaucgaggccgagcugaagugcuucggcaacaccgccguggccaagugcaacgagaagcacgacgaggaguucugcgacaugcugagacuguucgacuucaacaagcaggccaucagaagacugaagaccgaggcccagaugagcauccagcugaucaacaaggccgugaacgcccugaucaacgaccagcugaucaugaagaaccaccugagagacaucaugggcauccccuacugcaacuacagcaaguacugcuaccugaaccacaccgugaccggcaagaccagccugcccagaugcugccuggugagcaacggcagcuaccugaacgagacccacuucagcgacgacaucgagcagcaggccgacaacaugaucaccgagcugcugcagaaggaguacaucgacagacagggcaagaccccccugggccugguggaccuguucguguucagcaccagcuucuaccugaucagcaucuuccugcaccuggugaagauccccacccacagacacguggugggcaagcccugccccaagccccacagacugaaccacaugggcaucugcagcugcggccuguacaagcaccccggcgugcccgugaaguggaagagaugaggacuaguaauaaggaaacuguaugaaugucugugggcaggaagugaagagauccuucuguaaagguuuuuggaauuaugucugcugaauaauaaacuuuuuugaaauaauaaaucugguagaaaaaugagaucucaaaggcucuuuucagagccaccaaaaaaaaaaaaaaaaaaaaaaaaaaaaaaaaaaaaaaaaaaaaaaaaaaaaaaaaaaaaaaaaaaaaaaaaaaaaaaaaaaaaaaaaaaaaaaaaaaaaa

SEQ ID NO: 39343 - RNA, 1809 nt, Artificial Sequence
  mRNA product Design b-4 (hSL-A100) comprising derived and/or modified sequence from LASV(Lassa virus/H.sapiens-wt/NGA/2015/ISTH_0543;Clade II)__AVO03639__GPCmut11 (opt4)
aggagagucccgcagucggcguccagcggcucugcuuguucgugugugugucguugcaggccuuauucaagcuuaccaugggccagaucaucaccuucuuccaggaggugccccacgugaucgaggaggugaugaacaucgugcugaucgcccugagccugcuggccauccugaagggcaucuacaacguggccaccugcggccuguucggccuggugagcuuccugcugcugugcggcagaagcugcagcaccaccuacaagggcguguacgagcugcagacccuggagcuggacauggccaaccugaacaugaccaugccccugagcugcaccaagaacaacagccaccacuacaucauggugggcaacgagaccggccuggagcugacccugaccaacaccagcaucaucaaccacaaguucugcaaccugagcgacgcccacaagaagaaccuguacgaccacgcccugaugagcaucaucagcaccuuccaccugagcauccccaacuucaaccaguacgaggccaugagcugcgacuucaacggcggcaagaucagcgugcaguacaaccugagccacaccuacgccguggacgccgccaaccacugcggcaccaucgccaacggcgugcugcagaccuucaugagaauggccuggggcggcagcuacaucgcccuggacagcggcaagggcagcugggacugcaucaugaccagcuaccaguaccuggugauccagaacaccaccugggaggaccacugccaguucagcagacccagccccaucggcuaccugggccugcugagccagagaaccagagacaucuacaucagcagaagacugcugggcaccuucaccuggacccugagcgacagcgagggcaacgagacccccggcggcuacugccugaccagauggaugcugaucgaggccgagcugaagugcuucggcaacaccgccguggccaagugcaacgagaagcacgacgaggaguucugcgacaugcugagacuguucgacuucaacaagcaggccaucagaagacugaagaccgaggcccagaugagcauccagcugaucaacaaggccgugaacgcccugaucaacgaccagcugaucaugaagaaccaccugagagacaucaugggcauccccuacugcaacuacagcaaguacugcuaccugaaccacaccgugaccggcaagaccagccugcccagaugcugccuggugagcaacggcagcuaccugaacgagacccacuucagcgacgacaucgagcagcaggccgacaacaugaucaccgagcugcugcagaaggaguacaucgacagacagggcaagaccccccugggccugguggaccuguucguguucagcaccagcuucuaccugaucagcaucuuccugcaccuggugaagauccccacccacagacacaucaccggcaagcccugccccaagccccacagacugaaccacaugggcaucugcagcugcggccuguacaagcaccccggcgugcccgugaaguggaagagaugaggacuaguaauaaggaaacuguaugaaugucugugggcaggaagugaagagauccuucuguaaagguuuuuggaauuaugucugcugaauaauaaacuuuuuugaaauaauaaaucugguagaaaaaugagaucucaaaggcucuuuucagagccaccaaaaaaaaaaaaaaaaaaaaaaaaaaaaaaaaaaaaaaaaaaaaaaaaaaaaaaaaaaaaaaaaaaaaaaaaaaaaaaaaaaaaaaaaaaaaaaaaaaaaa

SEQ ID NO: 39344 - RNA, 1809 nt, Artificial Sequence
  mRNA product Design b-4 (hSL-A100) comprising derived and/or modified sequence from LASV(Lassa virus/H.sapiens-wt/NGA/2016/ISTH_0009;Clade II)__AVO03571__GPCmut11 (opt4)
aggagagucccgcagucggcguccagcggcucugcuuguucgugugugugucguugcaggccuuauucaagcuuaccaugggccagaucaucaccuucuuccaggaggugccccacgugaucgaggaggugaugaacaucgugcugaucgcccugagccugcuggccauccugaagggcaucuacaacguggccaccugcggccugcugggccuggugagcuuccugcugcugugcggcagaagcugcagcaccaccuacaagggcguguacgagcugcagacccuggagcuggacauggccagccugaacaugaccaugccccugagcugcaccaagaacaacagccaccacuacaucauggugggcaacgagaccggccuggagcugacccugaccaacaccagcaucaucaaccacaaguucugcaaccugagcgacgcccacaagaagaaccuguacgaccacgcccugaugagcaucaucagcaccuuccaccugagcauccccaacuucaaccaguacgaggccaugagcugcgacuucaacggcggcagaaucagcgugcaguacaaccugagccacagcuacgccguggacgccgccaaccacugcggcaccaucgccaacggcgugcugcagaccuucaugagaauggccuggggcggcagcuacaucgcccuggacagcggcaagggcagcugggacugcaucaugaccagcuaccaguaccugaucauccagaacaccaccugggaggaccacugccaguucagcagacccagccccaucggcuaccugggccugcugagccagagaaccagagacaucuacaucagcagaagacugcugggcaccuucaccuggacccugagcgacagcgagggcaacgagacccccggcggcuacugccugaccagauggaugcugaucgaggccgagcugaagugcuucggcaacaccgccguggccaagugcaacgagaagcacgacgaggaguucugcgacaugcugagacuguucgacuucaacaagcaggccaucagaagacugaagaccgaggcccagaugagcauccagcugaucaacaaggccgugaacgcccugaucaacgaccagcugaucaugaagaaccaccugagagacaucaugggcauccccuacugcaacuacagcaaguacugcuaccugaaccacaccgugaccggcaagaccagccugcccagaugcugccuggugagcaacggcagcuaccugaacgagacccacuucagcgacgacaucgagcagcaggccgacaacaugaucaccgagcugcugcagaaggaguacaucgacagacagggcaagaccccccugggccugguggaccuguucguguucagcaccagcuucuaccugaucagcaucuuccugcaccuggugaagauccccacccacagacacaucaccggcaagcccugccccaagccccacagacugaaccacaugggcaucugcagcugcggccuguacaaccaccccggcgugcccgugaaguggaagagaugaggacuaguaauaaggaaacuguaugaaugucugugggcaggaagugaagagauccuucuguaaagguuuuuggaauuaugucugcugaauaauaaacuuuuuugaaauaauaaaucugguagaaaaaugagaucucaaaggcucuuuucagagccaccaaaaaaaaaaaaaaaaaaaaaaaaaaaaaaaaaaaaaaaaaaaaaaaaaaaaaaaaaaaaaaaaaaaaaaaaaaaaaaaaaaaaaaaaaaaaaaaaaaaaa

SEQ ID NO: 39345 - RNA, 1809 nt, Artificial Sequence
  mRNA product Design b-4 (hSL-A100) comprising derived and/or modified sequence from LASV(Lassa virus/H.sapiens-wt/NGA/2016/ISTH_0017;Clade II)__AVO03567__GPCmut11 (opt4)
aggagagucccgcagucggcguccagcggcucugcuuguucgugugugugucguugcaggccuuauucaagcuuaccaugggccagaucaucaccuucuuccaggaggugccccacgugaucgaggaggugaugaacaucgugcugaucgcccugagccugcuggccauccugaagggcaucuacaacguggccaccugcggccuguucggccuggugagcuuccugcugcugugcggcagaagcugcagcaccaccuacaagggcguguacgagcugcagacccuggagcuggacauggccagccugaacaugaccaugccccugagcugcaccaagaacaacagccaccacuacaucauggugggcaacgagaccggccuggagcugacccugaccaacaccagcaucaucaaccacaaguucugcaaccugagcgacgcccacaagaagaaccuguacgaccacgcccugaugagcaucaucagcaccuuccaccugagcauccccaacuucaaccaguacgaggccaugagcugcgacuucaacggcggcaagaucagcgugcaguacaaccugagccacaccuacgccaucgacgccgccaaccacugcggcaccaucgccaacggcgugcugcagaccuucaugagaauggccuggggcggcagcuacaucgcccuggacagcggcaagggcagcugggacugcaucaugaccagcuaccaguaccugaucauccagaacaccaccugggaggaccacugccaguucagcagacccagccccaucggcuaccugggccugcugagccagagaaccagagacaucuacaucagcagaagacugcugggcaccuucaccuggacccugagcgacagcgagggcaacgagacccccggcggcuacugccugaccagauggaugcugaucgaggccgagcugaagugcuucggcaacaccgccguggccaagugcaacgagaagcacgacgaggaguucugcgacaugcugagacuguucgacuucaacaagcaggccaucagaagacugaagaccgaggcccagaugagcauccagcugaucaacaaggccgugaacgcccugaucaacgaccagcugaucaugaagaaccaccugagagacaucaugggcauccccuacugcaacuacagcaaguacugcuaccugaaccacaccgugaccggcaagaccagccugcccagaugcugccuggugagcaacggcagcuaccugaacgagacccacuucagcgacgacaucgagcagcaggccgacaacaugaucaccgagcugcugcagaaggaguacauggacagacagggcaagaccccccugggccugguggaccuguucguguucagcaccagcuucuaccugaucagcaucuuccugcaccuggugagaauccccacccacagacacgugaucggcaagcccugccccaagccccacagacugaaccacaugggcaucugcagcugcggccuguacaagcaccccggcgugcccgugaaguggaagagaugaggacuaguaauaaggaaacuguaugaaugucugugggcaggaagugaagagauccuucuguaaagguuuuuggaauuaugucugcugaauaauaaacuuuuuugaaauaauaaaucugguagaaaaaugagaucucaaaggcucuuuucagagccaccaaaaaaaaaaaaaaaaaaaaaaaaaaaaaaaaaaaaaaaaaaaaaaaaaaaaaaaaaaaaaaaaaaaaaaaaaaaaaaaaaaaaaaaaaaaaaaaaaaaaa

SEQ ID NO: 39346 - RNA, 1809 nt, Artificial Sequence
  mRNA product Design b-4 (hSL-A100) comprising derived and/or modified sequence from LASV(Lassa virus/H.sapiens-wt/NGA/2018/ISTH_0959;Clade II)__AVV65099__GPCmut11 (opt4)
aggagagucccgcagucggcguccagcggcucugcuuguucgugugugugucguugcaggccuuauucaagcuuaccaugggccagaucaucaccuucuuccaggaggugccccacgugaucgaggaggugaugaacaucgugcugaucgcccugagccugcuggccauccugaagggcaucuacaacguggugaccugcggccuguucggccuggugagcuuccugcugcugugcggcagaagcugcagcaccaccuacaagggcguguacgagcugcagacccuggagcuggacauggccagccugaacaugaccaugccccugagcugcaccaagaacaacagccaccacuacaucauggugggcaacgagaccggccuggagcugacccugaccaacaccagcaucaucaaccacaaguucugcaaccugagcgacgcccacaagaagaaccuguacgaccacgcccugaugagcaucaucagcaccuuccaccugagcauccccaacuucaaccaguacgaggccaugagcugcgacuucaacggcggcaagaucagcgugcaguacaaccugagccacgccuacgccaucgacgccgccaaccacugcggcaccaucgccaacggcgugcugcagaccuucaugagaauggccuggggcggcagcuacaucgcccuggacagcggcaagggcagcugggacugcaucaugaccagcuaccaguaccugaucauccagaacaccaccugggaggaccacugccaguucagcagacccagccccaucggcuaccugggccugcugagccagagaaccagagacaucuacaucagcagaagacugcugggcaccuucaccuggacccugagcgacagcgagggcaacgagacccccggcggcuacugccugaccagauggaugcugaucgaggccgagcugaagugcuucggcaacaccgccguggccaagugcaacgagaagcacgacgaggaguucugcgacaugcugagacuguucgacuucaacaagcaggccaucagaagacugaagaccgaggcccagaugagcauccagcugaucaacaaggccgugaacgcccugaucaacgaccagcugaucaugaagaaccaccugagagacaucaugggcauccccuacugcaacuacagcaaguacugcuaccugaaccacaccgugaccggcaagaccagccugcccagaugcugccuggugagcaacggcagcuaccugaacgagacccacuucagcgacgacaucgagcagcaggccgacaacaugaucaccgagcugcugcagaaggaguacaucgacagacagggcaagaccccccugggccugguggaccuguucguguucagcaccagcuucuaccugaucagcaucuuccugcaccuggugaagauccccacccacagacacgugaucggcaagcccugccccaagccccacagacugaaccacaugggcaucugcagcugcggccuguacaagcaccccggcgugcccgugaaguggaagagaugaggacuaguaauaaggaaacuguaugaaugucugugggcaggaagugaagagauccuucuguaaagguuuuuggaauuaugucugcugaauaauaaacuuuuuugaaauaauaaaucugguagaaaaaugagaucucaaaggcucuuuucagagccaccaaaaaaaaaaaaaaaaaaaaaaaaaaaaaaaaaaaaaaaaaaaaaaaaaaaaaaaaaaaaaaaaaaaaaaaaaaaaaaaaaaaaaaaaaaaaaaaaaaaaa

SEQ ID NO: 39347 - RNA, 1809 nt, Artificial Sequence
  mRNA product Design b-4 (hSL-A100) comprising derived and/or modified sequence from LASV(LASV003-NIG-2008;Clade II)__AIT17580__GPCmut11 (opt4)
aggagagucccgcagucggcguccagcggcucugcuuguucgugugugugucguugcaggccuuauucaagcuuaccaugggccagaucaucaccuucuuccaggaggugccccacgugaucgaggaggugaugaacaucgugcugaucgcccugagccugcuggccauccugaagggcaucuacaacguggccaccugcggccuguucggccuggugagcuuccugcugcugugcggcagaagcugcagcaccaccuacaagggcguguacgagcugcagacccuggagcuggacauggccagccugaacaugaccaugccccugagcugcaccaagaacaacagccaccacuacaucauggugggcaacgagaccggccuggagcugacccugaccaacaccagcaucaucaaccacaaguucugcaaccugagcgacgcccacaagaagaaccuguacgaccacgcccugaugagcaucaucagcaccuuccaccugagcauccccaacuucaaccaguacgaggccaugagcugcgacuucaacggcggcaagaucagcgugcaguacaaccugagccacaccuacgccguggacgccgccaaccacugcggcaccaucgccaacggcgugcugcagaccuucaugagaauggccuggggcggcagcuacaucgcccuggacagcggcaagggcagcugggacugcaucaugaccagcuaccaguaccugaucauccagaacaccaccugggaggaccacugccaguucagcagacccagccccaucggcuaccugggccugcugagccagagaaccagagacaucuacaucagcagaagacugcugggcaccuucaccuggacccugagcgacagcgagagcaacgagacccccggcggcuacugccugaccagauggaugcugaucgaggccgagcugaagugcuucggcaacaccgccguggccaagugcaacgagaagcacgacgaggaguucugcgacaugcugagacuguucgacuucaacaagcaggccaucagaagacugaaggccgaggcccagaugagcauccagcugaucaacaaggccgugaacgcccugaucaacgaccagcugaucaugaagaaccaccugagagacaucaugggcauccccuacugcaacuacagcaaguacugcuaccugaaccacaccgugaccggcagaaccagccugcccagaugcugccuggugagcaacggcagcuaccugaacgagacccacuucagcgacgacaucgagcagcaggccgacaacaugaucaccgagcugcugcagaaggaguacauggacagacagggcaagaccccccugggccugguggaccuguucguguucagcaccagcuucuaccugaucagcaucuuccugcaccuggugaagauccccacccacagacacgugaucggcaagcccugccccaagccccacagacugaaccacaugggcaucugcagcugcggccuguacaagcaccccggcgugcccgugaaguggaagagaugaggacuaguaauaaggaaacuguaugaaugucugugggcaggaagugaagagauccuucuguaaagguuuuuggaauuaugucugcugaauaauaaacuuuuuugaaauaauaaaucugguagaaaaaugagaucucaaaggcucuuuucagagccaccaaaaaaaaaaaaaaaaaaaaaaaaaaaaaaaaaaaaaaaaaaaaaaaaaaaaaaaaaaaaaaaaaaaaaaaaaaaaaaaaaaaaaaaaaaaaaaaaaaaaa

SEQ ID NO: 39348 - RNA, 1809 nt, Artificial Sequence
  mRNA product Design b-4 (hSL-A100) comprising derived and/or modified sequence from LASV(LASV035-NIG-2009;Clade II)__AIT17588__GPCmut11 (opt4)
aggagagucccgcagucggcguccagcggcucugcuuguucgugugugugucguugcaggccuuauucaagcuuaccaugggccagaucaucaccuucuuccaggaggugccccacgugaucgaggaggugaugaacaucgugcugaucgcccugagccugcuggccauccugaagggcaucuacaacguggccaccugcggccuguucggccuggugagcuuccugcugcugugcggcagaagcugcagcaccaccuacaagggcguguacgagcugcagacccuggagcuggacauggccagccugaacaugaccaugccccugagcugcaccaagaacaacagccaccacuacaucauggugggcaacgagaccggccuggagcugacccugaccaacaccagcaucaucaaccacaaguucugcaaccugagcgacgcccacaagaagaaccuguacgaccacgcccugaugagcaucaucagcaccuuccaccugagcauccccaacuucaaccaguacgaggccaugagcugcgacuucaacggcggcaagaucagcgugcaguacaaccugagccacgccuacgccguggacgccgccaaccacugcggcaccaucgccaacggcgugcugcagaccuucaugagaauggccuggggcggcagcuacaucgcccuggacagcggcaagggcagcugggacugcaucaugaccagcuaccaguaccugaucauccagaacaccaccugggaggaccacugccaguucagcagacccagccccaucggcuaccugggccugcugagccagagaaccagagacaucuacaucagcagaagacugcugggcaccuucaccuggacccugagcgacagcgagggcaacgagacccccggcggcuacugccugaccagauggaugcugaucgaggccgagcugaagugcuucggcaacaccgccguggccaagugcaacgagaagcacgacgaggaguucugcgacaugcugagacuguucgacuucaacaagcaggccaucagaagacugaaggccgaggcccagaugagcauccagcugaucaacaaggccgugaacgcccugaucaacgaccagcugaucaugaagaaccaccugagagacaucaugggcauccccuacugcaacuacagcaaguacugcuaccugaaccacaccgugaccggcaagaccagccugcccagaugcugccuggugagcaacggcagcuaccugaacgagacccacuucagcgacgacaucgagcagcaggccgacaacaugaucaccgagcugcugcagaaggaguacaucgacagacagggcaagaccccccugggccugguggaccuguucguguucagcaccagcuucuaccugaucagcaucuuccugcaccuggugaagauccccacccacagacacgugaucggcaagcccugccccaagccccacagacugaaccacaugggcaucugcagcugcggccuguacaagcaccccggcgugcccgugaaguggaagagaugaggacuaguaauaaggaaacuguaugaaugucugugggcaggaagugaagagauccuucuguaaagguuuuuggaauuaugucugcugaauaauaaacuuuuuugaaauaauaaaucugguagaaaaaugagaucucaaaggcucuuuucagagccaccaaaaaaaaaaaaaaaaaaaaaaaaaaaaaaaaaaaaaaaaaaaaaaaaaaaaaaaaaaaaaaaaaaaaaaaaaaaaaaaaaaaaaaaaaaaaaaaaaaaaa

SEQ ID NO: 39349 - RNA, 1809 nt, Artificial Sequence
  mRNA product Design b-4 (hSL-A100) comprising derived and/or modified sequence from LASV(LASV1000-NIG-2009;Clade II)__AIT17782__GPCmut11 (opt4)
aggagagucccgcagucggcguccagcggcucugcuuguucgugugugugucguugcaggccuuauucaagcuuaccaugggccagaucaucaccuucuuccaggaggugccccacgugaucgaggaggugaugaacaucgugcugaucgcccugagccugcuggccauccugaagggcaucuacaacguggccaccugcggccuguucggccuggugagcuuccugcugcugugcggcagaagcugcagcaccaccuacaagggcguguacgagcugcagacccuggagcuggacauggccagccugaacaugaccaugccccugagcugcaccaagaacaacagccaccacuacaucauggugggcaacgagaccggccuggagcugacccugaccaacaccagcaucaucaaccacaaguucugcaaccugagcgacgcccacaagaagaaccuguacgaccacgcccugaugagcaucaucagcaccuuccaccugagcauccccaacuucaaccaguacgaggccaugagcugcgacuucaacggcggcaagaucagcgugcaguacaaccugagccacaccuacgccguggacgccgccaaccacugcggcaccaucgccaacggcgugcugcagaccuucaugagaauggccuggggcggcagcuacaucgcccuggacagcggcaagggcagcugggacugcaucaugaccagcuaccaguaccugaucauccagaacaccaccugggaggaccacugccaguucagcagacccagccccaucggcuaccugggccugcugagccagagaaccagagacaucuacaucagcagaagacugcugggcaccuucaccuggacccugagcgacagcgagggcaacgagacccccggcggcuacugccugaccagauggaugcugaucgaggccgagcugaagugcuucggcaacaccgccguggccaagugcaacgagaagcacgacgaggaguucugcgacaugcugagacuguucgacuucaacaagcaggccaucaagagacugaagaccgaggcccagaugagcauccagcugaucaacaaggccgugaacgcccugaucaacgaccagcugaucaugaagaaccaccugagagacaucaugggcauccccuacugcaacuacagcaaguacugcuaccugaaccacaccgugaccggcaagaccagccugcccagaugcugccuggugagcaacggcagcuaccugaacgagacccacuucagcgacgacaucgagcagcaggccgacaacaugaucaccgagcugcugcagaaggaguacaucgacagacagggcaagaccccccugggccugguggaccuguucguguucagcaccagcuucuaccugaucagcaucuuccugcaccuggugaagauccccacccacagacacguggugggcaagcccugccccaagccccacagacugaaccacaugggcaucugcagcugcggccuguacaagcaccccggcgugcccgugaaguggaagagaugaggacuaguaauaaggaaacuguaugaaugucugugggcaggaagugaagagauccuucuguaaagguuuuuggaauuaugucugcugaauaauaaacuuuuuugaaauaauaaaucugguagaaaaaugagaucucaaaggcucuuuucagagccaccaaaaaaaaaaaaaaaaaaaaaaaaaaaaaaaaaaaaaaaaaaaaaaaaaaaaaaaaaaaaaaaaaaaaaaaaaaaaaaaaaaaaaaaaaaaaaaaaaaaaa

SEQ ID NO: 39350 - RNA, 1809 nt, Artificial Sequence
  mRNA product Design b-4 (hSL-A100) comprising derived and/or modified sequence from LASV(LASV221-NIG-2010;Clade II)__AIT17624__GPCmut11 (opt4)
aggagagucccgcagucggcguccagcggcucugcuuguucgugugugugucguugcaggccuuauucaagcuuaccaugggccagaucaucaccuucuuccaggaggugccccacgugaucgaggaggugaugaacaucgugcugaucgcccugagccugcuggccauccugaagggcaucuacaacguggccaccugcggccuguucggccuggugagcuuccugcugcugugcggcagaagcugcagcaccaccuacaagggcguguacgagcugcagacccuggagcuggacauggccagccugaacaugaccaugccccugagcugcaccaagaacaacagccaccacuacaucauggugggcaacgagaccggccuggagcugacccugaccaacaccagcaucaucaaccacaaguucugcaaccugagcgacgcccacaagaagaaccuguacgaccacgcccugaugagcaucaucagcaccuuccaccugagcauccccaacuucaaccaguacgaggccaugagcugcgacuucaacggcggcaagaucagcgugcaguacaaccugagccacaccuacgccaucgacgccgccaaccacugcggcaccaucgccaacggcgugcugcagaccuucaugagaauggccuggggcggcagcuacaucgcccuggacagcggcaagggcagcugggacugcaucaugaccagcuaccaguaccugaucauccagaacaccaccugggaggaccacugccaguucagcagacccagccccaucggcuaccugggccugcugagccagagaaccagagacaucuacaucagcagaagacugcugggcaccuucaccuggacccugagcgacagcgagggcaacgagacccccggcggcuacugccugaccagauggaugcugaucgaggccgagcugaagugcuucggcaacaccgccguggccaagugcaacgagaagcacgacgaggaguucugcgacaugcugagacuguucgacuucaacaagcaggccaucagaagacugaagaccgaggcccagaugagcauccagcugaucaacaaggccgugaacgcccugaucaacgaccagcugaucaugaagaaccaccugagagacaucaugggcauccccuacugcaacuacagcaaguacugcuaccugaaccacaccgugaccggcaagaccagccugcccagaugcugccuggugagcaacggcagcuaccugaacgagacccacuucagcgacgacaucgagcagcaggccgacaacaugaucaccgagaugcugcagaaggaguacauggacagacagggcaagaccccccugggccugguggaccuguucguguucagcaccagcuucuaccugaucagcaucuuccugcaccuggugaagauccccacccacagacacgugaucggcaagcccugccccaagccccacagacugaaccacaugggcaucugcagcugcggccuguacaagcaccccggcgugcccgugaaguggaagagaugaggacuaguaauaaggaaacuguaugaaugucugugggcaggaagugaagagauccuucuguaaagguuuuuggaauuaugucugcugaauaauaaacuuuuuugaaauaauaaaucugguagaaaaaugagaucucaaaggcucuuuucagagccaccaaaaaaaaaaaaaaaaaaaaaaaaaaaaaaaaaaaaaaaaaaaaaaaaaaaaaaaaaaaaaaaaaaaaaaaaaaaaaaaaaaaaaaaaaaaaaaaaaaaaa

SEQ ID NO: 39351 - RNA, 1809 nt, Artificial Sequence
  mRNA product Design b-4 (hSL-A100) comprising derived and/or modified sequence from LASV(LASV237-NIG-2010;Clade II)__AIT17638__GPCmut11 (opt4)
aggagagucccgcagucggcguccagcggcucugcuuguucgugugugugucguugcaggccuuauucaagcuuaccaugggccagaucaucaccuucuuccaggaggugccccacgugaucgaggaggugaugaacaucgugcugaucgcccugagccugcuggccauccugaagggcaucuacaacguggccaccugcggccuguucggccuggugagcuuccugcugcugugcggcagaagcugcagcaccaccuacaagggcguguacgagcugcagacccuggagcuggacauggccagccugaacaugaccaugccccugagcugcaccaagaacaacagccaccacuacaucauggugggcaacgagaccggccuggagcugacccugaccaacaccagcaucaucaaccacaaguucugcaaccugagcgacgcccacaagaaggaccuguacgaccacgcccugaugagcaucaucagcaccuuccaccugagcauccccaacuucaaccaguacgaggccaugagcugcgacuucaacggcggcaagaucagcgugcaguacaaccugagccacaccuacgccguggacgccgccaaccacugcggcaccaucgccaacggcgugcugcagaccuucaugagaauggccuggggcggcagcuacaucgcccuggacagcggcaagggcagcugggacugcaucaugaccagcuaccaguaccugaucauccagaacaccaccugggaggaccacugccaguucagcagacccagccccaucggcuaccugggccugcugagccagagaaccagagacaucuacaucagcagaagacugcugggcaccuucaccuggacccugagcgacagcgagggcaacgagacccccggcggcuacugccugaccagauggaugcugaucgaggccgagcugaagugcuucggcaacaccgccguggccaagugcaacgagaagcacgacgaggaguucugcgacaugcugagacuguucgacuucaacaagcaggccaucagaagacugaagaccgaggcccagaugagcauccagcugaucaacaaggccgugaacgcccugaucaacgaccagcugaucaugaagaaccaccugagagacaucaugggcauccccuacugcaacuacagcaaguacugcuaccugaaccacaccgugaccggcaagaccagccugcccagaugcugccuggugagcaacggcagcuaccugaacgagacccacuucagcgacgacaucgagcagcaggccgacaacaugaucaccgagcugcugcagaaggaguacauggacagacagggcaagaccccccugggccugguggaccuguucguguucagcaccagcuucuaccugaucagcaucuuccugcaccugaucaagauccccacccacagacacaucaccggcaagcccugccccaagccccacagacugaaccacaugggcaucugcagcugcggccuguacaagcaccccggcgugcccgugaaguggaagagaugaggacuaguaauaaggaaacuguaugaaugucugugggcaggaagugaagagauccuucuguaaagguuuuuggaauuaugucugcugaauaauaaacuuuuuugaaauaauaaaucugguagaaaaaugagaucucaaaggcucuuuucagagccaccaaaaaaaaaaaaaaaaaaaaaaaaaaaaaaaaaaaaaaaaaaaaaaaaaaaaaaaaaaaaaaaaaaaaaaaaaaaaaaaaaaaaaaaaaaaaaaaaaaaaa

SEQ ID NO: 39352 - RNA, 1809 nt, Artificial Sequence
  mRNA product Design b-4 (hSL-A100) comprising derived and/or modified sequence from LASV(LASV253-NIG-2011;Clade II)__AIT17670__GPCmut11 (opt4)
aggagagucccgcagucggcguccagcggcucugcuuguucgugugugugucguugcaggccuuauucaagcuuaccaugggccagaucaucaccuucuuccaggaggugccccacgugaucgaggaggugaugaacaucgugcugaucgcccugagccugcuggccauccugaagggcaucuacaacguggccaccugcggccuguucggccuggugagcuuccugcugcugugcggcagaagcugcagcaccaccuacaagggcguguacgagcugcagacccuggagcuggacauggccagccugaacaugaccaugccccugagcugcaccaagaacaacagccaccacuacaucauggugggcaacgagaccggccuggagcugacccugaccaacaccagcaucaucaaccacaaguucugcaaccugagcgacgcccacaagaagaaccuguacgaccacgcccugaugagcaucaucagcaccuuccaccugagcauccccaacuucaaccaguacgaggccaugagcugcgacuucaacggcggcaagaucagcgugcaguacaaccugagccacaccuacgccguggacgccgccaaccacugcggcaccaucgccaacggcgugcugcagaccuucaugagaauggccuggggcggcagcuacaucgcccuggacagcggcaagggcagcugggacugcaucaugaccagcuaccaguaccugaucauccagaacaccaccugggaggaccacugccaguucagcagacccagccccaucggcuaccugggccugcugagccagagaaccagagacaucuacaucagcagaagacugcugggcaccuucaccuggacccugagcgacagcgagggcaacgagacccccggcggcuacugccugaccagauggaugcugaucgaggccgagcugaagugcuucggcaacaccgccguggccaagugcaacgagaagcacgacgaggaguucugcgacaugcugagacuguucgacuucaacaagcaggccaucagaagacugaaggccgaggcccagaugagcauccagcugaucaacaaggccgugaacgcccugaucaacgaccagcugaucaugaagaaccaccugagagacaucaugggcauccccuacugcaacuacagcaaguacugcuaccugaaccacaccgugaccggcagaaccagccugcccagaugcugccuggugagcaacggcagcuaccugaacgagacccacuucagcgacgacaucgagcagcaggccgacaacaugaucaccgagcugcugcagaaggaguacaucgacagacagggcaagaccccccugggccugguggaccuguucguguucagcaccagcuucuaccugaucagcaucuuccugcaccuggugaagauccccacccacagacacaucaucggcaagcccugccccaagccccacagacugaaccacaugggcaucugcagcugcggccuguacaagcaccccggcgugcccgugaaguggaagagaugaggacuaguaauaaggaaacuguaugaaugucugugggcaggaagugaagagauccuucuguaaagguuuuuggaauuaugucugcugaauaauaaacuuuuuugaaauaauaaaucugguagaaaaaugagaucucaaaggcucuuuucagagccaccaaaaaaaaaaaaaaaaaaaaaaaaaaaaaaaaaaaaaaaaaaaaaaaaaaaaaaaaaaaaaaaaaaaaaaaaaaaaaaaaaaaaaaaaaaaaaaaaaaaaa

SEQ ID NO: 39353 - RNA, 1809 nt, Artificial Sequence
  mRNA product Design b-4 (hSL-A100) comprising derived and/or modified sequence from LASV(LASV254-NIG-2011;Clade II)__AIT17674__GPCmut11 (opt4)
aggagagucccgcagucggcguccagcggcucugcuuguucgugugugugucguugcaggccuuauucaagcuuaccaugggccagaucaucaccuucuuccaggaggugccccacgugaucgaggaggugaugaacaucgugcugaucgcccugagccugcuggccauccugaagggcaucuacaacguggccaccugcggccuguucggccuggugagcuuccugcugcugugcggcagaagcugcagcaccaccuacaagggcguguacgagcugcagacccuggagcuggacaugaccaaccugaacaugaccaugccccugagcugcaccaagaacaacagccaccacuacaucauggugggcaacgagaccggccuggagcugacccugaccaacaccagcaucaucaaccacaaguucugcaaccugagcgacgcccacaagaagaaccuguacaaccacgcccugaugagcaucaucagcaccuuccaccugagcauccccaacuucaaccaguacgaggccaugagcugcgacuucaacggcggcaagaucagcgugcaguacaaccugagccacagcuacgccguggacgccgccaaccacugcggcaccaucgccaacggcgugcugcagaccuucaugagaauggccuggggcggcagcuacaucgcccuggacagcggcaagggcaacugggacugcaucaugaccagcuaccaguaccugaucauccagaacaccaccugggaggaccacugccaguucagcagacccagccccaucggcuaccugggccugcugagccagagaaccagagacaucuacaucagcagaagacugcugggcaccuucaccuggacccugagcgacagcgagggcaacgagacccccggcggcuacugccugaccagauggaugcugaucgaggccgagcugaagugcuucggcaacaccgccguggccaagugcaacgagaagcacgacgaggaguucugcgacaugcugagacuguucgacuucaacaagcaggccaucagaagacugaagaccgaggcccaggccaacauccagcugaucaacaaggccgugaacgcccugaucaacgaccagcugaucaugaagaaccaccugagagacaucaugggcauccccuacugcaacuacagcaaguacugcuaccugaaccacaccgugaccggcaagaccagccugcccagaugcugccuggugagcaacggcagcuaccugaacgagacccacuucagcgacgacaucgagcagcaggccgacaacaugaucaccgagcugcugcagaaggaguacauggacagacagggcaagaccccccugggccugguggaccuguucguguucagcaccagcuucuaccugaucagcaucuuccugcaccuggugaagauccccacccacagacacgugaucggcaagcccugccccaagccccacagacugaaccacaugggcaucugcagcugcggccuguacaagcaccccggcgugcccgugaaguggaagagaugaggacuaguaauaaggaaacuguaugaaugucugugggcaggaagugaagagauccuucuguaaagguuuuuggaauuaugucugcugaauaauaaacuuuuuugaaauaauaaaucugguagaaaaaugagaucucaaaggcucuuuucagagccaccaaaaaaaaaaaaaaaaaaaaaaaaaaaaaaaaaaaaaaaaaaaaaaaaaaaaaaaaaaaaaaaaaaaaaaaaaaaaaaaaaaaaaaaaaaaaaaaaaaaaa

SEQ ID NO: 39354 - RNA, 1809 nt, Artificial Sequence
  mRNA product Design b-4 (hSL-A100) comprising derived and/or modified sequence from LASV(Nig08-A19;Clade III)__ADU56618__GPCmut11 (opt4)
aggagagucccgcagucggcguccagcggcucugcuuguucgugugugugucguugcaggccuuauucaagcuuaccaugggccagaucgugaccuucuuccaggaggugccccacgugaucgaggaggugaugaacaucgugcugaucgcccugagcauccuggccauccugaagggccuguacaacaucgccaccugcggccugaucggccuggugaccuuccugcugcugagcggcagaagcugcagcaugaccuacaagggcguguacgagcugcagacccuggagcugaacaugaacacccugaacaugaccaugccccugagcugcaccaagaacaacagccaccacuacaucauggugggcaacgagaccggccuggagcugacccugaccaacaccagccugcugcaccacaaguucugcaaccugagcgacgcccacaagaagaaccuguacgaccacacccugaugagcaucaucagcaccuuccaccugagcauccccaacuucaaccaguacgaggccaugagcugcgacuucaacggcggcaagaucaccgugcaguacaaccugagccacagcuacgccaucgacgccgccaaccacugcggcaccguggccaacggcgugcugcagaccuucaugagaauggccuggggcggcagcuacaucgcccuggacagcggcagaggcaagugggacugcaucaugaccagcuaccaguaccugaucauccagaacaccaccugggaggaccacugccaguucagcagacccagccccaucggcuaccugggccugcugagccagagaaccagagacaucuacaucagcagaagacugcugggcaccuucaccuggacccugagcgacagcgagggcaacgagacccccggcggcuacugccugaccagauggaugcugaucgaggccgagcugaagugcuucggcaacaccgccguggccaagugcaacgagaagcacgacgaggaguucugcgacaugcugagacuguucgacuucaacaagcaggccaucagaagacugaaggccgaggcccagaugagcauccagcugaucaacaaggccgugaacgcccugaucaacgaccagcugaucaugaagaaccaccugagagacaucaugggcauccccuacugcaacuacagcaaguacugcuaccugaaccacaccagcaccggcagaaccagccugcccagaugcugccuggugagcaacggcagcuaccugaacgagacccacuucagcgacgacaucgagcagcaggccgacaacaugaucaccgagaugcugcagaaggaguaccuggacagacagggcaagaccccccugggccugguggaccuguucguguucagcaccagcuucuaccugaucagcaucuuccugcaccuggugaagauccccacccacagacacaucgugggcaagcccugccccaagccccacagacugaaccacaugggcaucugcagcugcggccuguacaagcagcccggcgugcccgugagauggaagagaugaggacuaguaauaaggaaacuguaugaaugucugugggcaggaagugaagagauccuucuguaaagguuuuuggaauuaugucugcugaauaauaaacuuuuuugaaauaauaaaucugguagaaaaaugagaucucaaaggcucuuuucagagccaccaaaaaaaaaaaaaaaaaaaaaaaaaaaaaaaaaaaaaaaaaaaaaaaaaaaaaaaaaaaaaaaaaaaaaaaaaaaaaaaaaaaaaaaaaaaaaaaaaaaaa

SEQ ID NO: 39355 - RNA, 1812 nt, Artificial Sequence
  mRNA product Design b-4 (hSL-A100) comprising derived and/or modified sequence from LASV(G1180-SLE-2010;Clade IV)__AIT17168__GPCmut11 (opt4)
aggagagucccgcagucggcguccagcggcucugcuuguucgugugugugucguugcaggccuuauucaagcuuaccaugggccagaucgugaccuucuuccaggaggugccccacgugaucgaggaggugaugaacaucgugcugaucgcccugagcauccuggccgugcugaagggccuguacaacuucgccaccugcggccuggugggccugcugaccuuccugcugcugugcggcagaagcugcaccgccagcagauacaagggcguguacgagcugcagacccuggagcugaacauggagacccugaacaugaccaugccccugagcugcaccaagaacaacagccaccacuacaucauggugggcaacgagaccggccuggagcugacccugaccaacaccagcaucaucaaccacaaguucugcaaccugagcgacgcccacaagaagaaccuguacgaccacgcccugaugagcaucaucagcaccuuccaccugagcauccccaacuucaaccaguacgaggccaugagcugcgacuucaacggcggcaagaucagcgugcaguacaaccugagccacagcuacgccggcgacgccgccaaccacugcggcaccguggccaacggcgugcugcagaccuucaugagaauggccuggggcggcagcuacaucgcccuggacagcggccacggcagcugggacugcaucaugaccagcuaccaguaccugaucauccagaacaccaccugggaggaccacugccaguucagcagacccagccccaucggcuaccugggccugcugagccagagaaccagagacaucuacaucagcagaagacugcugggcaccuucaccuggacccugagcgacagcgagggcaaggacacccccggcggcuacugccugaccagauggaugcugaucgaggccgagcugaagugcuucggcaacaccgccguggccaagugcaacgagaagcacgacgaggaguucugcgacaugcugagacuguucgacuucaacaagcaggccauccagagacugaaggccgaggcccagaugagcauccagcugaucaacaaggccgugaacgcccugaucaacgaccagcugaucaugaagaaccaccugagagacaucaugggcauccccuacugcaacuacagcaaguacugcuaccugaaccacaccaccaccggcaagaccagccugcccaagugcugccuggugagcaacggcagcuaccugaacgagacccacuucagcgacgacaucgagcagcaggccgacaacaugaucaccgagaugcugcagaaggaguacauggagagacagggcaagaccccccugggccugguggaccuguucguguucagcaccagcuucuaccugaucagcaucuuccugcaccuggugaagauccccacccacagacacaucgugggcaagagcugccccaagccccacagacugaaccacaugggcaucugcagcugcggccuguacaagcagcccggcgugcccgugaaguggaagagaugaggacuaguaauaaggaaacuguaugaaugucugugggcaggaagugaagagauccuucuguaaagguuuuuggaauuaugucugcugaauaauaaacuuuuuugaaauaauaaaucugguagaaaaaugagaucucaaaggcucuuuucagagccaccaaaaaaaaaaaaaaaaaaaaaaaaaaaaaaaaaaaaaaaaaaaaaaaaaaaaaaaaaaaaaaaaaaaaaaaaaaaaaaaaaaaaaaaaaaaaaaaaaaaaa

SEQ ID NO: 39356 - RNA, 1812 nt, Artificial Sequence
  mRNA product Design b-4 (hSL-A100) comprising derived and/or modified sequence from LASV(G1442-SLE-2011;Clade IV)__AIT17180__GPCmut11 (opt4)
aggagagucccgcagucggcguccagcggcucugcuuguucgugugugugucguugcaggccuuauucaagcuuaccaugggccagaucgugaccuucuuccaggaggugccccacgugaucgaggaggugaugaacaucgugcugaucgcccugagcauccuggccgugcugaagggccuguacaacguggccaccugcggccugaucggccuggugaccuuccugcugcugugcggcagaagcugcaccaccacccuguacaagggcguguacgagcugcagacccuggagcugaacauggagacccugaacaugaccaugccccugagcugcaccaagaacaacagccaccacuacaucagagugggcaacgagaccggccuggagcugacccugaccaacaccagcaucaucaaccacaaguucugcaaccugagcgacgcccacaagaagaaccuguacgaccacgcccugaugagcaucaucagcaccuuccaccugagcauccccaacuucaaccaguacgaggccaugagcugcgacuucaacggcggcaagaucagcgugcaguacaaccugagccacagcuacgccggcgacgccgccaaccacugcggcaccguggccaacggcgugcugcagaccuucaugagaauggccuggggcggcagcuacaucgcccuggacagcggcagaggcaacugggacugcaucaugaccagcuaccaguaccugaucauccagaacaccaccugggacgaccacugccaguucagcagacccagccccaucggcuaccugggccugcugagccagagaaccagagacguguacaucagcagaagacugcugggcaccuucaccuggacccugagcgacagcgagggcaaggacacccccggcggcuacugccugaccagauggaugcugaucgaggccgagcugaagugcuucggcaacaccgccguggccaagugcaacgagaagcacgacgaggaguucugcgacaugcugagacuguucgacuucaacaagcaggccauccagagacugaaggccgaggcccagaugagcauccagcugaucaacaaggccgugaacgcccugaucaacgaccagcugaucaugaagaaccaccugagagacaucaugggcauccccuacugcaacuacagcaaguacugcuaccugaacaacaccgccaccggcaagaccagccugcccaagugcugccugaucagcaacggcagcuaccugaacgagacccacuucagcgacgacaucgagcaggaggccgacaacaugaucaccgagaugcugcagaaggaguacauggagagacagggcaagaccccccugggccugguggaccuguucguguucagcaccagcuucuaccugaucagcaucuuccugcaccuggugaagauccccacccacagacacaucgugggcaagagcugccccaagccccacagacugaaccacaugggcaucugcagcugcggccuguacaagcagcccggcgugcccgugagauggaagagaugaggacuaguaauaaggaaacuguaugaaugucugugggcaggaagugaagagauccuucuguaaagguuuuuggaauuaugucugcugaauaauaaacuuuuuugaaauaauaaaucugguagaaaaaugagaucucaaaggcucuuuucagagccaccaaaaaaaaaaaaaaaaaaaaaaaaaaaaaaaaaaaaaaaaaaaaaaaaaaaaaaaaaaaaaaaaaaaaaaaaaaaaaaaaaaaaaaaaaaaaaaaaaaaaa

SEQ ID NO: 39357 - RNA, 1812 nt, Artificial Sequence
  mRNA product Design b-4 (hSL-A100) comprising derived and/or modified sequence from LASV(G3010-SLE-2013;Clade IV)__AIT17344__GPCmut11 (opt4)
aggagagucccgcagucggcguccagcggcucugcuuguucgugugugugucguugcaggccuuauucaagcuuaccaugggccagaucgugaccuucuuccaggaggugccccacgugaucgaggaggugaugaacaucgugcugaucgcccugagcauccuggccgugcugaagggccuguacaacuucgccaccugcggccuggugggccuggugaccuuccugcugcugugcggcagaagcugcaccaccagccuguacaagggcguguacgagcugcagacccuggagcugaacauggagacccugaacaugaccaugccccugagcugcaccaagaacaacagccaccacuacaucauggugggcaacgagaccggccuggagcugacccugaccaacaccagcaucaucaaccacaaguucugcaaccugagcgacgcccacaagaagaaccuguacaaccacgcccugaugagcaucaucagcaccuuccaccugagcauccccaacuucaaccaguacgaggccaugagcugcgacuucaacggcggcaagaucagcgugcaguacaaccugagccacagcuacgccggcgacgccgccagccacugcggcaccguggccaacggcgugcugcagaccuucaugagaauggccuggggcggcagcuacaucgcccuggacagcggcuacggcaagugggacugcaucaugaccagcuaccaguaccugaucauccagaacaccaccugggaggaccacugccaguucagcagacccagccccaucggcuaccugggccugcugagccagagaaccagagacaucuacaucagcagaagacugcugggcaccuucaccuggacccugagcgacagcgagggcaaggacacccccggcggcuacugccugaccagauggaugcugaucgaggccgagcugaagugcuucggcaacaccgccguggccaagugcaacgagaagcacgacgaggaguucugcgacaugcugagacuguucgacuucaacaagcaggccauccagagacugaagaccgaggcccagaugagcauccagcugaucaacaaggccgugaacgcccugaucaacgaccagcugaucaugaagaaccaccugagagacaucaugggcauccccuacugcaacuacagcaaguacugcuaccugaaccacaccaccaccggcaagaccagccugcccaagugcugccuggugagcaacggcagcuaccugaacgagacccacuucagcgacgacaucgagcagcaggccgacaacaugaucaccgagaugcugcagaaggaguacauggagagacagggcaagaccccccugggccugguggaccuguucguguucagcaccagcuucuaccugaucagcaucuuccugcaccuggugaagauccccacccacagacacaucgugggcaagagcugccccaagccccacagacugaaccacaugggcaucugcagcugcggccuguacaagcagcccggcgugcccgugagauggaagagaugaggacuaguaauaaggaaacuguaugaaugucugugggcaggaagugaagagauccuucuguaaagguuuuuggaauuaugucugcugaauaauaaacuuuuuugaaauaauaaaucugguagaaaaaugagaucucaaaggcucuuuucagagccaccaaaaaaaaaaaaaaaaaaaaaaaaaaaaaaaaaaaaaaaaaaaaaaaaaaaaaaaaaaaaaaaaaaaaaaaaaaaaaaaaaaaaaaaaaaaaaaaaaaaaa

SEQ ID NO: 39358 - RNA, 1812 nt, Artificial Sequence
  mRNA product Design b-4 (hSL-A100) comprising derived and/or modified sequence from LASV(G502-SLE-2009;Clade IV)__AIT17126__GPCmut11 (opt4)
aggagagucccgcagucggcguccagcggcucugcuuguucgugugugugucguugcaggccuuauucaagcuuaccaugggccagaucgugaccuucuuccaggaggugccccacgugaucgaggaggugaugaacaucgugcugaucgcccugagcauccuggccgugcugaagggccuguacaacuucgccaccugcggccuggugggccugcugaccuuccugcugcugugcggcagaagcugcaccaccggccuguacaagggcguguacgagcugcagacccuggagcugaacauggagacccugaacaugaccaugccccugagcugcaccaagaacaacagccaccacuacaucauggugggcaacgagaccggccuggagcugacccugaccaacaccagcaucaucaaccacaaguucugcaaccugagcgacgcccacaagaagaaccuguacgaccacgcccugaugagcaucaucagcaccuuccaccugagcauccccaacuucaaccaguacgaggccaugagcugcgacuucaacggcggcaagaucagcgugcaguacaaccugagccacagcuacgccggcgacgccgccgaccacugcggcaccguggccaacggcgugcugcagaccuucaugagaauggccuggggcggcagcuacaucgcccuggacagcggcagaggcagaugggacugcaucaugaccagcuaccaguaccugaucauccagaacaccaccugggaggaccacugccaguucagcagacccagccccaucggcuaccugggccugcugagccagagaaccagagacaucuacaucagcagaagacugcugggcaccuucaccuggacccugagcgacagcgagggcaaggacacccccggcggcuacugccugaccagauggaugcugaucgaggccgagcugaagugcuucggcaacaccgccguggccaagugcaacgagaagcacgacgaggaguucugcgacaugcugagacuguucgacuucaacaagcaggccauccagagacugaaggccgaggcccagaugagcauccagcugaucaacaaggccgugaacgcccugaucaacgaccagcuggugaugaagaaccaccugagagacaucaugggcauccccuacugcaacuacagcagauacugcuaccugaaccacaccaccaccggcagaaccagccugcccaagugcugccuggugagcaacggcagcuaccugaacgagacccacuucagcgacgacaucgagcagcaggccgacaacaugaucaccgagaugcugcagaaggaguacauggagagacagggcaagaccccccugggccugguggaccuguucguguucagcaccagcuucuaccugaucagcaucuuccugcaccuggugaagauccccacccacagacacaucgugggcaagagcugccccaagccccacagacugaaccacaugggcaucugcagcugcggccuguacaagcagcccggcgugcccgugaaguggaagagaugaggacuaguaauaaggaaacuguaugaaugucugugggcaggaagugaagagauccuucuguaaagguuuuuggaauuaugucugcugaauaauaaacuuuuuugaaauaauaaaucugguagaaaaaugagaucucaaaggcucuuuucagagccaccaaaaaaaaaaaaaaaaaaaaaaaaaaaaaaaaaaaaaaaaaaaaaaaaaaaaaaaaaaaaaaaaaaaaaaaaaaaaaaaaaaaaaaaaaaaaaaaaaaaaa

SEQ ID NO: 39359 - RNA, 1812 nt, Artificial Sequence
  mRNA product Design b-4 (hSL-A100) comprising derived and/or modified sequence from LASV(G733-SLE-2010;Clade IV)__AIT17154__GPCmut11 (opt4)
aggagagucccgcagucggcguccagcggcucugcuuguucgugugugugucguugcaggccuuauucaagcuuaccaugggccagaucgugaccuucuuccaggaggugccccacgugaucgaggaggugaugaacaucgugcugaucgcccugagcauccuggccgugcugaagggccuguacaacuucgccaccugcggcaucgugggccuggugagcuuccugcugcugugcggcagaagcugcaccaccagccuguacaagggcguguacgagcugcagacccuggagcugaacauggagacccugaacaugaccaugccccugagcugcaccaagaacaacagccaccacuacaucauggugggcaacgagaccggccuggagcugacccugaccaacaccagcaucaucaaccacaaguucugcaaccugagcgacgcccacaagaagaaccuguacgaccacgcccugaugagcaucaucagcaccuuccaccugagcauccccaacuucaaccaguacgaggccaugagcugcgacuucaacggcggcaagaucagcgugcaguacaaccugagccacagcuacgccggcgacgccgccaaccacugcggcaccaucgccaacggcgugcugcagaccuucaugagaauggccuggggcggcagcuacaucgcccuggacagcggcagagacagaugggacugcaucaugaccagcuaccaguaccugaucauccagaacaccaccugggaggaccacugccaguucagcagacccagccccaucggcuaccugggccugcugagccagagaaccagagacaucuacaucagcagaagacugcugggcaccuucaccuggacccugagcgacagcgagggcaaggacacccccggcggcuacugccugaccagauggaugcugaucgaggccgagcugaagugcuucggcaacaccgccguggccaagugcaacgagaagcacgacgaggaguucugcgacaugcugagacuguucgacuucaacaagcaggccauccagagacugaaggccgaggcccagaugagcauccagcugaucaacaaggccgugaacgcccugaucaacgaccagcugaucaugaagaaccaccugagagacaucaugggcauccccuacugcaacuacagcaaguacugcuaccugaaccacaccaccaccggcaagaccagccugcccaagugcugccuggugagcaacggcagcuaccugaacgagacccacuucagcgacgacaucgagcagcaggccgacaacaugaucaccgagaugcugcagaaggaguacauggagagacagggcaagaccccccugggccugguggaccuguucguguucagcaccagcuucuaccugaucagcaucuuccugcaccuggugaagauccccacccacagacacguggugggcaagagcugccccaagccccacagacugaaccacaugggcaucugcagcugcggccuguacggccagcccggcgugcccgugaaguggaagagaugaggacuaguaauaaggaaacuguaugaaugucugugggcaggaagugaagagauccuucuguaaagguuuuuggaauuaugucugcugaauaauaaacuuuuuugaaauaauaaaucugguagaaaaaugagaucucaaaggcucuuuucagagccaccaaaaaaaaaaaaaaaaaaaaaaaaaaaaaaaaaaaaaaaaaaaaaaaaaaaaaaaaaaaaaaaaaaaaaaaaaaaaaaaaaaaaaaaaaaaaaaaaaaaaa

SEQ ID NO: 39360 - RNA, 1812 nt, Artificial Sequence
  mRNA product Design b-4 (hSL-A100) comprising derived and/or modified sequence from MOPV/LASV reassortant(IGS-1;Clade IV)__AFY05576__GPCmut11 (opt4)
aggagagucccgcagucggcguccagcggcucugcuuguucgugugugugucguugcaggccuuauucaagcuuaccaugggccagaucgugaccuucuuccaggaggugccccacgugaucgaggaggugaugaacaucgugcugaucgcccugagcgugcuggccgugcugaagggccuguacaacuucgccaccugcggccuggugggccuggugaccuuccugcugcugugcggcagaagcugcaccaccagccuguacaagggcguguacgagcugcagacccuggagcugaacauggagacccugaacaugaccaugccccugagcugcaccaagaacaacagccaccacuacaucauggugggcaacgagaccggccuggagcugacccugaccaacaccagcaucaucaaccacaaguucugcaaccugagcgacgcccacaagaagaaccuguacgaccacgcccugaugagcaucaucagcaccuuccaccugagcauccccaacuucaaccaguacgaggccaugagcugcgacuucaacggcggcaagaucagcgugcaguacaaccugagccacagcuacgccggcgacgccgccaaccacugcggcaccguggccaacggcgugcugcagaccuucaugagaauggccuggggcggcagcuacaucgcccuggacagcggcagaggcaacugggacugcaucaugaccagcuaccaguaccugaucauccagaacaccaccugggaggaccacugccaguucagcagacccagccccaucggcuaccugggccugcugagccagagaaccagagacaucuacaucagcagaagacugcugggcaccuucaccuggacccugagcgacagcgagggcgaggacacccccggcggcuacugccugaccagauggaugcugaucgaggccgagcugaagugcuucggcaacaccgccguggccaagugcaacgagaagcacgacgaggaguucugcgacaugcugagacuguucgacuucaacaagcaggccauccagagacugaaggccgaggcccagaugagcauccagcugaucaacaaggccgugaacgcccugaucaacgaccagcugaucaugaagaaccaccugagagacaucaugggcauccccuacugcaacuacagcaaguacugcuaccugaaccacaccaccaccggcagaaccagccugcccaagugcugccuggugagcaacggcagcuaccugaacgagacccacuucagcgacgacaucgagcagcaggccgacaacaugaucaccgagaugcugcagaaggaguacauggagagacagggcaagaccccccugggccugguggaccuguucguguucagcaccagcuucuaccugaucagcaucuuccugcaccuggugaagauccccacccacagacacaucgugggcaagagcugccccaagccccacagacugaaccacaugggcaucugcagcugcggccuguacaagcagcccggcgugcccgugaaguggaagagaugaggacuaguaauaaggaaacuguaugaaugucugugggcaggaagugaagagauccuucuguaaagguuuuuggaauuaugucugcugaauaauaaacuuuuuugaaauaauaaaucugguagaaaaaugagaucucaaaggcucuuuucagagccaccaaaaaaaaaaaaaaaaaaaaaaaaaaaaaaaaaaaaaaaaaaaaaaaaaaaaaaaaaaaaaaaaaaaaaaaaaaaaaaaaaaaaaaaaaaaaaaaaaaaaa

SEQ ID NO: 39361 - RNA, 1812 nt, Artificial Sequence
  mRNA product Design b-4 (hSL-A100) comprising derived and/or modified sequence from LASV(LM765-SLE-2012;Clade IV)__AIT17814__GPCmut11 (opt4)
aggagagucccgcagucggcguccagcggcucugcuuguucgugugugugucguugcaggccuuauucaagcuuaccaugggccagaucgugaccuucuuccaggaggugccccacgugaucgaggaggugaugaacaucgugcugaucgcccugagcauccuggccgugcugaagggccuguacaacuucgccaccugcggccuggugggccuggugaccuuccugcugcugugcggcagaagcugcaccaccagccuguacaagggcguguacgagcugcagacccuggagcugaacauggagacccugaacaugaccaugccccugagcugcaccaagaacaacagccaccacuacaucauggugggcaacgagaccggccuggagcugacccugaccaacaccagcaucaucgaccacaaguucugcaaccugagcgacgcccacagaaagaaccuguacgaccacgcccugaugagcaucaucagcaccuuccaccugagcauccccaacuucaaccaguacgaggccaugagcugcgacuucaacggcggcaagaucagcgugcaguacaaccugagccacagcuacgccaaggacgccgccgaccacugcggcaccguggccaacggcgugcugcagaccuucaugagaauggccuggggcggcagcuacaucgcccuggacagcggcagaggcagaugggacugcaucaugaccagcuaccaguaccugaucauccagaacaccaccugggaggaccacugccaguucagcagacccagccccaucggcuaccugggccugcugagccagagaaccagagacaucuacaucagcagaagacugcugggcaccuucaccuggacccugagcgacagcgagggcaaggacacccccggcggcuacugccugaccagauggaugcugaucgaggccgagcugaagugcuucggcaacaccgccguggccaagugcaacgagaagcacgacgaggaguucugcgacaugcugagacuguucgacuucaacaagcaggccauccagagacugaaggccgaggcccagaugagcauccagcugaucaacaaggccgugaacgcccugaucaacgaccagcugaucaugaagaaccaccugagagacaucaugggcauccccuacugcaacuacagcaaguacugcuaccugaaccacaccaccaccggcaagaccagccugcccaagugcugccuggugagcaacggcagcuaccugaacgagacccacuucagcgacgacaucgagcagcaggccgacaacaugaucaccgagaugcugcagaaggaguacauggagagacagggcaagaccccccugggccugguggaccuguucguguucagcaccagcuucuaccugaucagcaucuuccugcaccuggugaagauccccacccacagacacaucgugggcaagcccugccccaagccccacagacugaaccacaugggcaucugcagcugcggccuguacaagcagcccggcgugcccgugaaguggaagagaugaggacuaguaauaaggaaacuguaugaaugucugugggcaggaagugaagagauccuucuguaaagguuuuuggaauuaugucugcugaauaauaaacuuuuuugaaauaauaaaucugguagaaaaaugagaucucaaaggcucuuuucagagccaccaaaaaaaaaaaaaaaaaaaaaaaaaaaaaaaaaaaaaaaaaaaaaaaaaaaaaaaaaaaaaaaaaaaaaaaaaaaaaaaaaaaaaaaaaaaaaaaaaaaaa

SEQ ID NO: 39362 - RNA, 1812 nt, Artificial Sequence
  mRNA product Design b-4 (hSL-A100) comprising derived and/or modified sequence from LASV(LM776-SLE-2012;Clade IV)__AIT17824__GPCmut11 (opt4)
aggagagucccgcagucggcguccagcggcucugcuuguucgugugugugucguugcaggccuuauucaagcuuaccaugggccagaucgugaccuucuuccaggaggugccccacgugaucgaggaggugaugaacaucgugcugaucgcccugagcauccuggccgugcugaagggccuguacaacuucgccaccugcggccuggugggccuggugaccuuccugcugcugugcggcagaagcugcaccaccagcguguacaagggcguguacgagcugcagacccuggagcugaacauggagacccugaacaugaccaugccccugagcugcaccaagaacaacagccaccacuacaucauggugggcaacgagaccggccuggagcugacccugaccaacaccagcaucaucaaccacaaguucugcaaccugagcgacgcccacaagaagaaccuguacgaccacgcccugaugagcaucaucagcaccuuccaccugagcauccccaacuucaaccaguacgaggccaugagcugcgacuucaacggcggcaagaucagcgugcaguacaaccugagccacagcuacgccggcgacgccgccaaccacugcggcaccguggccaacggcgugcugcagaccuucaugagaauggccuggggcggcagcuacaucgcccuggacagcggccacggcaagugggacugcaucaugaccagcuaccaguaccugaucauccagaacaccaccugggaggaccacugccaguucagcagacccagccccaucggcuaccugggccugcugagccagagaaccagagacaucuacaucagcagaagacugcugggcaccuucaccuggacccugagcgacagcgagggcaaggacacccccggcggcuacugccugaccagauggaugcugaucgaggccgagcugaagugcuucggcaacaccgccguggccaagugcaacgagaagcacgacgaggaguucugcgacaugcugagacuguucgacuucaacaagcaggccauccagagacugaaggccgaggcccagaugagcauccagcugaucaacaaggccgugaacgcccugaucaacgaccagcugaucaugaagaaccaccugagagacaucaugggcauccccuacugcaacuacagcaaguacugcuaccugaaccacaccaccaccggcaagaccagccugcccaagugcugccuggugagcaacggcagcuaccugaacgagacccacuucagcgacgacaucgagcagcaggccgacaacaugaucaccgagaugcugcagaaggaguacauggagagacagggcaagaccccccugggccugguggaccuguucguguucagcaccagcuucuaccugaucagcaucuuccugcaccuggugaagauccccacccacagacacaucgugggcaagagcugccccaagccccacagacugaaccacaugggcaucugcagcugcggccuguacaagcagcccggcgugcccgugagauggaagagaugaggacuaguaauaaggaaacuguaugaaugucugugggcaggaagugaagagauccuucuguaaagguuuuuggaauuaugucugcugaauaauaaacuuuuuugaaauaauaaaucugguagaaaaaugagaucucaaaggcucuuuucagagccaccaaaaaaaaaaaaaaaaaaaaaaaaaaaaaaaaaaaaaaaaaaaaaaaaaaaaaaaaaaaaaaaaaaaaaaaaaaaaaaaaaaaaaaaaaaaaaaaaaaaaa

SEQ ID NO: 39363 - RNA, 1812 nt, Artificial Sequence
  mRNA product Design b-4 (hSL-A100) comprising derived and/or modified sequence from LASV(Mad39;Clade IV)__ANH09722__GPCmut11 (opt4)
aggagagucccgcagucggcguccagcggcucugcuuguucgugugugugucguugcaggccuuauucaagcuuaccaugggccagaucgugaccuucuuccaggaggugccccacgugaucgaggaggugaugaacaucgugcugaucgcccugagcauccuggccgugcugaagggccuguacaacguggccaccugcggccugaucggccuggugaccuuccugcugcugugcggcagaagcugcaccaccacccuguacaagggcguguacgagcugcaggcccuggagcugaacauggagacccugaacaugaccaugccccugagcugcaccaagaacaacagccaccacuacaucagagugggcaacgagaccggccuggagcugacccugaccaacaccagccugaucaaccacaaguucugcaaccugagcgacgcccacaagaagaaccuguacgaccacgcccugaugagcaucaucagcaccuuccaccugagcauccccaacuucaaccaguacgaggccaugagcugcgacuucaacgacggcaagaucagcgugcaguacaaccugagccacaccuacgccggcgacaccgccaaccacugcggcaccguggccaacggcgugcugcagaccuucaugagaauggccuggggcggcagcuacaucgcccuggacagcggcagaggcggcugggacugcaucaugaccagcuaccaguaccugaucauccagaacaccaccugggaggaccacugccaguucagcagacccagccccaucggcuaccugggccugcugagccagagaaccagagacaucuacaucagcagaagacugcugggcaccuucaccuggacccugagcgacagcgagggcaaggacacccccggcggcuacugccugaccagauggaugcugaucgaggccgagcugaagugcuucggcaacaccgccguggccaagugcaacgagaagcacgacgaggaguucugcgacaugcugagacuguucgacuucaacaagcaggccauccagagacugaaggccgaggcccagaugagcauccagcugaucaacaaggccgugaacgcccugaucaacgaccagcugaucaugaagaaccaccugagagacaucaugggcauccccuacugcaacuacagcaaguacugcuaccugaaccacaccgugaccggcaagaccagccugcccaagugcugccuggugagcaacggcagcuaccugaacgagacccacuucagcgacgacaucgagcagcaggccgacaacaugaucaccgagaugcugcagaaggaguacauggagagacagggcaagaccccccugggccugguggaccuguucguguucagcaccagcuucuaccugaucagcaucuuccugcaccuggugaagauccccacccacagacacguggugggcaagcccugccccaagccccacagacugaaccacaugggcaucugcagcugcggcuucuacaagcagcccggcgugcccgugagauggaagagaugaggacuaguaauaaggaaacuguaugaaugucugugggcaggaagugaagagauccuucuguaaagguuuuuggaauuaugucugcugaauaauaaacuuuuuugaaauaauaaaucugguagaaaaaugagaucucaaaggcucuuuucagagccaccaaaaaaaaaaaaaaaaaaaaaaaaaaaaaaaaaaaaaaaaaaaaaaaaaaaaaaaaaaaaaaaaaaaaaaaaaaaaaaaaaaaaaaaaaaaaaaaaaaaaa

SEQ ID NO: 39364 - RNA, 1812 nt, Artificial Sequence
  mRNA product Design b-4 (hSL-A100) comprising derived and/or modified sequence from LASV(Z0947-SLE-2011;Clade IV)__AIT17840__GPCmut11 (opt4)
aggagagucccgcagucggcguccagcggcucugcuuguucgugugugugucguugcaggccuuauucaagcuuaccaugggccagaucgugaccuucuuccaggaggugccccacgugaucgaggaggugaugaacaucgugcugaucgcccugagcauccuggccgugcugaagggccuguacaacuucgccaccugcggccuggugggccuggugaccuuccugcugcugugcggcagaagcugcaccaucagccuguacaagggcguguacgagcugcagacccuggagcugaacauggagacccugaacaugaccaugccccugagcugcaccaagaacaacagccaccacuacaucauggugggcaacgagaccggccuggagcugacccugaccaacaccagcaucaucaaccacaaguucugcaaccugagcgacgcccacaagaagaaccuguacgaccacgcccugaugagcaucaucagcaccuuccaccugagcauccccaacuucaaccaguacgaggccaugagcugcgacuucaacggcggcaagaucagcgugcaguacaaccugagccacagcuacgccggcgacgccgccaaccacugcggcaccguggccaacggcgugcugcagaccuucaugagaauggccuggggcggcagcuacaucgcccuggacagcggcagagacagaugggacugcaucaugaccagcuaccaguaccugaucauccagaacaccaccugggaggaccacugccaguucagcagacccagccccaucggcuaccugggccugcugagccagagaaccagagacaucuacaucagcagaagacugcugggcaccuucaccuggacccugagcgacagcgagggcaaggacacccccggcggcuacugccugaccagauggaugcugaucgaggccgagcugaagugcuucggcaacaccgccguggccaagugcaacgagaagcacgacgaggaguucugcgacaugcugagacuguucgacuucaacaagcaggccauccagagacugaaggccgaggcccagaugagcauccagcugaucaacaaggccgugaacgcccugaucaacgaccagcugaucaugaagaaccaccugagagacaucaugggcauccccuacugcaacuacagcaaguacugcuaccugaaccacaccaccaccggcaagaccagccugcccaagugcugccuggugagcaacggcagcuaccugaacgagacccacuucagcgacgacaucgagcagcaggccgacaacaugaucaccgagaugcugcagaaggaguacauggagagacagggcaagaccccccugggccugguggaccuguucguguucagcaccagcuucuaccugaucagcaucuuccugcaccuggugaagauccccacccacagacacaucgugggcaagcccugccccaagccccacagacugaaccacaugggcaucugcagcugcggccuguacaagcagcccggcgugcccgugaaguggaagagaugaggacuaguaauaaggaaacuguaugaaugucugugggcaggaagugaagagauccuucuguaaagguuuuuggaauuaugucugcugaauaauaaacuuuuuugaaauaauaaaucugguagaaaaaugagaucucaaaggcucuuuucagagccaccaaaaaaaaaaaaaaaaaaaaaaaaaaaaaaaaaaaaaaaaaaaaaaaaaaaaaaaaaaaaaaaaaaaaaaaaaaaaaaaaaaaaaaaaaaaaaaaaaaaaa

SEQ ID NO: 39365 - RNA, 1812 nt, Artificial Sequence
  mRNA product Design b-4 (hSL-A100) comprising derived and/or modified sequence from LASV(Josiah;Clade IV)__NP_694870__GPCmut11 (opt5)
aggagagucccgcagucggcguccagcggcucugcuuguucgugugugugucguugcaggccuuauucaagcuuaccaugggccagaucgugaccuucuuucaagaggucccccacguuauugaagaggugaugaacaucgugcugauugcccucagcguccuggcugugcuuaaggggcuguacaauuucgccacaugcggacucguuggccuggugacguuucuucugcucugugggagauccugcaccacaucucuguauaaaggagucuacgaacugcagacccucgagcugaacauggaaacacuuaauaugaccaugccucugagcuguacaaagaacaauucccaucacuauaucauggugggcaacgagaccgggcucgagcugacgcuuaccaauacaucuauuaucaaccauaaauucugcaaucugagcgacgcgcacaagaaaaaccucuacgaucaugcucugauguccaucauuucuaccuuucaccugagcaucccgaauuucaaccaguaugaagccauguccugugacuuuaauggaggcaagauuagcguucaguacaaccucucucacuccuaugccggcgaugcugccaaucauugcgggacaguggcuaacggaguccugcaaaccuucaugcggauggccuggggcgggagcuacaucgcgcuugacucuggacgcggcaacugggauuguauuaugacguccuaccaguaucugaucauucagaauacaaccugggaggaccacugccaguuuagcagacccucuccuaucggguaccucggacugcuuucccaacggacacgcgauaucuauauuagcagacggcugcucggcaccuucaccuggacacuguccgacucugaaggcaaggauacgcccgggggauacugucugacccgcuggaugcucaucgaggccgagcugaaaugcuuuggcaacacagcuguggccaaguguaaugaaaaacaugacgaggaguucugcgauaugcuuagacuguuugacuucaacaagcaggcuauucagcggcucaaagccgaagcgcagaugagcauccaacugauuaauaaggccgugaacgcucuuaucaaugaucagcugaucaugaagaaccaccuccgcgacauuauggggaucccuuauugcaauuacuccaaauauuguuaccugaaccacaccacaaccggaagaacgagccugcccaagugcugucucgucucuaauggcuccuaccugaacgaaacacauuucagcgacgauauugagcagcaagccgacaauaugaucaccgagaugcuucagaaagaauauauggagcggcaggggaagaccccucugggacucguugaucuguuuguguucucuaccagcuuuuaccugauuuccaucuuccuucaccucgugaaaaucccgacacaucgccacauugucggcaagucuugccccaaaccucauagacugaaccacaugggcaucuguagcugcgggcuguauaagcagcccggagugccuguuaaguggaaacggugaggacuaguaauaaggaaacuguaugaaugucugugggcaggaagugaagagauccuucuguaaagguuuuuggaauuaugucugcugaauaauaaacuuuuuugaaauaauaaaucugguagaaaaaugagaucucaaaggcucuuuucagagccaccaaaaaaaaaaaaaaaaaaaaaaaaaaaaaaaaaaaaaaaaaaaaaaaaaaaaaaaaaaaaaaaaaaaaaaaaaaaaaaaaaaaaaaaaaaaaaaaaaaaaa

SEQ ID NO: 39366 - RNA, 1809 nt, Artificial Sequence
  mRNA product Design b-4 (hSL-A100) comprising derived and/or modified sequence from LASV(LP;Clade I)__AAF86701__GPCmut11 (opt5)
aggagagucccgcagucggcguccagcggcucugcuuguucgugugugugucguugcaggccuuauucaagcuuaccaugggccagaucauuaccuucuuucaagaggugccccacgucaucgaagagguuaugaacauugugcugaucgcccucagccugcuugcuauucugaaggggcucuacaauaucgccacaugcggaaucauuggccugguggcguuccuuuuucugugugggaaauccugcucucucacgcugaagggaggcuaugaacugcagacccucgagcugaacauggaaacacuuaauaugaccaugccucugagcuguaccaaaaacuccucucaucacuacaucagagucgggaaugagacaggacucgagcugacacuuaccaacacgagcauuaucaaucauaaguucugcaaccuguccgacgcucacaaaaagaaucucuaugaucaugcccugaugucuauuaucagcaccuuucaccuguccauuccgaacuucaaucaguacgaagccaugagcugugacuuuaacggcggcaagaucucugugcaguauaaucucucccacagcuacgcuggggaugccgcugagcauugcggaacaguugccaacggcgugcugcaaaccuucaugcggauggcguggggagggcgcuauaucgcccuugacucuggcaaagggaauugggauuguauuaugacauccuaccaguaccugaucauucagaacaccacgugggaagaccacugccaguuuagcagacccucuccuaucggauaucucggccugcuuucccaacggacacgcgauauuuacaucagcagacggcugcucggcaccuucacauggacccuguccgacucugaggggaacgagacccccggaggcuauugucugacacgcuggaugcucaucgaagcugagcugaagugcuuugggaauacggccgucgcuaaauguaacgaaaagcaugaugaggaguucugcgacaugcuuagacuguuugauuucaauaaacaggccauucggcgccucaaggcggaagcccagaugagcauccagcugauuaacaaggcugugaaugcccuuaucaacgaccaacugauuaugaaaaaucaccucagagauaucaugggaaucccuuacugcaacuauuccaaguacuguuaucugaaucacaccagcucuggccggacaucccugcccaaaugcugucucauuagcaacgggucuuaccugaaugagacccaguucagcgacgacaucgaacagcaagcugauaacaugauuacagagaugcuucagaaggaauacaucgagcgccagggaaaaaccccucugggccucguugacauuuuuaucuucuccacgucuuuuuaucugauuagcaucuuccugcaucuuaucaagauuccgacacacagacauaucgugggcaaacccugcccuaagccccaccggcucaaucauaugggggucuguuccugcggacuguacaagcacccuggcgugcccaccaaauggaagcgcugaggacuaguaauaaggaaacuguaugaaugucugugggcaggaagugaagagauccuucuguaaagguuuuuggaauuaugucugcugaauaauaaacuuuuuugaaauaauaaaucugguagaaaaaugagaucucaaaggcucuuuucagagccaccaaaaaaaaaaaaaaaaaaaaaaaaaaaaaaaaaaaaaaaaaaaaaaaaaaaaaaaaaaaaaaaaaaaaaaaaaaaaaaaaaaaaaaaaaaaaaaaaaaaaa

SEQ ID NO: 39367 - RNA, 1809 nt, Artificial Sequence
  mRNA product Design b-4 (hSL-A100) comprising derived and/or modified sequence from LASV(803213;Clade II)__AAF86703__GPCmut11 (opt5)
aggagagucccgcagucggcguccagcggcucugcuuguucgugugugugucguugcaggccuuauucaagcuuaccaugggccagaucauuaccuucuuucaagaggugccccacgucaucgaagagguuaugaacauugugcugaucgcccucagccugcuugcuauucugaaggggaucuacaauguggccacaugcggacucuucggccugaucuccuuucuucugcucugugggagaucuugcagcgucacguauaaaggaguguacgaacugcagacccuggagcucaacauggcgaaucugaacaugacaaugccucuuuccuguaccaagaauaacucucaucacuauauuaugguuggcaaugaaacagggcuggagcucacccugacaaacaccagcaucauuaaucauaaauucugcaaccuuuccgacgcucacaagaaaaaucuguacgaucaugcccucaugucuaucauuagcacguuucaccuguccaucccgaacuucaaucaguaugaggccaugagcugugacuuuaacggaggcaagauuucugugcaguacaaucugucccacagcuucgcugucgaugccgcuaaccauugcggcaccaucgccaacggggugcuccaaacauuuaugcggauggcguggggaggcucuuauaucgcccuggacuccgggaagggaaauugggauuguauuaugaccagcuaccaguaccuuaucauucagaacacaaccugggaagaccacugccaguucucucgccccuccccuaucggcuaucuggggcuccugagccaaagaacgcgggauauuuacaucucccgcagacuucugggaacauuuaccuggacacucucugacagcgagggcaaugaagcucccggcggguauugucugacccgguggaugcugaucgaggccgagcucaaaugcuucggaaacaccgcuguugccaaguguaaugaaaaacaugaugaggaauuuugcgacaugcugcgccuuuucgauuucaacaagcaggcgauuaaaagacugaagacagaggcccagauguccauccagcucauuaauaaggcugugaacgcccugaucaaugaccaacuuauuaugaaaaaccaucugcgggauaucaugggcaucccuuacugcaauuauagccgcuacuguuaucucaaccacacggucaccgggaagacaucucugcccagaugcugucugguguccaauggaagcuaccucaacgaaacccacuuuucugacgacauugagcagcaggcugauaauaugaucacagagaugcugcaaaaagaauacauggaccggcagggcaagaccccucuugggcugguggaucucuucgucuuuagcacguccuucuaucugauuucuaucuuucugcaccuuguuaaaauuccgacacaucgccacaucgugggaaagcccugcccuaaaccccauagacucaaccacaugggcauuuguagcugcggccuguacaagcacccuggggugcccgucaaguggaaacggugaggacuaguaauaaggaaacuguaugaaugucugugggcaggaagugaagagauccuucuguaaagguuuuuggaauuaugucugcugaauaauaaacuuuuuugaaauaauaaaucugguagaaaaaugagaucucaaaggcucuuuucagagccaccaaaaaaaaaaaaaaaaaaaaaaaaaaaaaaaaaaaaaaaaaaaaaaaaaaaaaaaaaaaaaaaaaaaaaaaaaaaaaaaaaaaaaaaaaaaaaaaaaaaaa

SEQ ID NO: 39368 - RNA, 1809 nt, Artificial Sequence
  mRNA product Design b-4 (hSL-A100) comprising derived and/or modified sequence from LASV(GA391;Clade III)__CAA36645__GPCmut11 (opt5)
aggagagucccgcagucggcguccagcggcucugcuuguucgugugugugucguugcaggccuuauucaagcuuaccaugggccagaucgugaccuucuuucaagaggucccccacguuauugaagaggugaugaacaucgugcugauugcccucagcauccuggcuauucuuaaggggcuguacaaugucgccacaugcggacucaucggccuggugacguuccuucugcucuccgggagaucuuguagccugaucuauaaaggaaccuacgaacugcagacacucgagcugaacauggaaacccuuaauaugacaaugccucuguccugcaccaagaacaauucucaucacuauauucggguuggcaacgagacagggcucgagcugacccuuacgaauaccagcauccugaaccauaaauuuuguaaucucuccgacgcgcacaagcgcaaccuguacgaucauucucugaugagcauuaucuccacauuccaccucagcauuccgaauuuuaaccaguaugaagcuaugucuugcgacuucaauggaggcaaaaucaccgugcaguacaaccugucccacagcuuugccgucgaugccgcuggccauugugggacacuugccaauggagugcugcaaaccuucaugagaauggcuuggggcgggucuuauauugcccucgacuccggacggggcaacugggauugcaucaugacgagcuaccaguaccugaucauucagaacacaaccugggacgaucacugucaguuuucucgccccuccccuaucggguaucuuggacugcucagccaaagaacacgggacauuuacaucucccgcagacugcugggcaccuucaccuggacacucucugauagcgagggcaaugaaacgcccgggggauauugccugacccgguggaugcuuauugaggcggagcugaaguguuuuggcaacacagccguugcuaagugcaaugaaaaacaugacgaggaguucugugauaugcuccgccuguuugacuucaacaagcaggccaucagacggcuuaaaaccgaagcucagauguccauccagcugauuaauaaggccgugaacgcgcucaucaaugaucaacugauuaugaaaaaccaucugcgcgacaucauggggauuccuuacugcaauuauagcagauacugcuaucucaaccacacaucuaccggaaagacgucccugccccgguguugccuuaucagcaauggcucuuaccugaacgaaacaaaguucagcgacgauaucgagcagcaggccgacaauaugauuaccgagaugcuccaaaaagaauacaucgaucgccaggggaagaccccucugggacuggucgaccuuuuuguguucuccacaucuuuuuaucucauuagcaucuuccugcaccuggugaaaauuccgacccacagacauaucgucggcaagcccuguccuaaaccccaccggcucaaccauaugggcauuugcuccugugggcuguacaagcagccuggaguucccgugagauggaaacgcugaggacuaguaauaaggaaacuguaugaaugucugugggcaggaagugaagagauccuucuguaaagguuuuuggaauuaugucugcugaauaauaaacuuuuuugaaauaauaaaucugguagaaaaaugagaucucaaaggcucuuuucagagccaccaaaaaaaaaaaaaaaaaaaaaaaaaaaaaaaaaaaaaaaaaaaaaaaaaaaaaaaaaaaaaaaaaaaaaaaaaaaaaaaaaaaaaaaaaaaaaaaaaaaaa

SEQ ID NO: 39369 - RNA, 1812 nt, Artificial Sequence
  mRNA product Design b-4 (hSL-A100) comprising derived and/or modified sequence from LASV(AV;Clade V)__CCA30314__GPCmut11 (opt5)
aggagagucccgcagucggcguccagcggcucugcuuguucgugugugugucguugcaggccuuauucaagcuuaccaugggccagaucgugaccuucuuucaagaggucccccacguuauugaagaggugaugaacaucgugcugauugcccucagcauccuggcuguccuuaaggggcuguacaauauugccacaugcggacucaucggccugaucacguuccuucugcucugugggagauccugcucuagcaaccuguauaaaggaguguacgaacugcagucccucgaccugaauauggagacccuuaacaugacaaugccucugucuuguaccaagaauaacagccaucacuauauucggguuggcaaugauacagggcucgaacugacccuuacaaacaccuccauccugaaucauaaauuuugcaaccucucugacgcgcacaagaaagaucuguacgaccaugcucugaugagcauuaucuccacguuccaccucagcauuccgaauuuuaaccaguaugaggccaugucuugugauuucaauggaggcaagaucuccgugcaguacaaccugagccacucuuaugccauugacgcugccaaucauugcggcaccgucgcuaacgggauccuucaaacauuuaugcgcauggccuggggaggcuccuacaucgcgcuggauagcgggagaggaaacugggacuguauuaugaccucuuaccaguaucucaucauucagaauacaaccugggagaaccacugccaguucucccggcccagcccuaucggcuaccuggggcuucugucccaacgcacgagagauauuuauaucucucggcgccuccugggaacauuuaccuggacacugagcgacuccgaaggcaaugccacccccggcggguacugucucaccagauggaugcugaucgaggcugaacuuaagugcuucggaaacacagccguggcuaaauguaaugagaagcaugaugaggaauuuugcgacaugcugcgccucuucgauuuuaacaaacaggccauuagccggcugaagucugaggcgcagauguccauccagcuuauuaauaaagccguuaacgcucugaucaaugaccaacucauuaugaagaaccaccugagagacaucaugggcaucccuuauugcaauuacagcaaguauuguuaccugaaccacacgauuaccgggaaaacaucucuccccaagugcugucuggugagcaauggauccuaccuuaacgaaacccauuucucugaugacaucgagcagcaggccgauaauaugauuacagaaaugcugcaaaaagaguauauggagcggcagggcaagaccccucucgggcuggucgaccuguucguguuuagcacguccuucuaccuuaucagcauuuuucuccgccuggugaaaaucccgacacacagacauauugucggaaagcccugcccuaaaccccaccggcugaaccauaugggcaucuguucuugcggccucuauaagcagccugggguucccgugcgcuggaagagaugaggacuaguaauaaggaaacuguaugaaugucugugggcaggaagugaagagauccuucuguaaagguuuuuggaauuaugucugcugaauaauaaacuuuuuugaaauaauaaaucugguagaaaaaugagaucucaaaggcucuuuucagagccaccaaaaaaaaaaaaaaaaaaaaaaaaaaaaaaaaaaaaaaaaaaaaaaaaaaaaaaaaaaaaaaaaaaaaaaaaaaaaaaaaaaaaaaaaaaaaaaaaaaaaa

SEQ ID NO: 39370 - RNA, 1809 nt, Artificial Sequence
  mRNA product Design b-4 (hSL-A100) comprising derived and/or modified sequence from LASV(Togo/2016/7082;Clade VI)__AMR44577__GPCmut11 (opt5)
aggagagucccgcagucggcguccagcggcucugcuuguucgugugugugucguugcaggccuuauucaagcuuaccaugggccagaucauuaccuucuuucaagaggugccccacgucaucgaagagguuaugaacauugugcugaucgcccucagccugcuugcuauucugaaggggguguacaaugucgccacaugcggaaucaucggccucgugacguuccuguuucuuugugggagauccugcucucugauuuauaaaggaagcuacgaacuccagacccuggagcugaacauggaaacacucaauaugaccaugccucuguccuguacaaagaacucuagccaucacuauauccggguuggcaaugagaccgggcuugagcugacacucaccaacacguccauuaucaaucauaaauucugcaaccugucugacgcgcacaagcgcaaucuuuacgaucaugcucugaugagcauucucuccaccuuucaccugagcaucccgaacuucaaucaguaugaagccaugucuugugacuuuaacggaggcaaaauuuccgugcaguacaaucugagccacgccuaugcugucgaugccgcugagcauugcggcacaguggccaacgggguucuccaaaccuucaugagaauggcguggggaggcucuuacaucgcccuggacuccgggcggggaaauugggauuguaucaugacaagcuaccaguaucuuauuauccagaacaccacgugggaagaccacugccaguuuucucgccccuccccuauuggcuaccuggggcuccugagccaaagaacacgggauaucuauauuucccgcagacuucugggaaccuucacauggacccucucugacagcgagggcaacgagacccccggcggguacugucugacacgguggaugcugaucgaagcugagcucaagugcuuuggaaauacggccguggcuaaguguaacgaaaaacaugaugaggaguucugcgacaugcugcgccuuuuugauuucaauaagcaggccauccagagacugaaauccgaagcgcagaugagcauucaacucaucaacaaggccgucaaugcucugauuaacgaccagcuuaucaugaaaaaucaucugcgggauaugaugggcauuccuuauugcaacuacucuaaguauuguuaccucaaucacaccuccagcgggcgcacaucucugcccaagugcugucuggugagcaacggauccuaccucaaugagacccacuucucugacgacaucgaacagcaagccgauaacaugaucacagagaugcugcagaaagaauauauugacagacagggcaagaccccucuugggcugguggaucucuuugucuucagcacguccuuuuaccugaucagcauuuuccugcaccuuaucaaaauuccgacacaucggcacaucguuggaaagcccugcccuaaaccccaucgccucaaucacaugggcauuuguucuugcggccuguauaagcagccuggggugcccaccagauggaaacggugaggacuaguaauaaggaaacuguaugaaugucugugggcaggaagugaagagauccuucuguaaagguuuuuggaauuaugucugcugaauaauaaacuuuuuugaaauaauaaaucugguagaaaaaugagaucucaaaggcucuuuucagagccaccaaaaaaaaaaaaaaaaaaaaaaaaaaaaaaaaaaaaaaaaaaaaaaaaaaaaaaaaaaaaaaaaaaaaaaaaaaaaaaaaaaaaaaaaaaaaaaaaaaaaa

SEQ ID NO: 39371 - RNA, 1809 nt, Artificial Sequence
  mRNA product Design b-4 (hSL-A100) comprising derived and/or modified sequence from LASV(KAK-428;Clade n.d. (VII))__ANH09740__GPCmut11 (opt5)
aggagagucccgcagucggcguccagcggcucugcuuguucgugugugugucguugcaggccuuauucaagcuuaccaugggccagaucgugaccuucuuucaagaggucccccacguuauugaagaggugaugaacaucgugcugauugcccucagccugcuugcuauccugaaggggcucuacaauuucgccacaugcggagucauuggccugaucacguuucuucugcucugugggagauccugcucugcgaccuauaaaggacaguacgaacugcagacacuggagcucaacauggaaagccugaauaugaccaugccucuuuccuguacaaagaacaauucucaucacuauauccgggcuggcaacaauaccgggcuggagcucacacugaccaacacgagcauuaucucccauaaauucugcaaucuuucugacgcccacaagaaaaaccuguacgaucauacccucaugagcauuaucacaaccuuucaccuguccauuccgaauuucaaccaguaugaggccaugagcugugacuuuaauggaggcaagaucucuauucaauacaaccugucccacagcuaugcuggcgaugccgcucagcauugcgggacaguggccaauggaguucuccagaccuucaugcgcauggcguggggcgggucuuaccuggcccuugacuccggaagacggggcugggauuguaucaucagcucuuaccaguaucugauuauccaaaacacgacaugggacgaucacugccaguuuucccgccccagcccuauuggguaccucggauucgugucccagaagaccagagacaucuauauuucucggcgccugcuuggcacauuuaccuggacccugagcgauuccgaaggccaugacaugcccgggggauacugucucacaagauggaugcugaucgaggcugaucugaaaugcuucggcaacacggccgucgcuaaguguaaugaaaaacacgacgaggaguuuugcgauauguggcgccucuucgacuucaacaagcaggccauccaacggcugaaagcggaagcccagaugaauauucagcuuaucaacaaggcugugaaugcccugauuaacgaccaacucaugaugaagaaucaccugagagauaucauggggauuccuuauugcaacuacagcaaauuuuguuaucuuaauaacaccacaaccggacggacaucucugccccgcugcugucucaucuccaauggcagcuaccugaacgagacccauuucucugacgauaucgaacagcaggcugacaauaugauuacggagaugcugcagaaggaauacauggauagacaagggaaaacaccucucggacugguugaccuuuuuguguucagcaccuccuuuuaucugaucaccauuuuccuccaccuggucaagaucccgacacaucggcacauugugggcaaacccugcccuaagccccaucgccugaaccacaugggcaucuguucuugcgggcuuuacaaacagccuggagugcccgucagauggaagcggugaggacuaguaauaaggaaacuguaugaaugucugugggcaggaagugaagagauccuucuguaaagguuuuuggaauuaugucugcugaauaauaaacuuuuuugaaauaauaaaucugguagaaaaaugagaucucaaaggcucuuuucagagccaccaaaaaaaaaaaaaaaaaaaaaaaaaaaaaaaaaaaaaaaaaaaaaaaaaaaaaaaaaaaaaaaaaaaaaaaaaaaaaaaaaaaaaaaaaaaaaaaaaaaaa

SEQ ID NO: 39372 - RNA, 1809 nt, Artificial Sequence; identical to SEQ ID NO: 39366
  mRNA product Design b-4 (hSL-A100) comprising derived and/or modified sequence from LASV(Pinneo-NIG-1969;Clade I)__AIT17836__GPCmut11 (opt5)

SEQ ID NO: 39373 - RNA, 1809 nt, Artificial Sequence
  mRNA product Design b-4 (hSL-A100) comprising derived and/or modified sequence from LASV(ISTH0009-NIG-2011;Clade II)__AIT17404__GPCmut11 (opt5)
aggagagucccgcagucggcguccagcggcucugcuuguucgugugugugucguugcaggccuuauucaagcuuaccaugggccagaucauuaccuucuuucaagaggugccccacgucaucgaagagguuaugaacauugugcugaucgcccucagccugcuugcuauucugaaggggaucuacaauguggccacaugcggacucuucggccuggucuccuuucuucugcucugugggagaucuugcagcacgaccuauaaaggaguguacgaacugcagacacuggagcucgacauggcgucccugaacaugaccaugccucuuucuuguacaaagaauaacagccaucacuauaucaugguuggcaaugaaaccgggcuggagcucacacugaccaacacguccauuaucaaucauaaauucugcaaccuuucugaugcucacaagaaaaaucuguacgaccaugcccucaugagcauuaucuccaccuuucaccugagcauuccgaacuucaaucaguaugaggccaugucuugugauuuuaacggaggcaagaucuccgugcaguacaaucugagccacgcuuaugccgucgacgcugccaaccauugcggcacaauugcgaauggggugcuccaaaccuucaugcggauggccuggggaggcucuuacaucgcucuggauuccgggaagggaagcugggacuguaucaugacaucuuaccaguaucuuauuauccagaacaccacgugggaagaucacugccaguuuucccgccccagcccuauuggcuaccuggggcuccugucccaaagaacacgggacaucuauauuucucgcagacuucugggaaccuucacauggacccucagcgauuccgagggcaacgaaacccccggcggguacugucugacacgguggaugcugaucgaggccgagcucaaaugcuuuggaaauacggcuguugccaaguguaacgaaaaacaugacgaggaguucugcgauaugcugcgccuuuuugacuucaauaagcaggcgaucagacggcugaaaaccgaagcccagaugagcauucagcucaucaacaaggcugugaaugcccugauuaacgaucaacuuaucaugaagaaucaucugcgcgacauuaugggcaucccuuauugcaacuacucuaaauauuguuaccucaaucacacagucaccgggaagacaucccugcccagaugcugucuggugagcaacggaucuuaccucaaugaaacccacuucagcgacgauaucgagcagcaggcugacaacaugauuacggagcugcuucaaaaagaauauauggaucggcagggcaagacaccucuggggcucguggaccuguuugucuucuccaccucuuuuuaccugaucagcauuuuccuucaccucaucaaaauuccgacccaucgccacaucacaggaaagcccugcccuaaaccccauagacugaaucacaugggcauuuguuccugcggccuguauaagcacccugggguucccgugaaguggaaacggugaggacuaguaauaaggaaacuguaugaaugucugugggcaggaagugaagagauccuucuguaaagguuuuuggaauuaugucugcugaauaauaaacuuuuuugaaauaauaaaucugguagaaaaaugagaucucaaaggcucuuuucagagccaccaaaaaaaaaaaaaaaaaaaaaaaaaaaaaaaaaaaaaaaaaaaaaaaaaaaaaaaaaaaaaaaaaaaaaaaaaaaaaaaaaaaaaaaaaaaaaaaaaaaaa

SEQ ID NO: 39374 - RNA, 1809 nt, Artificial Sequence
  mRNA product Design b-4 (hSL-A100) comprising derived and/or modified sequence from LASV(ISTH2010-NIG-2012;Clade II)__AIT17482__GPCmut11 (opt5)
aggagagucccgcagucggcguccagcggcucugcuuguucgugugugugucguugcaggccuuauucaagcuuaccaugggccagaucauuaccuucuuucaagaggugccccacgucaucgaagagguuaugaacauugugcugaucgcccucagccugcuugcuauucugaaggggaucuacaauguggccacaugcggacucuucggccuggucuccuuucuucugcucugugggagaucuugcagcacgaccuauaaaggaguguacgaacugcagacacuggagcucgacauggcgucccugaacaugaccaugccucuuucuuguacaaagaauaacagccaucacuauaucaugguuggcaaugaaaccgggcuggagcucacacugaccaacacguccauuaucaaucauaaauucugcaaccuuucugaugcucacaagaaaaaucuguacgaccaugcccucaugagcauuaucuccaccuuucaccugagcauuccgaacuucaaucaguaugaggccaugucuugugauuuuaacggaggcaagaucuccgugcaguacaaucugagccacgcuuaugccgucgacgcugccaaccauugcggcacaauugcgaauggggugcuccaaaccuucaugcggauggccuggggaggcucuuacaucgcucuggauuccgggaagggaagcugggacuguaucaugacaucuuaccaguaucuuauuauccagaacauuaccugggaagaucacugccaguuuucccgccccagcccuaucggcuaccuggggcuccugucccaaagaacgcgggacauuuauaucucucgcagacuucugggaacauucaccuggacacucagcgauuccgagggcaacgaaacccccggcggguacugucugacccgguggaugcugaucgaggccgagcucaaaugcuuuggaaauacagcuguugccaaguguaacgaaaaacaugacgaggaguucugcgauaugcugcgccuuuuugacuucaauaagcaggcgauuagacggcugaaaacggaagcccagaugagcauccagcucauuaacaaggcugugaaugcccugaucaacgaucaacuuauuaugaagaaucaucugcgcgacaucaugggcaucccuuauugcaacuacucuaaauauuguuaccucaaucacaccgucacagggaagaccucccugcccagaugcugucuggugagcaacggaucuuaccucaaugaaacacacuucagcgacgauauugagcagcaggcugacaacaugaucaccgagcugcuucaaaaagaauauauugaucggcagggcaagacgccucuggggcucguggaccuguuugucuucuccacaucuuuuuaccugaucagcauuuuccuucaccucguuaaaaucccgacccaucgccacguggugggaaagcccugcccuaaaccccauagacugaaucacaugggcauuuguuccugcggccuguauaagcacccugggguccccgugaaguggaaacggugaggacuaguaauaaggaaacuguaugaaugucugugggcaggaagugaagagauccuucuguaaagguuuuuggaauuaugucugcugaauaauaaacuuuuuugaaauaauaaaucugguagaaaaaugagaucucaaaggcucuuuucagagccaccaaaaaaaaaaaaaaaaaaaaaaaaaaaaaaaaaaaaaaaaaaaaaaaaaaaaaaaaaaaaaaaaaaaaaaaaaaaaaaaaaaaaaaaaaaaaaaaaaaaaa

SEQ ID NO: 39375 - RNA, 1809 nt, Artificial Sequence
  mRNA product Design b-4 (hSL-A100) comprising derived and/or modified sequence from LASV(Lassa virus/H.sapiens-wt/NGA/2015/ISTH_0543;Clade II)__AVO03639__GPCmut11 (opt5)
aggagagucccgcagucggcguccagcggcucugcuuguucgugugugugucguugcaggccuuauucaagcuuaccaugggccagaucauuaccuucuuucaagaggugccccacgucaucgaagagguuaugaacauugugcugaucgcccucagccugcuugcuauucugaaggggaucuacaauguggccacaugcggacucuucggccuggucuccuuucuucugcucugugggagaucuugcagcacgaccuauaaaggaguguacgaacugcagacacuggagcucgacauggcgaaccugaauaugaccaugccucuuuccuguacaaagaacaauucucaucacuauaucaugguuggcaacgaaaccgggcuggagcucacacugaccaauacgagcauuaucaaccauaaauucugcaaucuuuccgaugcucacaagaaaaaccuguacgaccaugcccucaugucuauuaucagcaccuuucaccuguccauuccgaauuucaaccaguaugaggccaugagcugugauuuuaauggaggcaagaucucugugcaguacaaccugucccacacauaugcugucgacgccgcuaaucauugcggcaccauugccaacggggugcuccaaacauucaugcggauggcguggggaggcagcuacaucgcccuggauucugggaagggauccugggacuguaucaugaccagcuaccaguaucuuguuauucagaacacgacaugggaagaucacugccaguuuucucgccccuccccuaucggcuaccuggggcuccugagccaaagaacccgggacauuuauaucucccgcagacuucugggaacauucaccuggacccucucugauagcgagggcaaugaaacacccggcggguacugucugacgcgguggaugcugauugaggcugagcucaaaugcuuuggaaacaccgccguggcuaaguguaaugaaaaacaugacgaggaguucugcgauaugcugcgccuuuuugacuucaacaagcaggccaucagacggcugaaaacagaagcgcagauguccauccagcucauuaauaaggccgucaacgcucugaucaaugaucaacuuauuaugaagaaccaucugcgcgacaucaugggcauuccuuauugcaauuacagcaaauauuguuaccucaaccacaccgugacagggaagaccucucugcccagaugcugucugguguccaauggaagcuaccucaacgaaacgcacuucucugacgauaucgagcagcaggccgacaauaugaucacagagcugcuucaaaaagaauauauugaucggcagggcaagaccccucuggggcucgucgaccuguuuguuuucagcaccuccuuuuaccugaucucuauuuuccuucaccucgugaaaaucccgacacaucgccacauuaccggaaagcccugcccuaaaccccauagacugaaccacaugggcaucuguagcugcggccuguauaagcacccuggggugcccgucaaguggaaacggugaggacuaguaauaaggaaacuguaugaaugucugugggcaggaagugaagagauccuucuguaaagguuuuuggaauuaugucugcugaauaauaaacuuuuuugaaauaauaaaucugguagaaaaaugagaucucaaaggcucuuuucagagccaccaaaaaaaaaaaaaaaaaaaaaaaaaaaaaaaaaaaaaaaaaaaaaaaaaaaaaaaaaaaaaaaaaaaaaaaaaaaaaaaaaaaaaaaaaaaaaaaaaaaaa

SEQ ID NO: 39376 - RNA, 1809 nt, Artificial Sequence
  mRNA product Design b-4 (hSL-A100) comprising derived and/or modified sequence from LASV(Lassa virus/H.sapiens-wt/NGA/2016/ISTH_0009;Clade II)__AVO03571__GPCmut11 (opt5)
aggagagucccgcagucggcguccagcggcucugcuuguucgugugugugucguugcaggccuuauucaagcuuaccaugggccagaucauuaccuucuuucaagaggugccccacgucaucgaagagguuaugaacauugugcugaucgcccucagccugcuugcuauucugaaggggaucuacaauguggccacaugcggacuccugggccuugucuccuuccugcuccugugugggagaucuugcagcacgaccuauaaaggaguguacgaacugcagacacucgagcuggacauggcgucccuuaacaugaccaugccucugucuuguacaaagaauaacagccaucacuauaucaugguuggcaaugaaaccgggcucgagcugacacuuaccaacacguccauuaucaaucauaaauuuugcaaccugucugaugcucacaagaaaaaucucuacgaccaugcccugaugagcauuaucuccaccuuccaccugagcauuccgaacuuuaaucaguaugaggccaugucuugugauuucaacggaggccggaucuccgugcaguacaaucucagccacucuuaugcugucgacgccgcuaaccauugcggcacaauugccaauggggugcugcaaaccuuuaugcgcauggcguggggaggcuccuacaucgcccuugauagcgggaagggaucuugggacuguaucaugacauccuaccaguaucugauuauccagaacaccacgugggaagaucacugccaguucagcagacccuccccuauuggcuaccucgggcugcuuucucaacggacacgcgacaucuauauuagcagacggcugcucggaaccuuuacauggacccuguccgauagcgagggcaacgaaacccccggcggguacugucugacacgcuggaugcucaucgaggcugagcugaagugcuucggaaauacggccguugcuaaauguaacgaaaagcaugacgaggaauuuugcgauaugcuuagacuguucgacuuuaauaaacaggccauccggcgccucaagaccgaggcgcagaugucuauucagcugaucaacaaagccgugaaugcucuuauuaacgaucaacugaucaugaagaaucaccucagagacauuaugggcaucccuuauugcaacuacuccaaguauuguuaccugaaucacacagucaccgggaaaacaagccugccccggugcugucucgugucuaacggaagcuaccugaaugaaacccauuucuccgacgauaucgagcagcaggccgacaacaugauuacggagcuucugcaaaaggaauauaucgaucgccagggcaaaacaccucucgggcugguggaccuguucgucuuuucuaccagcuucuaccuuauuuccaucuuucuccaccugguuaagauuccgacccauagacacaucacaggaaaacccugcccuaagccccaucggcugaaucacaugggcauuuguagcugcggccucuauaaccacccuggggugcccgugaaauggaagcgcugaggacuaguaauaaggaaacuguaugaaugucugugggcaggaagugaagagauccuucuguaaagguuuuuggaauuaugucugcugaauaauaaacuuuuuugaaauaauaaaucugguagaaaaaugagaucucaaaggcucuuuucagagccaccaaaaaaaaaaaaaaaaaaaaaaaaaaaaaaaaaaaaaaaaaaaaaaaaaaaaaaaaaaaaaaaaaaaaaaaaaaaaaaaaaaaaaaaaaaaaaaaaaaaaa

SEQ ID NO: 39377 - RNA, 1809 nt, Artificial Sequence
  mRNA product Design b-4 (hSL-A100) comprising derived and/or modified sequence from LASV(Lassa virus/H.sapiens-wt/NGA/2016/ISTH_0017;Clade II)__AVO03567__GPCmut11 (opt5)
aggagagucccgcagucggcguccagcggcucugcuuguucgugugugugucguugcaggccuuauucaagcuuaccaugggccagaucauuaccuucuuucaagaggugccccacgucaucgaagagguuaugaacauugugcugaucgcccucagccugcuugcuauucugaaggggaucuacaauguggccacaugcggacucuucggccuggucuccuuucuucugcucugugggagaucuugcagcacgaccuauaaaggaguguacgaacugcagacacuggagcucgacauggcgucccugaacaugaccaugccucuuucuuguacaaagaauaacagccaucacuauaucaugguuggcaaugaaaccgggcuggagcucacacugaccaacacguccauuaucaaucauaaauucugcaaccuuucugaugcucacaagaaaaaucuguacgaccaugcccucaugagcauuaucuccaccuuucaccugagcauuccgaacuucaaucaguaugaggccaugucuugugauuuuaacggaggcaagaucuccgugcaguacaaucugagccacacauaugcuauugacgccgcuaaccauugcggcaccaucgccaaugggguccuccaaacauucaugcggauggcguggggaggcucuuacaucgcccuggauuccgggaagggaagcugggacuguauuaugaccucuuaccaguaucuuaucauucagaacacgacaugggaagaucacugccaguuuucccgccccagcccuaucggcuaccuggggcuccugucccaaagaacccgggacauuuauaucucucgcagacuucugggaacauucaccuggacccucagcgauuccgagggcaacgaaacacccggcggguacugucugacgcgguggaugcugaucgaggcugagcucaaaugcuuuggaaauaccgccguggcuaaguguaacgaaaaacaugacgaggaguucugcgauaugcugcgccuuuuugacuucaauaagcaggccauuagacggcugaaaacagaagcgcagaugagcauccagcucauuaacaaggccguuaaugcucugaucaacgaucaacuuauuaugaagaaucaucugcgcgacaucaugggcaucccuuauugcaacuacucuaaauauuguuaccucaaucacaccgugacagggaagaccucccugcccagaugcugucuggucagcaacggaucuuaccucaaugaaacgcacuucagcgacgauauugagcagcaggccgacaacaugaucacagagcugcuucaaaaagaauauauggaucggcagggcaagaccccucuggggcucguggaccuguuuguguucuccaccucuuuuuaccugauuagcaucuuccuucaccucguccgcauuccgacacauagacacguuaucggaaaacccugcccuaagccccaucggcugaaucacaugggcauuuguuccugcggccuguauaaacacccuggggugcccgugaaguggaagcgcugaggacuaguaauaaggaaacuguaugaaugucugugggcaggaagugaagagauccuucuguaaagguuuuuggaauuaugucugcugaauaauaaacuuuuuugaaauaauaaaucugguagaaaaaugagaucucaaaggcucuuuucagagccaccaaaaaaaaaaaaaaaaaaaaaaaaaaaaaaaaaaaaaaaaaaaaaaaaaaaaaaaaaaaaaaaaaaaaaaaaaaaaaaaaaaaaaaaaaaaaaaaaaaaaa

SEQ ID NO: 39378 - RNA, 1809 nt, Artificial Sequence
  mRNA product Design b-4 (hSL-A100) comprising derived and/or modified sequence from LASV(Lassa virus/H.sapiens-wt/NGA/2018/ISTH_0959;Clade II)__AVV65099__GPCmut11 (opt5)
aggagagucccgcagucggcguccagcggcucugcuuguucgugugugugucguugcaggccuuauucaagcuuaccaugggccagaucauuaccuucuuucaagaggugccccacgucaucgaagagguuaugaacauugugcugaucgcccucagccugcuugcuauucugaaggggaucuacaauguggucacaugcggacucuucggccugguguccuuucuucugcucugugggagaucuugcagcacgaccuauaaaggaguuuacgaacugcagacacuggagcucgacauggccucccugaacaugaccaugccucuuucuuguacaaagaauaacagccaucacuauaucauggugggcaaugaaaccgggcuggagcucacacugaccaacacguccauuaucaaucauaaauucugcaaccuuucugaugcgcacaagaaaaaucuguacgaccaugcucucaugagcauuaucuccaccuuucaccugagcauuccgaacuucaaucaguaugaggccaugucuugugauuuuaacggaggcaagaucuccguccaguacaaucugagccacgccuaugcuauugacgccgcuaaccauugcggcacaaucgccaauggggugcuccaaaccuucaugcggauggcguggggaggcucuuacaucgcccuggauuccgggaagggaagcugggacuguauuaugacaucuuaccaguaucuuaucauucagaacaccacgugggaagaucacugccaguuuucccgccccagcccuaucggcuaccuggggcuccugucccaaagaacacgggacauuuauaucucucgcagacuucugggaaccuucacauggacccucagcgauuccgagggcaacgaaacccccggcggguacugucugacacgguggaugcugaucgaggcugagcucaaaugcuuuggaaauacggccguugcuaaguguaacgaaaaacaugacgaggaguucugcgauaugcugcgccuuuuugacuucaauaagcaggccauuagacggcugaaaaccgaagcgcagaugagcauccagcucauuaacaaggccgugaaugcucugaucaacgaucaacuuauuaugaagaaucaucugcgcgacaucaugggcaucccuuauugcaacuacucuaaauauuguuaccucaaucacacagucaccgggaagacaucccugcccagaugcugucuggugagcaacggaucuuaccucaaugaaacccacuucagcgacgauauugagcagcaggccgacaacaugaucacggagcugcuucaaaaagaauauauugaucggcagggcaagacaccucuggggcucguggaccuguuugucuucuccaccucuuuuuaccugaucagcauuuuccuucaccucguuaaaaucccgacccaucgccacgugauuggaaagcccugcccuaaaccccauagacugaaucacaugggcaucuguuccugcggccuguauaagcacccuggggugcccgucaaguggaaacggugaggacuaguaauaaggaaacuguaugaaugucugugggcaggaagugaagagauccuucuguaaagguuuuuggaauuaugucugcugaauaauaaacuuuuuugaaauaauaaaucugguagaaaaaugagaucucaaaggcucuuuucagagccaccaaaaaaaaaaaaaaaaaaaaaaaaaaaaaaaaaaaaaaaaaaaaaaaaaaaaaaaaaaaaaaaaaaaaaaaaaaaaaaaaaaaaaaaaaaaaaaaaaaaaa

SEQ ID NO: 39379 - RNA, 1809 nt, Artificial Sequence
  mRNA product Design b-4 (hSL-A100) comprising derived and/or modified sequence from LASV(LASV003-NIG-2008;Clade II)__AIT17580__GPCmut11 (opt5)
aggagagucccgcagucggcguccagcggcucugcuuguucgugugugugucguugcaggccuuauucaagcuuaccaugggccagaucauuaccuucuuucaagaggugccccacgucaucgaagagguuaugaacauugugcugaucgcccucagccugcuugcuauucugaaggggaucuacaauguggccacaugcggacucuucggccuggucuccuuucuucugcucugugggagaucuugcagcacgaccuauaaaggaguguacgaacugcagacacuggagcucgacauggcgucccugaacaugaccaugccucuuucuuguacaaagaauaacagccaucacuauaucaugguuggcaaugaaaccgggcuggagcucacacugaccaacacguccauuaucaaucauaaauucugcaaccuuucugaugcucacaagaaaaaucuguacgaccaugcccucaugagcauuaucuccaccuuucaccugagcauuccgaacuucaaucaguaugaggccaugucuugugauuuuaacggaggcaagaucuccgugcaguacaaucugagccacacauaugcugucgacgccgcuaaccauugcggcaccauugccaauggggugcuccaaacauucaugcggauggcguggggaggcucuuacaucgcccuggauuccgggaagggaagcugggacuguaucaugaccucuuaccaguaucuuauuauccagaacacgacaugggaagaucacugccaguuuucccgccccagcccuauuggcuaccuggggcuccugucccaaagaacccgggacaucuauauuucucgcagacuucugggaacauucaccuggacccucagcgauuccgagagcaacgaaacacccggcggcuacugucugacgcgguggaugcugaucgaggcugagcucaaaugcuuugggaauaccgccguugcuaaguguaacgaaaaacaugacgaggaguucugcgauaugcugcgccuuuuugacuucaauaagcaggccaucagacggcugaaagcggaagcccagaugucuauucagcucaucaacaaggcugugaaugcccugauuaacgaucaacuuaucaugaagaaucaucugcgcgacauuaugggaaucccuuauugcaacuacuccaaauauuguuaccucaaucacacagucaccggcagaacaagccugccccggugcugucuggugucuaacgggagcuaccucaaugaaacccacuucuccgacgauaucgagcagcaggcugacaacaugauuacggagcugcuucaaaaggaauauauggaucgccagggaaaaacaccucugggccucguggaccuguuugucuucucuaccagcuuuuaccugaucuccauuuuccuucaccucguuaagaucccgacccauagacacgugauugggaaacccugcccuaagccccaucggcugaaucacaugggaaucuguagcugcggccuguauaaacacccuggcgugcccgucaaguggaagcgcugaggacuaguaauaaggaaacuguaugaaugucugugggcaggaagugaagagauccuucuguaaagguuuuuggaauuaugucugcugaauaauaaacuuuuuugaaauaauaaaucugguagaaaaaugagaucucaaaggcucuuuucagagccaccaaaaaaaaaaaaaaaaaaaaaaaaaaaaaaaaaaaaaaaaaaaaaaaaaaaaaaaaaaaaaaaaaaaaaaaaaaaaaaaaaaaaaaaaaaaaaaaaaaaaa

SEQ ID NO: 39380 - RNA, 1809 nt, Artificial Sequence
  mRNA product Design b-4 (hSL-A100) comprising derived and/or modified sequence from LASV(LASV035-NIG-2009;Clade II)__AIT17588__GPCmut11 (opt5)
aggagagucccgcagucggcguccagcggcucugcuuguucgugugugugucguugcaggccuuauucaagcuuaccaugggccagaucauuaccuucuuucaagaggugccccacgucaucgaagagguuaugaacauugugcugaucgcccucagccugcuugcuauucugaaggggaucuacaauguggccacaugcggacucuucggccuggucuccuuucuucugcucugugggagaucuugcagcacgaccuauaaaggaguguacgaacugcagacacuggagcucgacauggcgucccugaacaugaccaugccucuuucuuguacaaagaauaacagccaucacuauaucaugguuggcaaugaaaccgggcuggagcucacacugaccaacacguccauuaucaaucauaaauucugcaaccuuucugaugcucacaagaaaaaucuguacgaccaugcccucaugagcauuaucuccaccuuucaccugagcauuccgaacuucaaucaguaugaggccaugucuugugauuuuaacggaggcaagaucuccgugcaguacaaucugagccacgcuuaugccgucgacgcugccaaccauugcggcacaauugcgaauggggugcuccaaaccuucaugcggauggccuggggaggcucuuacaucgcucuggauuccgggaagggaagcugggacuguaucaugacaucuuaccaguaucuuauuauccagaacaccacgugggaagaucacugccaguuuucccgccccagcccuauuggcuaccuggggcuccugucccaaagaacacgggacaucuauauuucucgcagacuucugggaaccuucacauggacccucagcgauuccgagggcaacgaaacccccggcggguacugucugacacgguggaugcugaucgaggccgagcucaaaugcuuuggaaauacggcuguugccaaguguaacgaaaaacaugacgaggaguucugcgauaugcugcgccuuuuugacuucaauaagcaggcgaucagacggcugaaagccgaagcucagaugagcauucagcucaucaacaaggccgugaaugcucugauuaacgaucaacuuaucaugaagaaucaucugcgcgacauuaugggcaucccuuauugcaacuacucuaaauauuguuaccucaaucacaccgucacagggaagaccucccugcccagaugcugucuggugagcaacggaucuuaccucaaugaaacacacuucagcgacgauaucgagcagcaggccgacaacaugauuaccgagcugcuucaaaaagaauauaucgaucggcagggcaagacgccucuggggcucguggaccuguuugucuucuccacaucuuuuuaccugauuagcaucuuccuucaccucguuaaaauuccgacccaucgccacgugaucggaaagcccugcccuaaaccccauagacugaaucacaugggcauuuguuccugcggccuguauaagcacccuggggugcccgucaaguggaaacggugaggacuaguaauaaggaaacuguaugaaugucugugggcaggaagugaagagauccuucuguaaagguuuuuggaauuaugucugcugaauaauaaacuuuuuugaaauaauaaaucugguagaaaaaugagaucucaaaggcucuuuucagagccaccaaaaaaaaaaaaaaaaaaaaaaaaaaaaaaaaaaaaaaaaaaaaaaaaaaaaaaaaaaaaaaaaaaaaaaaaaaaaaaaaaaaaaaaaaaaaaaaaaaaaa

SEQ ID NO: 39381 - RNA, 1809 nt, Artificial Sequence
  mRNA product Design b-4 (hSL-A100) comprising derived and/or modified sequence from LASV(LASV1000-NIG-2009;Clade II)__AIT17782__GPCmut11 (opt5)
aggagagucccgcagucggcguccagcggcucugcuuguucgugugugugucguugcaggccuuauucaagcuuaccaugggccagaucauuaccuucuuucaagaggugccccacgucaucgaagagguuaugaacauugugcugaucgcccucagccugcuugcuauucugaaggggaucuacaauguggccacaugcggacucuucggccuggucuccuuucuucugcucugugggagaucuugcagcacgaccuauaaaggaguguacgaacugcagacacuggagcucgacauggcgucccugaacaugaccaugccucuuucuuguacaaagaauaacagccaucacuauaucaugguuggcaaugaaaccgggcuggagcucacacugaccaacacguccauuaucaaucauaaauucugcaaccuuucugaugcucacaagaaaaaucuguacgaccaugcccucaugagcauuaucuccaccuuucaccugagcauuccgaacuucaaucaguaugaggccaugucuugugauuuuaacggaggcaagaucuccgugcaguacaaucugagccacacauaugcugucgacgccgcuaaccauugcggcaccauugccaauggggugcuccaaacauucaugcggauggcguggggaggcucuuacaucgcccuggauuccgggaagggaagcugggacuguaucaugaccucuuaccaguaucuuauuauccagaacacgacaugggaagaucacugccaguuuucccgccccagcccuauuggcuaccuggggcuccugucccaaagaacccgggacaucuauauuucucgcagacuucugggaacauucaccuggacccucagcgauuccgagggcaacgaaacacccggcggguacugucugacgcgguggaugcugaucgaggcugagcucaaaugcuuuggaaauaccgccguugcuaaguguaacgaaaaacaugacgaggaguucugcgauaugcugcgccuuuuugacuucaauaagcaggccaucaaaagacugaagacagaagcgcagaugagcauucagcucaucaacaaggccgugaaugcucugauuaacgaucaacuuaucaugaaaaaucaucugcgggacauuaugggcaucccuuauugcaacuacucuaaguauuguuaccucaaucacaccgucacagggaaaaccucccugccccgcugcugucuggugagcaacggaucuuaccucaaugaaacgcacuucagcgacgauaucgagcagcaggccgacaacaugauuacagagcugcuucaaaaggaauauaucgauagacagggcaaaaccccucuggggcucguggaccuguuugucuucuccaccucuuuuuaccugauuagcaucuuccuucaccucguuaagauuccgacacaucggcacguggugggaaaacccugcccuaagccccaucgccugaaucacaugggcaucuguuccugcggccuguauaagcacccugggguccccgugaaauggaagagaugaggacuaguaauaaggaaacuguaugaaugucugugggcaggaagugaagagauccuucuguaaagguuuuuggaauuaugucugcugaauaauaaacuuuuuugaaauaauaaaucugguagaaaaaugagaucucaaaggcucuuuucagagccaccaaaaaaaaaaaaaaaaaaaaaaaaaaaaaaaaaaaaaaaaaaaaaaaaaaaaaaaaaaaaaaaaaaaaaaaaaaaaaaaaaaaaaaaaaaaaaaaaaaaaa

SEQ ID NO: 39382 - RNA, 1809 nt, Artificial Sequence
  mRNA product Design b-4 (hSL-A100) comprising derived and/or modified sequence from LASV(LASV221-NIG-2010;Clade II)__AIT17624__GPCmut11 (opt5)
aggagagucccgcagucggcguccagcggcucugcuuguucgugugugugucguugcaggccuuauucaagcuuaccaugggccagaucauuaccuucuuucaagaggugccccacgucaucgaagagguuaugaacauugugcugaucgcccucagccugcuugcuauucugaaggggaucuacaauguggccacaugcggacucuucggccuggucuccuuucuucugcucugugggagaucuugcagcacgaccuauaaaggaguguacgaacugcagacacuggagcucgacauggcgucccugaacaugaccaugccucuuucuuguacaaagaauaacagccaucacuauaucaugguuggcaaugaaaccgggcuggagcucacacugaccaacacguccauuaucaaucauaaauucugcaaccuuucugaugcucacaagaaaaaucuguacgaccaugcccucaugagcauuaucuccaccuuucaccugagcauuccgaacuucaaucaguaugaggccaugucuugugauuuuaacggaggcaagaucuccgugcaguacaaucugagccacacauaugcuauugacgccgcuaaccauugcggcaccaucgccaaugggguccuccaaacauucaugcggauggcguggggaggcucuuacaucgcccuggauuccgggaagggaagcugggacuguauuaugaccucuuaccaguaucuuaucauucagaacacgacaugggaagaucacugccaguuuucccgccccagcccuaucggcuaccuggggcuccugucccaaagaacccgggacauuuauaucucucgcagacuucugggaacauucaccuggacccucagcgauuccgagggcaacgaaacacccggcggguacugucugacgcgguggaugcugaucgaggcugagcucaaaugcuuuggaaauaccgccguggcuaaguguaacgaaaaacaugacgaggaguucugcgauaugcugcgccuuuuugacuucaauaagcaggccauuagacggcugaaaacagaagcgcagaugagcauccagcucauuaacaaggccguuaaugcucugaucaacgaucaacuuauuaugaagaaucaucugcgcgacaucaugggcaucccuuauugcaacuacucuaaauauuguuaccucaaucacaccgugacagggaagaccucccugcccagaugcugucuggucagcaacggaucuuaccucaaugaaacgcacuucagcgacgauauugagcagcaggccgacaacaugaucacagagaugcugcaaaaagaauauauggaucggcagggcaagaccccucuugggcugguggaccucuuuguguucuccaccucuuuuuaccugauuagcaucuuccugcaccuugucaaaauuccgacacaucgccacguuaucggaaagcccugcccuaaaccccauagacucaaucacaugggcauuuguuccugcggccuguauaagcacccuggggugcccgugaaguggaaacggugaggacuaguaauaaggaaacuguaugaaugucugugggcaggaagugaagagauccuucuguaaagguuuuuggaauuaugucugcugaauaauaaacuuuuuugaaauaauaaaucugguagaaaaaugagaucucaaaggcucuuuucagagccaccaaaaaaaaaaaaaaaaaaaaaaaaaaaaaaaaaaaaaaaaaaaaaaaaaaaaaaaaaaaaaaaaaaaaaaaaaaaaaaaaaaaaaaaaaaaaaaaaaaaaa

SEQ ID NO: 39383 - RNA, 1809 nt, Artificial Sequence
  mRNA product Design b-4 (hSL-A100) comprising derived and/or modified sequence from LASV(LASV237-NIG-2010;Clade II)__AIT17638__GPCmut11 (opt5)
aggagagucccgcagucggcguccagcggcucugcuuguucgugugugugucguugcaggccuuauucaagcuuaccaugggccagaucauuaccuucuuucaagaggugccccacgucaucgaagagguuaugaacauugugcugaucgcccucagccugcuugcuauucugaaggggaucuacaauguggccacaugcggacucuucggccuggucuccuuucuucugcucugugggagaucuugcagcacgaccuauaaaggaguguacgaacugcagacacuggagcucgacauggcgucccugaacaugaccaugccucuuucuuguacaaagaauaacagccaucacuauaucaugguuggcaaugaaaccgggcuggagcucacacugaccaacacguccauuaucaaucauaaauucugcaaccuuucugaugcucacaagaaagaccuguacgaucaugcccucaugagcauuaucuccaccuuucaccugagcauuccgaauuucaaccaguaugaggccaugucuugugacuuuaauggaggcaagaucuccgugcaguacaaccugagccacacauaugcugucgaugccgcuaaucauugcggcaccauugccaacggggugcuccaaacauucaugcggauggcguggggaggcucuuacaucgcccuggacuccgggaagggaagcugggauuguaucaugaccucuuaccaguaucuuauuauccagaauacgacaugggaagaccacugccaguuuucccgccccagcccuauuggcuaccuggggcuccugucccaaagaacccgggauaucuauauuucucgcagacuucugggaacauucaccuggacccucagcgacuccgagggcaacgaaacacccggcggguacugucugacgcgguggaugcugaucgaggcugagcucaaaugcuuuggaaacaccgccguugcuaaguguaaugaaaaacaugaugaggaguucugcgacaugcugcgccuuuuugauuucaacaagcaggccaucagacggcugaaaacagaagcgcagaugagcauucagcucaucaauaaggccgugaacgcucugauuaaugaccaacuuaucaugaagaaccaucugcgcgacauuaugggcaucccuuauugcaauuacucuaaauauuguuaccucaaccacaccgucacagggaagaccucccugcccagaugcugucuggugagcaauggaucuuaccucaacgaaacgcacuucagcgaugacaucgagcagcaggccgauaauaugauuacagagcugcuucaaaaagaauauauggaccggcagggcaagaccccucuggggcucguggaucuguuugucuucuccaccucuuuuuaccugaucagcauuuuccuucaccucaucaaaauuccgacacaucgccacaucaccggaaagcccugcccuaaaccccauagacugaaccacaugggcauuuguuccugcggccuguauaagcacccugggguucccgugaaguggaaacggugaggacuaguaauaaggaaacuguaugaaugucugugggcaggaagugaagagauccuucuguaaagguuuuuggaauuaugucugcugaauaauaaacuuuuuugaaauaauaaaucugguagaaaaaugagaucucaaaggcucuuuucagagccaccaaaaaaaaaaaaaaaaaaaaaaaaaaaaaaaaaaaaaaaaaaaaaaaaaaaaaaaaaaaaaaaaaaaaaaaaaaaaaaaaaaaaaaaaaaaaaaaaaaaaa

SEQ ID NO: 39384 - RNA, 1809 nt, Artificial Sequence
  mRNA product Design b-4 (hSL-A100) comprising derived and/or modified sequence from LASV(LASV253-NIG-2011;Clade II)__AIT17670__GPCmut11 (opt5)
aggagagucccgcagucggcguccagcggcucugcuuguucgugugugugucguugcaggccuuauucaagcuuaccaugggccagaucauuaccuucuuucaagaggugccccacgucaucgaagagguuaugaacauugugcugaucgcccucagccugcuugcuauucugaaggggaucuacaauguggccacaugcggacucuucggccuggucuccuuucuucugcucugugggagaucuugcagcacgaccuauaaaggaguguacgaacugcagacacuggagcucgacauggcgucccugaacaugaccaugccucuuucuuguacaaagaauaacagccaucacuauaucaugguuggcaaugaaaccgggcuggagcucacacugaccaacacguccauuaucaaucauaaauucugcaaccuuucugaugcucacaagaaaaaucuguacgaccaugcccucaugagcauuaucuccaccuuucaccugagcauuccgaacuucaaucaguaugaggccaugucuugugauuuuaacggaggcaagaucuccgugcaguacaaucugagccacacauaugcugucgacgccgcuaaccauugcggcaccauugccaauggggugcuccaaacauucaugcggauggcguggggaggcucuuacaucgcccuggauuccgggaagggaagcugggacuguaucaugaccucuuaccaguaucuuauuauccagaacacgacaugggaagaucacugccaguuuucccgccccagcccuauuggcuaccuggggcuccugucccaaagaacccgggacaucuauauuucucgcagacuucugggaacauucaccuggacccucagcgauuccgagggcaacgaaacacccggcggguacugucugacgcgguggaugcugaucgaggcugagcucaaaugcuuuggaaauaccgccguugcuaaguguaacgaaaaacaugacgaggaguucugcgauaugcugcgccuuuuugacuucaauaagcaggccaucagacggcugaaagcggaagcccagaugagcauucagcucaucaacaaggcugugaaugcccugauuaacgaucaacuuaucaugaagaaucaucugcgcgacauuaugggcaucccuuauugcaacuacucuaaauauuguuaccucaaucacacagucaccgggagaacaucccugccccggugcugucuggugagcaacggaucuuaccucaaugaaacccacuucagcgacgauaucgagcagcaggcugacaacaugauuacggagcugcuucaaaaggaauauaucgaucgccagggcaaaacaccucuggggcucguggaccuguuugucuucuccaccucuuuuuaccugauuagcaucuuccuucaccucguuaagauuccgacccauagacacaucauuggaaaacccugcccuaagccccaucggcugaaucacaugggcaucuguuccugcggccuguauaaacacccuggggugcccgugaaguggaagcgcugaggacuaguaauaaggaaacuguaugaaugucugugggcaggaagugaagagauccuucuguaaagguuuuuggaauuaugucugcugaauaauaaacuuuuuugaaauaauaaaucugguagaaaaaugagaucucaaaggcucuuuucagagccaccaaaaaaaaaaaaaaaaaaaaaaaaaaaaaaaaaaaaaaaaaaaaaaaaaaaaaaaaaaaaaaaaaaaaaaaaaaaaaaaaaaaaaaaaaaaaaaaaaaaaa

SEQ ID NO: 39385 - RNA, 1809 nt, Artificial Sequence
  mRNA product Design b-4 (hSL-A100) comprising derived and/or modified sequence from LASV(LASV254-NIG-2011;Clade II)__AIT17674__GPCmut11 (opt5)
aggagagucccgcagucggcguccagcggcucugcuuguucgugugugugucguugcaggccuuauucaagcuuaccaugggccagaucauuaccuucuuucaagaggugccccacgucaucgaagagguuaugaacauugugcugaucgcccucagccugcuugcuauucugaaggggaucuacaauguggccacaugcggacucuucggccuggucuccuuucuucugcucugugggagaucuugcagcacgaccuauaaaggaguguacgaacugcagacacuggagcucgacaugaccaaccugaauaugacaaugccucuuuccuguaccaagaacaauucucaucacuauaucaugguuggcaacgaaacagggcuggagcucacccugacgaauaccagcauuaucaaccauaaauucugcaaucuuuccgaugcgcacaagaaaaaccuguacaaucaugcucucaugucuauuaucagcacauuucaccuguccauuccgaacuucaaucaguaugaggccaugagcugugacuuuaacggaggcaagaucucugugcaguacaaucugucccacagcuaugccgucgaugcugccaaccauugcggcaccauugcuaacggggugcuccaaacauucaugcggauggccuggggaggcucuuacaucgcgcuggacuccgggaagggaaauugggauuguaucaugaccagcuaccaguaucuuauuauccagaacacgacaugggaagaccacugccaguuuucucgccccuccccuauuggcuaccuggggcuccugagccaaagaacccgggauaucuauauuucccgcagacuucugggaacauucaccuggacccucucugacagcgagggcaaugaaacacccggcggguacugucugacgcgguggaugcugaucgaggccgagcucaaaugcuuuggaaacaccgcuguugccaaguguaaugaaaaacaugaugaggaguucugcgacaugcugcgccuuuuugauuucaacaagcaggcuaucagacggcugaaaacagaagcccaggcgaauauucagcucaucaacaaggccgugaaugcucugauuaacgaccaacuuaucaugaagaaucaucugcgcgauauuaugggcaucccuuauugcaacuacuccaaauauuguuaccucaaucacaccgucacagggaagaccagccugcccagaugcugucuggugucuaacggauccuaccucaaugaaacgcacuucagcgacgacaucgagcagcaggccgauaacaugauuacagagcugcuucaaaaagaauauauggaccggcagggcaagaccccucuggggcucguggaucuguuugucuucucuaccagcuuuuaccugaucuccauuuuccuucaccucguuaaaaucccgacacaucgccacgugauuggaaagcccugcccuaaaccccauagacugaaccacaugggcaucuguucuugcggccuguauaagcacccuggggugcccgucaaguggaaacggugaggacuaguaauaaggaaacuguaugaaugucugugggcaggaagugaagagauccuucuguaaagguuuuuggaauuaugucugcugaauaauaaacuuuuuugaaauaauaaaucugguagaaaaaugagaucucaaaggcucuuuucagagccaccaaaaaaaaaaaaaaaaaaaaaaaaaaaaaaaaaaaaaaaaaaaaaaaaaaaaaaaaaaaaaaaaaaaaaaaaaaaaaaaaaaaaaaaaaaaaaaaaaaaaa

SEQ ID NO: 39386 - RNA, 1809 nt, Artificial Sequence
  mRNA product Design b-4 (hSL-A100) comprising derived and/or modified sequence from LASV(Nig08-A19;Clade III)__ADU56618__GPCmut11 (opt5)
aggagagucccgcagucggcguccagcggcucugcuuguucgugugugugucguugcaggccuuauucaagcuuaccaugggccagaucgugaccuucuuucaagaggucccccacguuauugaagaggugaugaacaucgugcugauugcccucagcauccuggcuauucuuaaggggcuguacaauaucgccacaugcggacucaucggccuggucacguuccuucugcucuccgggagaucuuguagcaugaccuauaaaggaguguacgaacugcagacacuggagcucaacaugaauacccugaacaugacaaugccucuuuccugcaccaagaauaacucucaucacuauauuaugguuggcaaugaaacagggcuggagcucacccugacgaacaccagccuucugcaucacaaauuuuguaaucucuccgacgcgcauaagaaaaaccuguacgaucacacacugaugucuaucauuagcaccuuccaccucuccaucccgaauuuuaaccaguaugaggcuaugagcugcgacuucaauggaggcaagauuacagugcaguacaaccugucucauuccuaugccaucgaugccgcuaaucacuguggcaccgucgccaacggggugcuucaaacguuuaugcggauggcuuggggaggcagcuacauugcccuggacucugggcgcggaaagugggauugcaucaugacauccuaccaguaucucaucauucagaacaccacaugggaagaccauugucaguucagcagacccucuccuaucggcuaccuggggcuucugucccaacggacccgcgauauuuauaucagcagacggcuccugggaaccuuuacauggacgcuguccgacucugagggcaaugaaacccccggcggguacugccucacacgcuggaugcugauugaggcggagcuuaaauguuucggaaacaccgccguugcuaagugcaaugaaaaacacgaugaggaauuuugugacaugcugagacucuucgauuuuaacaagcaggccauccggcgccugaaagcugaggcccagaugagcauccagcuuauuaauaaggcggugaacgcccugaucaaugaccaacucauuaugaagaaccaccugagagauaucaugggcauuccuuauugcaauuacuccaaauauugcuaccugaaccauacaagcaccgggcggacgucucucccccgcuguugccuggucuccaauggaagcuaccuuaacgaaacacacuucucugacgacaucgagcagcaggcugauaauaugaucaccgagaugcugcaaaaggaauaucucgacagacagggcaaaaccccucuggggcugguggaucuuuucguguuuagcacauccuucuaccucauuucuaucuuucugcaucuggucaagauuccgacccaccggcauaucguuggaaaacccuguccuaagccccaccgccucaaccacaugggcauuugcagcuguggccuguauaaacagccuggggugcccgugagauggaagcggugaggacuaguaauaaggaaacuguaugaaugucugugggcaggaagugaagagauccuucuguaaagguuuuuggaauuaugucugcugaauaauaaacuuuuuugaaauaauaaaucugguagaaaaaugagaucucaaaggcucuuuucagagccaccaaaaaaaaaaaaaaaaaaaaaaaaaaaaaaaaaaaaaaaaaaaaaaaaaaaaaaaaaaaaaaaaaaaaaaaaaaaaaaaaaaaaaaaaaaaaaaaaaaaaa

SEQ ID NO: 39387 - RNA, 1812 nt, Artificial Sequence
  mRNA product Design b-4 (hSL-A100) comprising derived and/or modified sequence from LASV(G1180-SLE-2010;Clade IV)__AIT17168__GPCmut11 (opt5)
aggagagucccgcagucggcguccagcggcucugcuuguucgugugugugucguugcaggccuuauucaagcuuaccaugggccagaucgugaccuucuuucaagaggucccccacguuauugaagaggugaugaacaucgugcugauugcccucagcauccuggcuguccuuaaggggcuguacaauuucgccacaugcggacucgugggccugcuuacguuucugcuccugugugggagauccugcaccgcgucucgguauaaaggaguuuacgaacugcagacacucgagcugaacauggaaacccuuaauaugacaaugccucugagcuguaccaagaacaauucccaucacuauauuauggugggcaacgagacagggcucgagcugacccuuacgaauaccucuaucaucaaccauaaauucugcaaucugagcgacgcucacaagaaaaaccucuacgaucaugcccugauguccauuaucucuacauuucaccugagcauuccgaauuucaaccaguaugaagccauguccugugacuuuaauggaggcaagaucagcguccaguacaaccucucucacuccuaugcuggcgaugccgcuaaucauugcgggaccguggccaacggaguucugcaaacauucaugcgcauggcguggggcgggagcuacauugcccuugacucuggacacggcuccugggauuguaucaugaccagcuaccaguaucugauuauccagaacacgacaugggaggaccauugccaguuuucuagacccuccccuaucggguaccucggacugcuuagccaacggacccgcgauauuuauaucuccagacggcugcucggcacauucaccuggacccugucugacagcgaaggcaaggauacacccgggggauacugucugacgcgcuggaugcucauugaggcugagcugaaaugcuuuggcaauaccgccguggcuaaguguaacgaaaaacacgacgaggaguucugcgauaugcuuagacuguuugacuucaauaagcaggccauccagcggcucaaagcggaagcccagauguccauucaacugaucaacaaggcugucaaugcccuuaucaacgaucagcugauuaugaagaaucaccuccgcgacaucauggggauuccuuauugcaacuacagcaaauauuguuaccugaaucauacaaccacaggaaagaccucucugcccaaaugcugucucguguccaacggcagcuaccugaaugaaacgcacuucucugacgauaucgagcagcaagcugacaacaugauuacagagaugcuucagaaggaauauauggagagacaggggaaaaccccucugggacucguggaucuguuugucuucagcaccuccuuuuaccugaucucuaucuuccuucaucucguuaagauuccgacacaccggcauaucgugggcaaaagcugccccaagccucaccgccugaaucacaugggcauuuguuccugcgggcuguauaagcagcccggagugccugucaaauggaagagaugaggacuaguaauaaggaaacuguaugaaugucugugggcaggaagugaagagauccuucuguaaagguuuuuggaauuaugucugcugaauaauaaacuuuuuugaaauaauaaaucugguagaaaaaugagaucucaaaggcucuuuucagagccaccaaaaaaaaaaaaaaaaaaaaaaaaaaaaaaaaaaaaaaaaaaaaaaaaaaaaaaaaaaaaaaaaaaaaaaaaaaaaaaaaaaaaaaaaaaaaaaaaaaaaa

SEQ ID NO: 39388 - RNA, 1812 nt, Artificial Sequence
  mRNA product Design b-4 (hSL-A100) comprising derived and/or modified sequence from LASV(G1442-SLE-2011;Clade IV)__AIT17180__GPCmut11 (opt5)
aggagagucccgcagucggcguccagcggcucugcuuguucgugugugugucguugcaggccuuauucaagcuuaccaugggccagaucgugaccuucuuucaagaggucccccacguuauugaagaggugaugaacaucgugcugauugcccucagcauccuggcuguccuuaaggggcuguacaauguggccacaugcggacucauuggccugguuacguuccuucugcucugugggagauccugcaccacaacccuguauaaaggaguguacgaacugcagacacucgagcugaacauggaaacccuuaauaugacaaugccucugucuuguaccaagaacaauagccaucacuauauccgggucggcaacgagacggggcucgagcugacccuuacaaauaccuccaucauuaaccauaaauuuugcaaucugucugacgcgcacaagaaaaaccucuacgaucaugcucugaugagcaucauuuccacauuccaccugucuaucccgaauuuuaaccaguaugaagccaugagcugugacuucaauggaggcaagauuuccgugcaguacaaccucagccacucuuaugccggcgaugcugccaaucauugcgggaccguugcuaacggagugcugcaaacguuuaugcgcauggccuggggcggguccuacaucgcgcuugacagcggaagaggcaacugggauuguauuaugacaucuuaccaguaucugaucauccagaauaccacaugggacgaucacugccaguucucccggcccagcccuauuggguaccucggacugcuuucucaacgcaccagagacgucuauaucucccggcgccugcucggcaccuuuacauggacgcugagcgauuccgagggcaaggacacccccgggggauacugucugacaagauggaugcucauugaagccgagcugaaaugcuucggcaacaccgcuguggccaaguguaaugagaaacaugaugaagaguuuugcgacaugcuucggcuguucgauuuuaacaagcaggcuauccagcgccucaaagccgaagcgcagaugucuauucaacugaucaauaaggccgugaacgcucuuaucaaugaccagcugauuaugaagaaccaccucagagacaucauggggauuccuuauugcaauuacagcaaauauuguuaccugaacaauacagccaccggaaagacgucccugcccaaaugcugucucaucagcaacggcucuuaccugaaugagacacacuucuccgaugacauugaacaggaggcugauaacaugaucaccgagaugcuucaaaaggaauauauggagcggcaggggaaaaccccucugggacucgucgaccuguucguuuuuagcacaucuuucuaccugaucagcauuuuucuucaucucgugaagaucccgacccaccgccauauugugggcaaauccugccccaagccucacagacugaaucauaugggcaucuguucuugcgggcuguauaagcagcccggagucccugugcgguggaaacgcugaggacuaguaauaaggaaacuguaugaaugucugugggcaggaagugaagagauccuucuguaaagguuuuuggaauuaugucugcugaauaauaaacuuuuuugaaauaauaaaucugguagaaaaaugagaucucaaaggcucuuuucagagccaccaaaaaaaaaaaaaaaaaaaaaaaaaaaaaaaaaaaaaaaaaaaaaaaaaaaaaaaaaaaaaaaaaaaaaaaaaaaaaaaaaaaaaaaaaaaaaaaaaaaaa

SEQ ID NO: 39389 - RNA, 1812 nt, Artificial Sequence
  mRNA product Design b-4 (hSL-A100) comprising derived and/or modified sequence from LASV(G3010-SLE-2013;Clade IV)__AIT17344__GPCmut11 (opt5)
aggagagucccgcagucggcguccagcggcucugcuuguucgugugugugucguugcaggccuuauucaagcuuaccaugggccagaucgugaccuucuuucaagaggucccccacguuauugaagaggugaugaacaucgugcugauugcccucagcauccuggcuguccuuaaggggcuguacaauuucgccacaugcggacucgugggccugguuacguuucuucugcucugugggagauccugcaccacaucucuguauaaaggaguguacgaacugcagacccucgagcugaacauggaaacacuuaauaugaccaugccucugagcuguacaaagaacaauucccaucacuauauuauggucggcaacgagaccgggcucgagcugacgcuuaccaauacaucuaucaucaaccauaaauucugcaaucugagcgacgcgcacaagaaaaaccucuacaaucaugcucugauguccauuaucucuaccuuucaccugagcauuccgaacuucaaucaguaugaagccauguccugugauuuuaacggaggcaagaucagcgugcaguacaaucucucucacuccuaugccggcgacgcugccagccauugcgggacaguugcuaacggagugcugcaaaccuucaugcggauggccuggggcgggucuuacauugcgcuugauuccggauacggcaagugggacuguaucaugacgagcuaucaguaccugauuauccagaacacaaccugggaggaucacugccaguuuucucgccccuccccuaucggguaucucggacugcuuagccaaagaacacgggacauuuacaucucccgcagacugcucggcaccuucaccuggacacugucugauagcgaaggcaaagacacgcccgggggauauugucugacccgguggaugcucauugaggccgagcugaagugcuuuggcaauacagcugucgccaaauguaacgaaaagcaugaugaggaguucugcgacaugcuucgccuguuugauuucaauaaacaggcuauccagagacucaagaccgaagcccagauguccauucaacugaucaacaaggcggugaaugcccuuaucaacgaccagcugauuaugaaaaaucaccuccgggauaucauggggauuccuuacugcaacuauagcaaguacuguuaccugaaucacacaaccacgggaaaaacaucucugcccaagugcugucucguguccaacggcagcuaucugaaugaaacccauuucucugacgacaucgagcagcaagcugauaacaugauuaccgagaugcuucagaaagaauacauggagcgccaggggaagacaccucugggacucgucgaccuguuuguuuucagcaccuccuuuuaucugaucucuaucuuccuucaccucgugaaaauuccgacacauagacacaucgugggcaagagcugccccaagccucaucggcugaaucacaugggcauuuguuccugcgggcuguacaaacagcccggagucccugugcgcuggaagagaugaggacuaguaauaaggaaacuguaugaaugucugugggcaggaagugaagagauccuucuguaaagguuuuuggaauuaugucugcugaauaauaaacuuuuuugaaauaauaaaucugguagaaaaaugagaucucaaaggcucuuuucagagccaccaaaaaaaaaaaaaaaaaaaaaaaaaaaaaaaaaaaaaaaaaaaaaaaaaaaaaaaaaaaaaaaaaaaaaaaaaaaaaaaaaaaaaaaaaaaaaaaaaaaaa

SEQ ID NO: 39390 - RNA, 1812 nt, Artificial Sequence
  mRNA product Design b-4 (hSL-A100) comprising derived and/or modified sequence from LASV(G502-SLE-2009;Clade IV)__AIT17126__GPCmut11 (opt5)
aggagagucccgcagucggcguccagcggcucugcuuguucgugugugugucguugcaggccuuauucaagcuuaccaugggccagaucgugaccuucuuucaagaggucccccacguuauugaagaggugaugaacaucgugcugauugcccucagcauccuggcuguccuuaaggggcuguacaauuucgccacaugcggacucgugggccugcuuacguuucugcuccugugugggagauccugcaccacaggacuguauaaaggcguuuacgaacuccagacccuggagcuuaacauggaaacacugaauaugaccaugccucucucuuguacaaagaacaauagccaucacuauauuaugguggggaacgagaccggacuggagcuuacgcugaccaauacauccaucaucaaccauaaauucugcaaucucucugacgcgcacaagaaaaaccuguacgaucaugcucugaugagcauuaucuccaccuuucaccucucuauuccgaauuucaaccaguaugaagccaugagcugugacuuuaauggcggcaagaucuccguccaguacaaccugagccacucuuaugccggggaugcugccgaccauugcggaacaguggcuaauggcguucuucaaaccuucaugcggauggccuggggaggguccuacauugcgcuggauagcggccgcgggagaugggacuguaucaugacgucuuaccaguaucucauuauccagaacacaaccugggaggaucacugccaguuuucccggcccagcccuaucggauaccugggccuucugucucaacgcacaagagacauuuauaucucccggcgccuccugggcaccuucaccuggacacugagcgauuccgaagggaaggacacgcccggaggcuacugucucaccagauggaugcugauugaggccgagcuuaaaugcuuugggaacacagcuguggccaaguguaaugaaaaacaugaugaggaguucugcgacaugcugcggcucuuugauuucaacaagcaggcuauccagcgccugaaagccgaagcgcagaugucuauucaacuuaucaauaaggccgucaacgcucugaucaaugaccagcucgugaugaagaaccaccugagagacauuaugggaaucccuuauugcaauuacagccgguauuguuaccugaaccacaccacaaccggccgcacgucccuccccaaaugcugucuggugagcaaugggucuuaccuuaacgaaacacauuucuccgaugacauugagcagcaagccgauaauaugaucaccgagaugcugcagaaggaauauauggagagacagggaaaaaccccucucggccuggucgaccuguuuguuuucagcacaucuuuuuaccuuauuagcaucuuccuccaccuggugaagaucccgacccaucggcacauugugggcaaauccugccccaagccucaucgccugaaccacauggggaucuguucuugcggacucuauaaacagcccggcgucccugugaaguggaagagaugaggacuaguaauaaggaaacuguaugaaugucugugggcaggaagugaagagauccuucuguaaagguuuuuggaauuaugucugcugaauaauaaacuuuuuugaaauaauaaaucugguagaaaaaugagaucucaaaggcucuuuucagagccaccaaaaaaaaaaaaaaaaaaaaaaaaaaaaaaaaaaaaaaaaaaaaaaaaaaaaaaaaaaaaaaaaaaaaaaaaaaaaaaaaaaaaaaaaaaaaaaaaaaaaa

SEQ ID NO: 39391 - RNA, 1812 nt, Artificial Sequence
  mRNA product Design b-4 (hSL-A100) comprising derived and/or modified sequence from LASV(G733-SLE-2010;Clade IV)__AIT17154__GPCmut11 (opt5)
aggagagucccgcagucggcguccagcggcucugcuuguucgugugugugucguugcaggccuuauucaagcuuaccaugggccagaucgugaccuucuuucaagaggucccccacguuauugaagaggugaugaacaucgugcugauugcccucagcauccuggcuguccuuaaggggcuguacaauuucgccacaugcggaauugugggccucguuuccuuucugcuucugugugggagaucuugcacgaccagccucuauaaaggaguguacgaacugcagacacuggagcucaacauggaaacccugaauaugacaaugccucuuuccuguaccaagaacaauucucaucacuauaucauggucggcaacgagacagggcuggagcucacccugacgaauaccagcaucauuaaccauaaauucugcaaucuuuccgacgcgcacaagaaaaaccuguacgaucaugcucucaugucuaucauuagcacauuucaccuguccaucccgaauuucaaccaguaugaagccaugagcugugacuuuaauggaggcaagauuucugugcaguacaaccugucccacagcuaugccggcgaugcugccaaucauugcgggaccaucgcuaacggaguucuccaaacauucaugcggauggccuggggcgggucuuacauugcgcuggacuccggacgcgauagaugggacuguaucaugaccagcuaccaguaucuuaucauucagaacacgacaugggaggaucacugccaguuuucucggcccuccccuaucggcuaccuggggcuccugagccaacgcaccagagacauuuauaucucccggcgccuucugggaacauucaccuggacccucucugauagcgaaggcaaggacacacccggcggguacugucugacgagauggaugcugauugaggccgagcucaaaugcuuuggaaauaccgcuguggccaaguguaacgaaaaacaugaugaggaguucugcgacaugcugcggcuuuuugauuucaauaagcaggcuauccagcgccugaaagccgaagcgcagauguccauccaacucauuaacaaggccgucaaugcucugaucaacgaccagcuuauuaugaagaaucaccugagagacaucaugggcauuccuuauugcaacuacagcaaauauuguuaccucaaucacacaaccacagggaagaccucucugcccaaaugcugucugguguccaacggaagcuaccucaaugaaacgcauuucucugaugacaucgagcagcaagccgauaacaugaucacagagaugcugcagaaggaauauauggagcggcagggcaaaaccccucuugggcugguggaccucuuugucuucagcaccuccuuuuaccugauuucuaucuuccugcaccuuguuaagauuccgacacaucgccacguggugggaaaaagcugccccaagccucauagacucaaucacaugggcaucuguuccugcggccuguaugggcagcccggagucccugugaaguggaaacggugaggacuaguaauaaggaaacuguaugaaugucugugggcaggaagugaagagauccuucuguaaagguuuuuggaauuaugucugcugaauaauaaacuuuuuugaaauaauaaaucugguagaaaaaugagaucucaaaggcucuuuucagagccaccaaaaaaaaaaaaaaaaaaaaaaaaaaaaaaaaaaaaaaaaaaaaaaaaaaaaaaaaaaaaaaaaaaaaaaaaaaaaaaaaaaaaaaaaaaaaaaaaaaaaa

SEQ ID NO: 39392 - RNA, 1812 nt, Artificial Sequence
  mRNA product Design b-4 (hSL-A100) comprising derived and/or modified sequence from MOPV/LASV reassortant(IGS-1;Clade IV)__AFY05576__GPCmut11 (opt5)
aggagagucccgcagucggcguccagcggcucugcuuguucgugugugugucguugcaggccuuauucaagcuuaccaugggccagaucgugaccuucuuucaagaggucccccacguuauugaagaggugaugaacaucgugcugauugcccucagcguccuggcugugcuuaaggggcuguacaauuucgccacaugcggacucguuggccuggugacguuucuucugcucugugggagauccugcaccacaucucuguauaaaggagucuacgaacugcagacccucgagcugaacauggaaacacuuaauaugaccaugccucugagcuguacaaagaacaauucccaucacuauaucauggugggcaacgagaccgggcucgagcugacgcuuaccaauacaucuauuaucaaccauaaauucugcaaucugagcgacgcgcacaagaaaaaccucuacgaucaugcucugauguccaucauuucuaccuuucaccugagcaucccgaauuucaaccaguaugaagccauguccugugacuuuaauggaggcaagauuagcguucaguacaaccucucucacuccuaugccggcgaugcugccaaucauugcgggacaguggcuaacggaguccugcaaaccuucaugcggauggccuggggcgggagcuacaucgcgcuugacucuggacgcggcaacugggauuguauuaugacguccuaccaguaucugaucauucagaauacaaccugggaggaccacugccaguuuagcagacccucuccuaucggguaccucggacugcuuucccaacggacacgcgauaucuauauuagcagacggcugcucggcaccuucaccuggacacuguccgacucugaaggcgaggauacgcccgggggauacugucugacccgcuggaugcucaucgaggccgaacugaagugcuuuggcaacacagcuguggccaaauguaaugagaagcaugacgaagaguucugcgauaugcuuagacuguuugacuucaacaaacaggcuauucagcggcucaaggccgaagcgcagaugagcauccaacugauuaauaaagccgugaacgcucuuaucaaugaucagcugaucaugaagaaccaccuccgcgacauuauggggaucccuuauugcaauuacuccaaguauuguuaccugaaccacaccacaaccggaagaacgagccugcccaaaugcugucucgucucuaauggcuccuaccugaacgagacacauuucagcgacgauauugagcagcaagccgacaauaugaucaccgaaaugcuucagaaggaguauauggaacggcaggggaaaaccccucugggacucguugaucuguuuguguucucuaccagcuuuuaccugauuuccaucuuccuucaccucgugaagaucccgacacaucgccacauugucggcaaaucuugccccaagccucauagacugaaccacaugggcaucuguagcugcgggcuguauaaacagcccggagugccuguuaaguggaagcggugaggacuaguaauaaggaaacuguaugaaugucugugggcaggaagugaagagauccuucuguaaagguuuuuggaauuaugucugcugaauaauaaacuuuuuugaaauaauaaaucugguagaaaaaugagaucucaaaggcucuuuucagagccaccaaaaaaaaaaaaaaaaaaaaaaaaaaaaaaaaaaaaaaaaaaaaaaaaaaaaaaaaaaaaaaaaaaaaaaaaaaaaaaaaaaaaaaaaaaaaaaaaaaaaa

SEQ ID NO: 39393 - RNA, 1812 nt, Artificial Sequence
  mRNA product Design b-4 (hSL-A100) comprising derived and/or modified sequence from LASV(LM765-SLE-2012;Clade IV)__AIT17814__GPCmut11 (opt5)
aggagagucccgcagucggcguccagcggcucugcuuguucgugugugugucguugcaggccuuauucaagcuuaccaugggccagaucgugaccuucuuucaagaggucccccacguuauugaagaggugaugaacaucgugcugauugcccucagcauccuggcuguccuuaaggggcuguacaauuucgccacaugcggacucgugggccugguuacguuucuucugcucugugggagauccugcaccacaucucuguauaaaggaguguacgaacugcagacccucgagcugaacauggaaacacuuaauaugaccaugccucugagcuguacaaagaacaauucccaucacuauauuauggucggcaacgagaccgggcucgagcugacgcuuaccaauacaucuaucaucgaccauaaauucugcaaccugagcgaugcgcaccggaagaaucucuacgaccaugcucugauguccauuaucucuaccuuucaccugagcauuccgaacuucaaucaguaugaagccauguccugugauuuuaacggaggcaaaaucagcgugcaguacaaucucucucacuccuaugccaaggacgcugccgaucauugcggcacaguugcuaacggggugcugcaaaccuucaugcgcauggccuggggaggcagcuacauugcgcuugacucugggagaggacggugggauuguaucaugacguccuaccaguaucugauuauccagaauacaaccugggaggaccacugccaguuuagccgccccucuccuaucggcuaccucgggcugcuuucccaaagaacacgggauauuuauaucagccgcagacugcucggaaccuucaccuggacacuguccgacucugaaggcaaggauacgcccggcggguacugucugacccgguggaugcucauugaggccgagcugaaaugcuuuggaaacacagcugucgccaaguguaacgaaaaacaugacgaggaguucugcgauaugcuucgccuguuugacuucaauaagcaggcuauccagagacucaaagccgaagcgcagaugagcauucaacugaucaacaaggccgugaaugcucuuaucaacgaccagcugauuaugaagaaucaccuccgggauaucaugggcauuccuuauugcaacuacuccaaauauuguuaccugaaucacaccacaaccgggaagacgagccugcccaaaugcugucucgugucuaacggauccuaccugaaugaaacacauuucagcgacgauaucgagcagcaagccgacaacaugauuaccgagaugcuucagaaggaauauauggagcgccagggcaaaaccccucuggggcucgucgaucuguuuguuuucucuaccagcuuuuaccugaucuccaucuuccuucaccucgugaagauuccgacacauagacacaucgugggaaaacccugcccuaagccccaucggcugaaucacaugggcauuuguucuugcggccuguauaagcagccugggguccccgugaaauggaagcgcugaggacuaguaauaaggaaacuguaugaaugucugugggcaggaagugaagagauccuucuguaaagguuuuuggaauuaugucugcugaauaauaaacuuuuuugaaauaauaaaucugguagaaaaaugagaucucaaaggcucuuuucagagccaccaaaaaaaaaaaaaaaaaaaaaaaaaaaaaaaaaaaaaaaaaaaaaaaaaaaaaaaaaaaaaaaaaaaaaaaaaaaaaaaaaaaaaaaaaaaaaaaaaaaaa

SEQ ID NO: 39394 - RNA, 1812 nt, Artificial Sequence
  mRNA product Design b-4 (hSL-A100) comprising derived and/or modified sequence from LASV(LM776-SLE-2012;Clade IV)__AIT17824__GPCmut11 (opt5)
aggagagucccgcagucggcguccagcggcucugcuuguucgugugugugucguugcaggccuuauucaagcuuaccaugggccagaucgugaccuucuuucaagaggucccccacguuauugaagaggugaugaacaucgugcugauugcccucagcauccuggcuguccuuaaggggcuguacaauuucgccacaugcggacucgugggccugguuacguuucuucugcucugugggagauccugcaccacaucuguguauaaaggagucuacgaacugcagacccuggagcucaacauggaaacacugaauaugaccaugccucuuagcuguacaaagaacaauucccaucacuauauuauggugggcaacgagaccgggcuggagcucacgcugaccaauacaucuaucaucaaccauaaauucugcaaucuuagcgacgcgcacaagaaaaaccuguacgaucaugcucucauguccauuaucucuaccuuucaccugagcauuccgaauuucaaccaguaugaagccauguccugugacuuuaauggaggcaagaucagcguucaguacaaccugucucacuccuaugccggcgaugcugccaaucauugcgggacaguggcuaacggaguccuccaaaccuucaugcggauggccuggggcgggagcuacauugcgcuggacucuggacacggcaagugggauuguaucaugacguccuaccaguaucuuauuauccagaacacaaccugggaggaccauugccaguuuagccgccccucuccuaucggguaccugggacuccugucccaaagaacacgggauauuuauaucagccgcagacuucugggcaccuucaccuggacacucuccgacucugaaggcaaagauacgcccgggggauacugucugacccgguggaugcugauugaggccgagcucaagugcuuuggcaauacagcuguggccaaauguaacgaaaagcacgacgaggaguucugcgauaugcugcgccuuuuugacuucaauaaacaggcuauccagagacugaaggccgaagcgcagaugagcauucaacucaucaacaaggccgugaaugcucugaucaacgaucagcuuauuaugaaaaaucaucugcgggacaucauggggauuccuuauugcaacuacuccaaguauuguuaccucaaucacaccacaaccggaaaaacgagccugcccaagugcugucuggucucuaacggcuccuaccucaaugaaacacacuucagcgacgauaucgagcagcaagccgacaacaugauuaccgagaugcugcagaaagaauauauggagcgccaggggaagaccccucuuggacugguugaucucuuuguguucucuaccagcuuuuaccugaucuccaucuuccugcaucuugugaaaauuccgacacacagacauaucgucggcaagucuugccccaagccucaccggcucaaucacaugggcauuuguagcugcgggcuguauaaacagcccggagugccuguucgcuggaagagaugaggacuaguaauaaggaaacuguaugaaugucugugggcaggaagugaagagauccuucuguaaagguuuuuggaauuaugucugcugaauaauaaacuuuuuugaaauaauaaaucugguagaaaaaugagaucucaaaggcucuuuucagagccaccaaaaaaaaaaaaaaaaaaaaaaaaaaaaaaaaaaaaaaaaaaaaaaaaaaaaaaaaaaaaaaaaaaaaaaaaaaaaaaaaaaaaaaaaaaaaaaaaaaaaa

SEQ ID NO: 39395 - RNA, 1812 nt, Artificial Sequence
  mRNA product Design b-4 (hSL-A100) comprising derived and/or modified sequence from LASV(Mad39;Clade IV)__ANH09722__GPCmut11 (opt5)
aggagagucccgcagucggcguccagcggcucugcuuguucgugugugugucguugcaggccuuauucaagcuuaccaugggccagaucgugaccuucuuucaagaggucccccacguuauugaagaggugaugaacaucgugcugauugcccucagcauccuggcuguccuuaaggggcuguacaauguggccacaugcggacucauuggccugguuacguuccuucugcucugugggagauccugcaccacaacccuguauaaaggaguguacgaacugcaggcgcucgagcugaacauggaaacacuuaauaugaccaugccucugucuuguacaaagaacaauagccaucacuauauccgggucggcaacgagaccgggcucgagcugacgcuuaccaauacaucccugaucaaccauaaauuuugcaaucucucugacgcucacaagaaaaaccuguacgaucaugcccugaugagcauuaucuccaccuuccaccucucuauuccgaauuuuaaccaguaugaagccaugagcugugacuucaaugauggaaagaucuccgugcaguacaaccugagccacacauaugcuggcgacaccgccaaucauugcggcacgguugcuaacggggugcuucaaacauuuaugcgcauggccuggggaggcucuuacauugcgcuggauuccgggagaggaggcugggacuguaucaugaccagcuaccaguaucucauuauccagaacacaaccugggaggaucacugccaguucucucggcccuccccuaucggguaccugggacuucugagccaacgcaccagagacauuuauaucucucggcgccuccugggcacauuuacguggacccuguccgauagcgaaggcaaggacacacccgggggauacugucucaccagauggaugcugauugaggccgagcuuaaaugcuucggcaauacagcugucgccaaguguaacgaaaaacaugaugaggaauuuugcgacaugcugcgccucuucgauuuuaauaagcaggcuauccagcggcugaaagccgaggcgcagauguccauucaacuuaucaacaaggccgugaaugcucugaucaacgaccagcucauuaugaagaaucaccugagagacaucauggggauuccuuauugcaacuacucuaaauauuguuaccugaaucacaccgugacgggaaagacaagccuccccaaaugcugucuggucuccaacggcagcuaccuuaaugaaacccauuucucugaugacaucgagcagcaagccgauaacaugauuaccgagaugcugcagaaggaauauauggagcggcaggggaaaacaccucucggacugguugaccuguucguguuuuccaccagcuucuaccuuaucucuaucuuucuccaccuggugaagauuccgacacaucgccacgucgugggcaaacccugcccuaagccccauagacugaaucacaugggcaucuguagcugcggguucuauaagcagccuggaguucccgugcgguggaaacgcugaggacuaguaauaaggaaacuguaugaaugucugugggcaggaagugaagagauccuucuguaaagguuuuuggaauuaugucugcugaauaauaaacuuuuuugaaauaauaaaucugguagaaaaaugagaucucaaaggcucuuuucagagccaccaaaaaaaaaaaaaaaaaaaaaaaaaaaaaaaaaaaaaaaaaaaaaaaaaaaaaaaaaaaaaaaaaaaaaaaaaaaaaaaaaaaaaaaaaaaaaaaaaaaaa

SEQ ID NO: 39396 - RNA, 1812 nt, Artificial Sequence
  mRNA product Design b-4 (hSL-A100) comprising derived and/or modified sequence from LASV(Z0947-SLE-2011;Clade IV)__AIT17840__GPCmut11 (opt5)
aggagagucccgcagucggcguccagcggcucugcuuguucgugugugugucguugcaggccuuauucaagcuuaccaugggccagaucgugaccuucuuucaagaggucccccacguuauugaagaggugaugaacaucgugcugauugcccucagcauccuggcuguccuuaaggggcuguacaauuucgccacaugcggacucgugggccugguuacguuucuucugcucugugggagauccugcaccauuucucuguauaaaggaguguacgaacugcagacacucgagcugaacauggaaacccuuaauaugacaaugccucugagcuguaccaagaacaauucccaucacuauaucauggucggcaacgagacagggcucgagcugacccuuacgaauaccucuaucauuaaccauaaauucugcaaucugagcgacgcgcacaagaaaaaccucuacgaucaugcucugauguccaucauuucuacauuucaccugagcaucccgaauuucaaccaguaugaagccauguccugugacuuuaauggaggcaagauuagcgugcaguacaaccucucucacuccuaugccggcgaugcugccaaucauugcgggaccguugcuaacggagugcugcaaacauucaugcggauggccuggggcgggagcuacaucgcgcuugacucuggacgcgauagaugggacuguauuaugaccuccuaccaguaucugaucauccagaacacgacaugggaggaucacugccaguuuagccggcccucuccuauuggcuaccucgggcugcuuucccaacgcaccagagacaucuauauuagccggcgccugcucggaacauucaccuggacccuguccgauucugaaggcaaggacacacccggcggguacugucugacgagauggaugcucaucgaggccgagcugaaaugcuuuggaaauaccgcugucgccaaguguaacgaaaaacaugaugaggaguucugcgacaugcuucggcuguuugauuucaauaagcaggcuauucagcgccucaaagccgaagcgcagaugagcauccaacugaucaacaaggccgugaaugcucuuauuaacgaccagcugaucaugaagaaucaccucagagacauuaugggcaucccuuauugcaacuacuccaaauauuguuaccugaaucacacaaccacagggaagaccagccugcccaaaugcugucucgugucuaacggauccuaccugaaugaaacgcauuucagcgaugacauugagcagcaagccgauaacaugaucacagagaugcuucagaaggaauauauggagcggcagggcaaaaccccucuggggcucgucgaccuguuuguuuucucuaccagcuuuuaccugaucuccauuuuccuucaccucgugaagaucccgacacaucgccacauugugggaaaacccugcccuaagccccauagacugaaucacaugggcaucuguucuugcggccuguauaagcagccugggguccccgugaaauggaagcggugaggacuaguaauaaggaaacuguaugaaugucugugggcaggaagugaagagauccuucuguaaagguuuuuggaauuaugucugcugaauaauaaacuuuuuugaaauaauaaaucugguagaaaaaugagaucucaaaggcucuuuucagagccaccaaaaaaaaaaaaaaaaaaaaaaaaaaaaaaaaaaaaaaaaaaaaaaaaaaaaaaaaaaaaaaaaaaaaaaaaaaaaaaaaaaaaaaaaaaaaaaaaaaaaa

SEQ ID NO: 39397 - RNA, 1788 nt, Artificial Sequence
  mRNA product Design b-4 (A100) comprising derived and/or modified sequence from LASV(Josiah;Clade IV)__NP_694870__GPCmut11 (opt1)
aggagagucccgcagucggcguccagcggcucugcuuguucgugugugugucguugcaggccuuauucaagcuuaccaugggccagaucgugaccuucuuccaggaggucccccacgugaucgaggaggugaugaacaucguccugaucgcccucagcgugcuggccgugcugaaggggcucuacaacuucgcgaccugcggccuggucgggcuggugacguuccuccugcugugcggccgcuccugcaccaccagccucuacaaggggguguacgagcugcagacccuggagcucaacauggagacgcugaacaugaccaugccgcuguccugcaccaagaacaacagccaccacuacaucauggucggcaacgagaccggccucgagcugacgcugaccaacaccuccaucaucaaccacaaguucugcaaccucagcgacgcccacaagaagaaccuguacgaccacgcccugauguccaucaucagcaccuuccaccucuccauccccaacuucaaccaguacgaggccaugagcugcgacuucaacgggggcaagaucuccgugcaguacaaccugagccacuccuacgccggggacgcggccaaccacugcggcacgguggccaacgggguccugcagaccuucaugcggauggccuggggcggcagcuacaucgcgcucgacuccgggcgcggcaacugggacugcaucaugaccagcuaccaguaccugaucauccagaacaccacgugggaggaccacugccaguucucccggcccagccccaucggguaccugggccuccugucccagcgcacccgggacaucuacaucagccgccggcugcucggcaccuucaccuggacgcugagcgacuccgaggggaaggacaccccgggcggguacugccugacccgcuggaugcucaucgaggccgagcugaagugcuucggcaacaccgccguggccaagugcaacgagaagcacgacgaggaguucugcgacaugcugcggcuguucgacuucaacaagcaggccauccagcgccugaaggcggaggcccagaugagcauccagcugaucaacaaggccgugaacgcccucaucaacgaccagcugaucaugaagaaccaccuccgggacaucauggggauccccuacugcaacuacuccaaguacugcuaccucaaccacacgaccaccggccgcaccagccugcccaagugcugccuggucuccaacggcagcuaccucaacgagacgcacuucuccgacgacaucgagcagcaggccgacaacaugaucaccgagaugcugcagaaggaguacauggagcggcaggggaagacgccccugggccucguggaccuguucguguucagcaccuccuucuaccugaucagcaucuuccugcaccucgucaagaucccgacccaccgccacaucguggggaaguccugccccaagccccaccggcugaaccacaugggcaucugcagcugcgggcuguacaagcagcccggcgugccggucaaguggaagcgcugaggacuaguaauaaggaaacuguaugaaugucugugggcaggaagugaagagauccuucuguaaagguuuuuggaauuaugucugcugaauaauaaacuuuuuugaaauaauaaaucugguagaaaaaugagaucuaaaaaaaaaaaaaaaaaaaaaaaaaaaaaaaaaaaaaaaaaaaaaaaaaaaaaaaaaaaaaaaaaaaaaaaaaaaaaaaaaaaaaaaaaaaaaaaaaaaa

SEQ ID NO: 39398 - RNA, 1785 nt, Artificial Sequence
  mRNA product Design b-4 (A100) comprising derived and/or modified sequence from LASV(LP;Clade I)__AAF86701__GPCmut11 (opt1)
aggagagucccgcagucggcguccagcggcucugcuuguucgugugugugucguugcaggccuuauucaagcuuaccaugggccagaucaucaccuucuuccaggaggugccccacgucaucgaggaggugaugaacaucgugcugaucgcccucagccugcuggccauccucaaggggcuguacaacaucgcgaccugcggcaucaucgggcuggucgccuuccucuuccugugcggcaaguccugcagccugacgcucaagggcggguacgagcugcagacccuggagcucaacauggagacccugaacaugaccaugccgcuguccugcacgaagaacagcucccaccacuacauccgcgugggcaacgagaccgggcucgagcugacccugaccaacacgagcaucaucaaccacaaguucugcaaccucuccgacgcccacaagaagaaccuguacgaccacgcccugaugagcaucaucuccaccuuccaccucagcauccccaacuucaaccaguacgaggccauguccugcgacuucaacggcgggaagaucagcgugcaguacaaccugucccacagcuacgcgggcgacgccgccgagcacugcgggaccgucgccaacggcgugcugcagaccuucaugcggauggcguggggcgggcgcuacaucgcccucgacuccggcaaggggaacugggacugcaucaugacgagcuaccaguaccugaucauccagaacaccaccugggaggaccacugccaguucucccggcccagccccaucggcuaccugggccuccugucccagcgcacccgggacaucuacaucagccgccggcugcucgggacguucaccuggacccugagcgacuccgagggcaacgagacccccgggggcuacugccugacgcgcuggaugcucaucgaggccgagcugaagugcuucgggaacaccgccguggccaagugcaacgagaagcacgacgaggaguucugcgacaugcugcggcuguucgacuucaacaagcaggcgauccgccggcugaaggccgaggcccagaugagcauccagcugaucaacaaggccgucaacgcccucaucaacgaccagcugaucaugaagaaccaccuccgcgacaucaugggcauccccuacugcaacuacuccaaguacugcuaccucaaccacaccagcuccggccggaccagccugcccaagugcugccugaucuccaacgggagcuaccucaacgagacgcaguucuccgacgacaucgagcagcaggcggacaacaugaucaccgagaugcugcagaaggaguacaucgagcgccagggcaagaccccgcuggggcucguggacaucuucaucuucagcaccuccuucuaccugaucagcaucuuccugcaccugaucaagaucccgacgcaccggcacaucgugggcaagcccugccccaagccccaccgccucaaccacaugggggucugcuccugcggccuguacaagcacccgggcgugcccaccaaguggaagcggugaggacuaguaauaaggaaacuguaugaaugucugugggcaggaagugaagagauccuucuguaaagguuuuuggaauuaugucugcugaauaauaaacuuuuuugaaauaauaaaucugguagaaaaaugagaucuaaaaaaaaaaaaaaaaaaaaaaaaaaaaaaaaaaaaaaaaaaaaaaaaaaaaaaaaaaaaaaaaaaaaaaaaaaaaaaaaaaaaaaaaaaaaaaaaaaaa

SEQ ID NO: 39399 - RNA, 1785 nt, Artificial Sequence
  mRNA product Design b-4 (A100) comprising derived and/or modified sequence from LASV(803213;Clade II)__AAF86703__GPCmut11 (opt1)
aggagagucccgcagucggcguccagcggcucugcuuguucgugugugugucguugcaggccuuauucaagcuuaccaugggccagaucaucaccuucuuccaggaggugccccacgucaucgaggaggugaugaacaucgugcugaucgcccucagccugcuggccauccucaaggggaucuacaacgucgcgaccugcggccuguucgggcugaucuccuuccuccugcugugcggccgcagcugcuccgugacguacaaggggguguacgagcuccagacccuggagcugaacauggccaaccucaacaugaccaugccgcugagcugcaccaagaacaacucccaccacuacaucauggucggcaacgagacgggccuggagcucacccugaccaacaccagcaucaucaaccacaaguucugcaaccuguccgacgcccacaagaagaaccucuacgaccacgcccugaugagcaucaucuccacguuccaccugagcauccccaacuucaaccaguacgaggccauguccugcgacuucaacgggggcaagaucagcgugcaguacaaccucucccacagcuucgcgguggacgccgccaaccacugcgggaccaucgccaacggcguccugcagaccuucaugcggauggcguggggcggguccuacaucgcccuggacagcggcaaggggaacugggacugcaucaugaccuccuaccaguaccucaucauccagaacacgaccugggaggaccacugccaguucagccgccccucccccaucggcuaccuggggcugcucagccagcggacccgcgacaucuacaucagccggcgccugcugggcaccuucacguggacccucuccgacagcgagggcaacgaggcccccgggggcuacugccugacccgguggaugcugaucgaggccgagcucaagugcuucgggaacaccgccguggcgaagugcaacgagaagcacgacgaggaguucugcgacaugcugcgccuguucgacuucaacaagcaggccaucaagcggcucaagacggaggcccagauguccauccagcugaucaacaaggccgugaacgcccugaucaacgaccagcucaucaugaagaaccaccuccgcgacaucaugggcauccccuacugcaacuacagccgguacugcuaccugaaccacaccgucaccgggaagaccucccugccccgcugcugccuggugagcaacggcuccuaccugaacgagacgcacuucagcgacgacaucgagcagcaggcggacaacaugaucaccgagaugcuccagaaggaguacauggaccggcagggcaagaccccgcuggggcugguggaccucuucgucuucuccaccagcuucuaccugaucuccaucuuccugcaccuggugaagaucccgacgcaccgccacaucgugggcaagcccugccccaagccccaccggcucaaccacauggggaucugcagcugcggccuguacaagcacccggggguccccgugaaguggaagcgcugaggacuaguaauaaggaaacuguaugaaugucugugggcaggaagugaagagauccuucuguaaagguuuuuggaauuaugucugcugaauaauaaacuuuuuugaaauaauaaaucugguagaaaaaugagaucuaaaaaaaaaaaaaaaaaaaaaaaaaaaaaaaaaaaaaaaaaaaaaaaaaaaaaaaaaaaaaaaaaaaaaaaaaaaaaaaaaaaaaaaaaaaaaaaaaaaa

SEQ ID NO: 39400 - RNA, 1785 nt, Artificial Sequence
  mRNA product Design b-4 (A100) comprising derived and/or modified sequence from LASV(GA391;Clade III)__CAA36645__GPCmut11 (opt1)
aggagagucccgcagucggcguccagcggcucugcuuguucgugugugugucguugcaggccuuauucaagcuuaccaugggccagaucgugaccuucuuccaggaggucccccacgugaucgaggaggugaugaacaucguccugaucgcccucagcauccuggccauccugaaggggcucuacaacguggcgaccugcggccugaucgggcuggugacguuccuccugcuguccggccgcagcugcucccucaucuacaaggggaccuacgagcugcagacccuggagcucaacauggagacccugaacaugacgaugccgcugagcugcaccaagaacaacucccaccacuacauccgggucggcaacgagaccggccucgagcugacccugacgaacaccagcauccucaaccacaaguucugcaaccuguccgacgcccacaagcgcaaccuguacgaccacagccucauguccaucaucagcaccuuccaccuguccauccccaacuucaaccaguacgaggccaugagcugcgacuucaacgggggcaagaucaccgugcaguacaaccugucccacagcuucgccguggacgccgcggggcacugcggcacgcucgccaacgggguccugcagaccuucaugcggauggccuggggcggcuccuacaucgcccuggacagcgggcgcggcaacugggacugcaucaugaccuccuaccaguaccucaucauccagaacaccacgugggacgaccacugccaguucagccggcccucccccaucggguaccugggccugcucagccagcgcacccgggacaucuacaucagccgccggcugcugggcaccuucaccuggacgcucuccgacagcgaggggaacgagaccccgggcggguacugccugacccgcuggaugcugaucgaggcggagcucaagugcuucggcaacaccgccguggccaagugcaacgagaagcacgacgaggaguucugcgacaugcugcggcuguucgacuucaacaagcaggccauccgccggcucaagacggaggcccagauguccauccagcugaucaacaaggcggugaacgcccugaucaacgaccagcucaucaugaagaaccaccuccgcgacaucauggggauccccuacugcaacuacagccgguacugcuaccugaaccacaccuccaccggcaagaccagccugccccgcugcugccugaucuccaacggcagcuaccugaacgagacgaaguucuccgacgacaucgagcagcaggccgacaacaugaucaccgagaugcuccagaaggaguacaucgaccggcaggggaagacgccccugggccuggucgaccuguucguguucagcaccuccuucuaccucaucagcaucuuccugcaccuggugaagaucccgacccaccgccacaucgucgggaagcccugccccaagccccaccggcucaaccacaugggcaucugcuccugcgggcuguacaagcagccgggcgugcccgugcgcuggaagcggugaggacuaguaauaaggaaacuguaugaaugucugugggcaggaagugaagagauccuucuguaaagguuuuuggaauuaugucugcugaauaauaaacuuuuuugaaauaauaaaucugguagaaaaaugagaucuaaaaaaaaaaaaaaaaaaaaaaaaaaaaaaaaaaaaaaaaaaaaaaaaaaaaaaaaaaaaaaaaaaaaaaaaaaaaaaaaaaaaaaaaaaaaaaaaaaaa

SEQ ID NO: 39401 - RNA, 1788 nt, Artificial Sequence
  mRNA product Design b-4 (A100) comprising derived and/or modified sequence from LASV(AV;Clade V)__CCA30314__GPCmut11 (opt1)
aggagagucccgcagucggcguccagcggcucugcuuguucgugugugugucguugcaggccuuauucaagcuuaccaugggccagaucgugaccuucuuccaggaggucccccacgugaucgaggaggugaugaacaucguccugaucgcccucagcauccuggccgugcugaaggggcucuacaacaucgcgaccugcggccugaucgggcugaucacguuccuccugcugugcggccgcuccugcagcuccaaccucuacaaggggguguacgagcugcagagccuggaccucaacauggagacccugaacaugaccaugccgcuguccugcaccaagaacaacagccaccacuacauccgggucggcaacgacacgggccucgagcugacccugaccaacaccuccauccucaaccacaaguucugcaaccugagcgacgcccacaagaaggaccuguacgaccacgcccucauguccaucaucagcacguuccaccuguccauccccaacuucaaccaguacgaggccaugagcugcgacuucaacgggggcaagaucuccgugcaguacaaccugagccacuccuacgccaucgacgcggccaaccacugcgggaccguggccaacggcauccuccagaccuucaugcgcauggccuggggcgggagcuacaucgcgcuggacuccggccgggggaacugggacugcaucaugaccagcuaccaguaccugaucauccagaacacgaccugggagaaccacugccaguucucccgccccagccccaucggcuaccucgggcugcugagccagcggacccgcgacaucuacaucucccggcgccuccugggcaccuucacguggacccugagcgacuccgagggcaacgccacccccgggggcuacugccucacccgguggaugcugaucgaggccgagcugaagugcuucgggaacacggccgucgccaagugcaacgagaagcacgacgaggaguucugcgacaugcuccgccuguucgacuucaacaagcaggcgaucagccggcugaaguccgaggcccagaugagcauccagcucaucaacaaggccgugaacgcccugaucaacgaccagcugaucaugaagaaccaccuccgcgacaucaugggcauccccuacugcaacuacuccaaguacugcuaccugaaccacaccaucaccgggaagaccagccugcccaagugcugccucguguccaacggcagcuaccugaacgagacgcacuucuccgacgacaucgagcagcaggccgacaacaugaucaccgagaugcugcagaaggaguacauggagcggcagggcaagaccccgcucgggcuggucgaccuguucguguucagcaccuccuucuaccugaucagcaucuuccuccgccuggugaagaucccgacgcaccggcacaucgucggcaagcccugccccaagccccaccgccugaaccacauggggaucugcuccugcggccucuacaagcagccgggggugcccgugcgguggaagcgcugaggacuaguaauaaggaaacuguaugaaugucugugggcaggaagugaagagauccuucuguaaagguuuuuggaauuaugucugcugaauaauaaacuuuuuugaaauaauaaaucugguagaaaaaugagaucuaaaaaaaaaaaaaaaaaaaaaaaaaaaaaaaaaaaaaaaaaaaaaaaaaaaaaaaaaaaaaaaaaaaaaaaaaaaaaaaaaaaaaaaaaaaaaaaaaaaa

SEQ ID NO: 39402 - RNA, 1785 nt, Artificial Sequence
  mRNA product Design b-4 (A100) comprising derived and/or modified sequence from LASV(Togo/2016/7082;Clade VI)__AMR44577__GPCmut11 (opt1)
aggagagucccgcagucggcguccagcggcucugcuuguucgugugugugucguugcaggccuuauucaagcuuaccaugggccagaucaucaccuucuuccaggaggugccccacgucaucgaggaggugaugaacaucgugcugaucgcccucagccugcuggccauccucaagggggucuacaacguggcgaccugcggcaucaucgggcuggugacguuccuguuccucugcggccgcuccugcagccugaucuacaagggguccuacgagcugcagacccucgagcugaacauggagacccugaacaugaccaugccgcucagcugcacgaagaacuccagccaccacuacauccgggucggcaacgagaccggccuggagcugacccucaccaacacguccaucaucaaccacaaguucugcaaccugagcgacgcccacaagcgcaaccuguacgaccacgcccucauguccauccugagcaccuuccaccuguccauccccaacuucaaccaguacgaggccaugagcugcgacuucaacgggggcaagaucuccgugcaguacaaccucagccacgccuacgcgguggacgccgccgagcacugcgggaccgucgccaacggcgugcugcagaccuucaugcggauggcguggggcggguccuacaucgcccuggacagcggccgcgggaacugggacugcaucaugacguccuaccaguaccucaucauccagaacaccaccugggaggaccacugccaguucagccggcccucccccaucggcuaccuggggcugcucagccagcgcacccgggacaucuacaucagccgccggcugcugggcacguucaccuggacccucuccgacagcgagggcaacgagacccccgggggcuacugccugacgcgcuggaugcugaucgaggccgagcucaagugcuucgggaacaccgccguggccaagugcaacgagaagcacgacgaggaguucugcgacaugcugcggcuguucgacuucaacaagcaggcgauccagcgccucaaguccgaggcccagaugagcauccagcugaucaacaaggccgucaacgcccugaucaacgaccagcucaucaugaagaaccaccuccgggacaugaugggcauccccuacugcaacuacuccaaguacugcuaccugaaccacaccagcuccgggcgcaccagccugcccaagugcugccugguguccaacggcagcuaccugaacgagacgcacuucuccgacgacaucgagcagcaggccgacaacaugaucaccgagaugcuccagaaggaguacaucgaccggcagggcaagaccccgcuggggcugguggaccucuucgucuucagcaccuccuucuaccugaucagcaucuuccugcaccugaucaagaucccgacgcaccgccacaucgugggcaagcccugccccaagccccaccggcucaaccacauggggaucugcuccugcggccuguacaagcagccgggggugcccacccgcuggaagcggugaggacuaguaauaaggaaacuguaugaaugucugugggcaggaagugaagagauccuucuguaaagguuuuuggaauuaugucugcugaauaauaaacuuuuuugaaauaauaaaucugguagaaaaaugagaucuaaaaaaaaaaaaaaaaaaaaaaaaaaaaaaaaaaaaaaaaaaaaaaaaaaaaaaaaaaaaaaaaaaaaaaaaaaaaaaaaaaaaaaaaaaaaaaaaaaaa

SEQ ID NO: 39403 - RNA, 1785 nt, Artificial Sequence
  mRNA product Design b-4 (A100) comprising derived and/or modified sequence from LASV(KAK-428;Clade n.d. (VII))__ANH09740__GPCmut11 (opt1)
aggagagucccgcagucggcguccagcggcucugcuuguucgugugugugucguugcaggccuuauucaagcuuaccaugggccagaucgugaccuucuuccaggaggucccccacgugaucgaggaggugaugaacaucguccugaucgcccucagccugcuggccauccucaaggggcuguacaacuucgcgaccugcggcgugaucgggcugaucacguuccuccugcugugcggccgcuccugcagcgccaccuacaaggggcaguacgagcuccagacccuggagcugaacauggagucccucaacaugaccaugccgcugagcugcacgaagaacaacucccaccacuacauccgggccggcaacaacaccggccuggagcucacccugaccaacacgagcaucaucucccacaaguucugcaaccugagcgacgcccacaagaagaaccucuacgaccacacccugauguccaucaucaccaccuuccaccugagcauccccaacuucaaccaguacgaggccauguccugcgacuucaacgggggcaagaucagcauccaguacaaccucucccacagcuacgcgggggacgccgcccagcacugcggcacgguggccaacgggguccugcagaccuucaugcgcauggcguggggcggcuccuaccuggcccucgacagcgggcggcgcggcugggacugcaucaucuccagcuaccaguaccugaucauccagaacaccaccugggacgaccacugccaguucucccggcccagccccaucggguaccugggcuucgugagccagaagacgcgcgacaucuacaucucccggcgccuccugggcaccuucaccuggacccugagcgacuccgaggggcacgacaugccgggcggguacugccucacgcgguggaugcugaucgaggccgaccugaagugcuucggcaacaccgccguggccaagugcaacgagaagcacgacgaggaguucugcgacauguggcgccucuucgacuucaacaagcaggcgauccagcggcugaaggccgaggcccagaugaacauccagcugaucaacaaggccgucaacgcccucaucaacgaccagcugaugaugaagaaccaccuccgcgacaucauggggauccccuacugcaacuacagcaaguucugcuaccugaacaacaccaccacgggccggaccucccugccccgcugcugccugaucagcaacggcuccuaccucaacgagacccacuucagcgacgacaucgagcagcaggcggacaacaugaucaccgagaugcugcagaaggaguacauggaccggcaggggaagacgccccugggccucguggaccuguucguguucuccaccagcuucuaccugaucaccaucuuccuccaccuggucaagaucccgacccaccgccacaucguggggaagcccugccccaagccccaccggcugaaccacaugggcaucugcuccugcgggcuguacaagcagccgggcgugcccguccgcuggaagcggugaggacuaguaauaaggaaacuguaugaaugucugugggcaggaagugaagagauccuucuguaaagguuuuuggaauuaugucugcugaauaauaaacuuuuuugaaauaauaaaucugguagaaaaaugagaucuaaaaaaaaaaaaaaaaaaaaaaaaaaaaaaaaaaaaaaaaaaaaaaaaaaaaaaaaaaaaaaaaaaaaaaaaaaaaaaaaaaaaaaaaaaaaaaaaaaaa

SEQ ID NO: 39404 - RNA, 1785 nt, Artificial Sequence; identical to SEQ ID NO: 39398
  mRNA product Design b-4 (A100) comprising derived and/or modified sequence from LASV(Pinneo-NIG-1969;Clade I)__AIT17836__GPCmut11 (opt1)

SEQ ID NO: 39405 - RNA, 1785 nt, Artificial Sequence
  mRNA product Design b-4 (A100) comprising derived and/or modified sequence from LASV(ISTH0009-NIG-2011;Clade II)__AIT17404__GPCmut11 (opt1)
aggagagucccgcagucggcguccagcggcucugcuuguucgugugugugucguugcaggccuuauucaagcuuaccaugggccagaucaucaccuucuuccaggaggugccccacgucaucgaggaggugaugaacaucgugcugaucgcccucagccugcuggccauccucaaggggaucuacaacgucgcgaccugcggccuguucgggcugguguccuuccuccugcugugcggccgcagcugcuccacgaccuacaaggggguguacgagcuccagacccuggagcuggacauggccagccucaacaugaccaugccgcuguccugcacgaagaacaacagccaccacuacaucauggucggcaacgagaccggccuggagcucacccugaccaacacguccaucaucaaccacaaguucugcaaccugagcgacgcccacaagaagaaccucuacgaccacgcccugauguccaucaucagcaccuuccaccuguccauccccaacuucaaccaguacgaggccaugagcugcgacuucaacgggggcaagaucuccgugcaguacaaccucagccacgcguacgccguggacgccgccaaccacugcgggaccaucgcgaacggcguccugcagaccuucaugcggauggccuggggcggguccuacaucgcccuggacagcggcaagggguccugggacugcaucaugacgagcuaccaguaccucaucauccagaacaccaccugggaggaccacugccaguucucccgccccagccccaucggcuaccuggggcugcucagccagcggacccgcgacaucuacaucucccggcgccugcugggcacguucaccuggacccucagcgacuccgagggcaacgagacccccgggggcuacugccugacgcgguggaugcugaucgaggccgagcucaagugcuucgggaacaccgccguggcgaagugcaacgagaagcacgacgaggaguucugcgacaugcugcgccuguucgacuucaacaagcaggccauccggcgccucaagaccgaggcccagaugagcauccagcugaucaacaaggccgugaacgcccugaucaacgaccagcucaucaugaagaaccaccuccgggacaucaugggcaucccguacugcaacuacuccaaguacugcuaccugaaccacaccgucacggggaagaccagccugccccgcugcugccugguguccaacggcagcuaccugaacgagacccacuucuccgacgacaucgagcagcaggcggacaacaugaucaccgagcuccugcagaaggaguacauggaccggcagggcaagacgccccuggggcucguggaccuguucgucuucagcaccuccuucuaccugaucagcaucuuccugcaccucaucaagaucccgacccaccgccacaucaccggcaagcccugccccaagccccaccggcugaaccacauggggaucugcuccugcggccuguacaagcacccgggggugcccgugaaguggaagcgcugaggacuaguaauaaggaaacuguaugaaugucugugggcaggaagugaagagauccuucuguaaagguuuuuggaauuaugucugcugaauaauaaacuuuuuugaaauaauaaaucugguagaaaaaugagaucuaaaaaaaaaaaaaaaaaaaaaaaaaaaaaaaaaaaaaaaaaaaaaaaaaaaaaaaaaaaaaaaaaaaaaaaaaaaaaaaaaaaaaaaaaaaaaaaaaaaa

SEQ ID NO: 39406 - RNA, 1785 nt, Artificial Sequence
  mRNA product Design b-4 (A100) comprising derived and/or modified sequence from LASV(ISTH2010-NIG-2012;Clade II)__AIT17482__GPCmut11 (opt1)
aggagagucccgcagucggcguccagcggcucugcuuguucgugugugugucguugcaggccuuauucaagcuuaccaugggccagaucaucaccuucuuccaggaggugccccacgucaucgaggaggugaugaacaucgugcugaucgcccucagccugcuggccauccucaaggggaucuacaacgucgcgaccugcggccuguucgggcugguguccuuccuccugcugugcggccgcagcugcuccacgaccuacaaggggguguacgagcuccagacccuggagcuggacauggccagccucaacaugaccaugccgcuguccugcacgaagaacaacagccaccacuacaucauggucggcaacgagaccggccuggagcucacccugaccaacacguccaucaucaaccacaaguucugcaaccugagcgacgcccacaagaagaaccucuacgaccacgcccugauguccaucaucagcaccuuccaccuguccauccccaacuucaaccaguacgaggccaugagcugcgacuucaacgggggcaagaucuccgugcaguacaaccucagccacgcguacgccguggacgccgccaaccacugcgggaccaucgcgaacggcguccugcagaccuucaugcggauggccuggggcggguccuacaucgcccuggacagcggcaagggguccugggacugcaucaugacgagcuaccaguaccucaucauccagaacaucaccugggaggaccacugccaguucucccgccccagccccaucggcuaccuggggcugcucagccagcggacccgcgacaucuacaucucccggcgccugcugggcaccuucacguggacccucagcgacuccgagggcaacgagacccccgggggcuacugccugacccgguggaugcugaucgaggccgagcucaagugcuucgggaacacggccguggcgaagugcaacgagaagcacgacgaggaguucugcgacaugcugcgccuguucgacuucaacaagcaggccauccggcgccucaagaccgaggcccagaugagcauccagcugaucaacaaggccgugaacgcccugaucaacgaccagcucaucaugaagaaccaccuccgggacaucaugggcauccccuacugcaacuacuccaaguacugcuaccugaaccacaccgucaccgggaagacgagccugccccgcugcugccugguguccaacggcagcuaccugaacgagacccacuucuccgacgacaucgagcagcaggcggacaacaugaucaccgagcuccugcagaaggaguacaucgaccggcagggcaagaccccgcuggggcucguggaccuguucgucuucagcacguccuucuaccugaucagcaucuuccugcaccucgugaagaucccgacccaccgccacguggucggcaagcccugccccaagccccaccggcugaaccacauggggaucugcuccugcggccuguacaagcacccgggggugcccgugaaguggaagcgcugaggacuaguaauaaggaaacuguaugaaugucugugggcaggaagugaagagauccuucuguaaagguuuuuggaauuaugucugcugaauaauaaacuuuuuugaaauaauaaaucugguagaaaaaugagaucuaaaaaaaaaaaaaaaaaaaaaaaaaaaaaaaaaaaaaaaaaaaaaaaaaaaaaaaaaaaaaaaaaaaaaaaaaaaaaaaaaaaaaaaaaaaaaaaaaaaa

SEQ ID NO: 39407 - RNA, 1785 nt, Artificial Sequence
  mRNA product Design b-4 (A100) comprising derived and/or modified sequence from LASV(Lassa virus/H.sapiens-wt/NGA/2015/ISTH_0543;Clade II)__AVO03639__GPCmut11 (opt1)
aggagagucccgcagucggcguccagcggcucugcuuguucgugugugugucguugcaggccuuauucaagcuuaccaugggccagaucaucaccuucuuccaggaggugccccacgucaucgaggaggugaugaacaucgugcugaucgcccucagccugcuggccauccucaaggggaucuacaacgucgcgaccugcggccuguucgggcugguguccuuccuccugcugugcggccgcagcugcuccacgaccuacaaggggguguacgagcuccagacccuggagcuggacauggccaaccucaacaugaccaugccgcugagcugcacgaagaacaacucccaccacuacaucauggucggcaacgagaccggccuggagcucacccugaccaacacgagcaucaucaaccacaaguucugcaaccuguccgacgcccacaagaagaaccucuacgaccacgcccugaugagcaucaucuccaccuuccaccugagcauccccaacuucaaccaguacgaggccauguccugcgacuucaacgggggcaagaucagcgugcaguacaaccucucccacaccuacgcgguggacgccgccaaccacugcgggaccaucgccaacggcguccugcagacguucaugcggauggcguggggcgggagcuacaucgcccuggacuccggcaaggggagcugggacugcaucaugaccuccuaccaguaccucgugauccagaacaccaccugggaggaccacugccaguucagccgccccucccccaucggcuaccuggggcugcucagccagcggacgcgcgacaucuacaucagccggcgccugcugggcaccuucaccuggacccucuccgacagcgagggcaacgagacgcccgggggcuacugccugacccgguggaugcugaucgaggccgagcucaagugcuucgggaacaccgccguggccaagugcaacgagaagcacgacgaggaguucugcgacaugcugcgccuguucgacuucaacaagcaggcgauccggcgccucaagaccgaggcccagauguccauccagcugaucaacaaggccgucaacgcccugaucaacgaccagcucaucaugaagaaccaccuccgggacaucaugggcauccccuacugcaacuacagcaaguacugcuaccugaaccacacggugaccgggaagaccucccugccccgcugcugccuggugagcaacggcuccuaccugaacgagacccacuucagcgacgacaucgagcagcaggccgacaacaugaucacggagcuccugcagaaggaguacaucgaccggcagggcaagaccccgcuggggcucgucgaccuguucguguucuccaccagcuucuaccugaucuccaucuuccugcaccucgugaagaucccgacccaccgccacaucacgggcaagcccugccccaagccccaccggcugaaccacauggggaucugcagcugcggccuguacaagcacccggggguccccgugaaguggaagcgcugaggacuaguaauaaggaaacuguaugaaugucugugggcaggaagugaagagauccuucuguaaagguuuuuggaauuaugucugcugaauaauaaacuuuuuugaaauaauaaaucugguagaaaaaugagaucuaaaaaaaaaaaaaaaaaaaaaaaaaaaaaaaaaaaaaaaaaaaaaaaaaaaaaaaaaaaaaaaaaaaaaaaaaaaaaaaaaaaaaaaaaaaaaaaaaaaa

SEQ ID NO: 39408 - RNA, 1785 nt, Artificial Sequence
  mRNA product Design b-4 (A100) comprising derived and/or modified sequence from LASV(Lassa virus/H.sapiens-wt/NGA/2016/ISTH_0009;Clade II)__AVO03571__GPCmut11 (opt1)
aggagagucccgcagucggcguccagcggcucugcuuguucgugugugugucguugcaggccuuauucaagcuuaccaugggccagaucaucaccuucuuccaggaggugccccacgucaucgaggaggugaugaacaucgugcugaucgcccucagccugcuggccauccucaaggggaucuacaacgucgcgaccugcggccugcuggggcucguguccuuccugcugcucugcggccgcagcugcuccacgaccuacaaggggguguacgagcugcagacccuggagcucgacauggccagccugaacaugaccaugccgcuguccugcacgaagaacaacagccaccacuacaucauggucggcaacgagaccggccucgagcugacccugaccaacacguccaucaucaaccacaaguucugcaaccucagcgacgcccacaagaagaaccuguacgaccacgcccugauguccaucaucagcaccuuccaccucuccauccccaacuucaaccaguacgaggccaugagcugcgacuucaacgggggccggaucuccgugcaguacaaccugagccacuccuacgcgguggacgccgccaaccacugcgggaccaucgccaacggcguccugcagaccuucaugcgcauggcguggggcgggagcuacaucgcccucgacuccggcaaggggagcugggacugcaucaugacguccuaccaguaccugaucauccagaacaccaccugggaggaccacugccaguucagccggcccagccccaucggcuaccuggggcuccugucccagcgcacccgggacaucuacaucagccgccggcugcucggcacguucaccuggacccuguccgacagcgagggcaacgagacccccgggggcuacugccugacgcgcuggaugcucaucgaggccgagcugaagugcuucgggaacaccgccguggccaagugcaacgagaagcacgacgaggaguucugcgacaugcugcggcuguucgacuucaacaagcaggcgauccgccggcugaagaccgaggcccagauguccauccagcugaucaacaaggccgugaacgcccucaucaacgaccagcugaucaugaagaaccaccuccgcgacaucaugggcaucccguacugcaacuacagcaaguacugcuaccucaaccacaccgucacggggaagaccucccugccccggugcugccuggugagcaacggcuccuaccucaacgagacccacuucagcgacgacaucgagcagcaggccgacaacaugaucaccgagcugcugcagaaggaguacaucgaccgccagggcaagacgccccucgggcugguggaccuguucgucuucuccaccagcuucuaccugaucuccaucuuccuccaccuggugaagaucccgacccaccggcacaucaccggcaagcccugccccaagccccaccgccugaaccacauggggaucugcagcugcggccucuacaaccacccgggggugcccgucaaguggaagcggugaggacuaguaauaaggaaacuguaugaaugucugugggcaggaagugaagagauccuucuguaaagguuuuuggaauuaugucugcugaauaauaaacuuuuuugaaauaauaaaucugguagaaaaaugagaucuaaaaaaaaaaaaaaaaaaaaaaaaaaaaaaaaaaaaaaaaaaaaaaaaaaaaaaaaaaaaaaaaaaaaaaaaaaaaaaaaaaaaaaaaaaaaaaaaaaaa

SEQ ID NO: 39409 - RNA, 1785 nt, Artificial Sequence
  mRNA product Design b-4 (A100) comprising derived and/or modified sequence from LASV(Lassa virus/H.sapiens-wt/NGA/2016/ISTH_0017;Clade II)__AVO03567__GPCmut11 (opt1)
aggagagucccgcagucggcguccagcggcucugcuuguucgugugugugucguugcaggccuuauucaagcuuaccaugggccagaucaucaccuucuuccaggaggugccccacgucaucgaggaggugaugaacaucgugcugaucgcccucagccugcuggccauccucaaggggaucuacaacgucgcgaccugcggccuguucgggcugguguccuuccuccugcugugcggccgcagcugcuccacgaccuacaaggggguguacgagcuccagacccuggagcuggacauggccagccucaacaugaccaugccgcuguccugcacgaagaacaacagccaccacuacaucauggucggcaacgagaccggccuggagcucacccugaccaacacguccaucaucaaccacaaguucugcaaccugagcgacgcccacaagaagaaccucuacgaccacgcccugauguccaucaucagcaccuuccaccuguccauccccaacuucaaccaguacgaggccaugagcugcgacuucaacgggggcaagaucuccgugcaguacaaccucagccacaccuacgcgaucgacgccgccaaccacugcgggaccaucgccaacggcgugcugcagacguucaugcggauggcguggggcggguccuacaucgcccuggacagcggcaagggguccugggacugcaucaugaccagcuaccaguaccucaucauccagaacaccaccugggaggaccacugccaguucucccgccccagccccaucggcuaccuggggcugcucagccagcggacgcgcgacaucuacaucucccggcgccugcugggcaccuucaccuggacccucagcgacuccgagggcaacgagacgcccgggggcuacugccugacccgguggaugcugaucgaggccgagcucaagugcuucgggaacaccgccgucgccaagugcaacgagaagcacgacgaggaguucugcgacaugcugcgccuguucgacuucaacaagcaggcgauccggcgccucaagaccgaggcccagaugagcauccagcugaucaacaaggccgugaacgcccugaucaacgaccagcucaucaugaagaaccaccuccgggacaucaugggcauccccuacugcaacuacuccaaguacugcuaccugaaccacacggugaccgggaagaccagccugccccgcugcugccuggucuccaacggcagcuaccugaacgagacccacuucuccgacgacaucgagcagcaggccgacaacaugaucacggagcuccugcagaaggaguacauggaccggcagggcaagaccccgcuggggcucguggaccuguucguguucagcaccuccuucuaccugaucagcaucuuccugcaccucguccgcaucccgacccaccggcacgugaucggcaagcccugccccaagccccaccgccugaaccacauggggaucugcuccugcggccuguacaagcacccgggggugcccgucaaguggaagcggugaggacuaguaauaaggaaacuguaugaaugucugugggcaggaagugaagagauccuucuguaaagguuuuuggaauuaugucugcugaauaauaaacuuuuuugaaauaauaaaucugguagaaaaaugagaucuaaaaaaaaaaaaaaaaaaaaaaaaaaaaaaaaaaaaaaaaaaaaaaaaaaaaaaaaaaaaaaaaaaaaaaaaaaaaaaaaaaaaaaaaaaaaaaaaaaaa

SEQ ID NO: 39410 - RNA, 1785 nt, Artificial Sequence
  mRNA product Design b-4 (A100) comprising derived and/or modified sequence from LASV(Lassa virus/H.sapiens-wt/NGA/2018/ISTH_0959;Clade II)__AVV65099__GPCmut11 (opt1)
aggagagucccgcagucggcguccagcggcucugcuuguucgugugugugucguugcaggccuuauucaagcuuaccaugggccagaucaucaccuucuuccaggaggugccccacgucaucgaggaggugaugaacaucgugcugaucgcccucagccugcuggccauccucaaggggaucuacaacgucgugaccugcggccuguucgggcugguguccuuccuccugcugugcggccgcagcugcuccacgaccuacaagggggucuacgagcuccagacccuggagcuggacauggcgagccucaacaugaccaugccgcuguccugcacgaagaacaacagccaccacuacaucauggugggcaacgagaccggccuggagcucacccugaccaacacguccaucaucaaccacaaguucugcaaccugagcgacgcccacaagaagaaccucuacgaccacgcccugauguccaucaucagcaccuuccaccuguccauccccaacuucaaccaguacgaggccaugagcugcgacuucaacgggggcaagaucuccgugcaguacaaccucagccacgccuacgcgaucgacgccgccaaccacugcgggaccaucgccaacggcguccugcagaccuucaugcggauggcguggggcggguccuacaucgcccuggacagcggcaagggguccugggacugcaucaugacgagcuaccaguaccucaucauccagaacaccaccugggaggaccacugccaguucucccgccccagccccaucggcuaccuggggcugcucagccagcggacccgcgacaucuacaucucccggcgccugcugggcacguucaccuggacccucagcgacuccgagggcaacgagacccccgggggcuacugccugacgcgguggaugcugaucgaggccgagcucaagugcuucgggaacaccgccguggccaagugcaacgagaagcacgacgaggaguucugcgacaugcugcgccuguucgacuucaacaagcaggcgauccggcgccucaagaccgaggcccagaugagcauccagcugaucaacaaggccgugaacgcccugaucaacgaccagcucaucaugaagaaccaccuccgggacaucaugggcaucccguacugcaacuacuccaaguacugcuaccugaaccacaccgucacggggaagaccagccugccccgcugcugccugguguccaacggcagcuaccugaacgagacccacuucuccgacgacaucgagcagcaggccgacaacaugaucaccgagcuccugcagaaggaguacaucgaccggcagggcaagacgccccuggggcucguggaccuguucgucuucagcaccuccuucuaccugaucagcaucuuccugcaccucgugaagaucccgacccaccgccacgugaucggcaagcccugccccaagccccaccggcugaaccacauggggaucugcuccugcggccuguacaagcacccggggguccccgugaaguggaagcgcugaggacuaguaauaaggaaacuguaugaaugucugugggcaggaagugaagagauccuucuguaaagguuuuuggaauuaugucugcugaauaauaaacuuuuuugaaauaauaaaucugguagaaaaaugagaucuaaaaaaaaaaaaaaaaaaaaaaaaaaaaaaaaaaaaaaaaaaaaaaaaaaaaaaaaaaaaaaaaaaaaaaaaaaaaaaaaaaaaaaaaaaaaaaaaaaaa

SEQ ID NO: 39411 - RNA, 1785 nt, Artificial Sequence
  mRNA product Design b-4 (A100) comprising derived and/or modified sequence from LASV(LASV003-NIG-2008;Clade II)__AIT17580__GPCmut11 (opt1)
aggagagucccgcagucggcguccagcggcucugcuuguucgugugugugucguugcaggccuuauucaagcuuaccaugggccagaucaucaccuucuuccaggaggugccccacgucaucgaggaggugaugaacaucgugcugaucgcccucagccugcuggccauccucaaggggaucuacaacgucgcgaccugcggccuguucgggcugguguccuuccuccugcugugcggccgcagcugcuccacgaccuacaaggggguguacgagcuccagacccuggagcuggacauggccagccucaacaugaccaugccgcuguccugcacgaagaacaacagccaccacuacaucauggucggcaacgagaccggccuggagcucacccugaccaacacguccaucaucaaccacaaguucugcaaccugagcgacgcccacaagaagaaccucuacgaccacgcccugauguccaucaucagcaccuuccaccuguccauccccaacuucaaccaguacgaggccaugagcugcgacuucaacgggggcaagaucuccgugcaguacaaccucagccacaccuacgcgguggacgccgccaaccacugcgggaccaucgccaacggcguccugcagacguucaugcggauggcguggggcggguccuacaucgcccuggacagcggcaagggguccugggacugcaucaugaccagcuaccaguaccucaucauccagaacaccaccugggaggaccacugccaguucucccgccccagccccaucggcuaccuggggcugcucagccagcggacgcgcgacaucuacaucucccggcgccugcugggcaccuucaccuggacccucagcgacuccgagagcaacgagacgccgggcggguacugccugacccgguggaugcugaucgaggccgagcucaagugcuucggcaacaccgccguggccaagugcaacgagaagcacgacgaggaguucugcgacaugcugcgccuguucgacuucaacaagcaggcgauccggcgccucaaggccgaggcccagauguccauccagcugaucaacaaggccgugaacgcccugaucaacgaccagcucaucaugaagaaccaccuccgggacaucauggggauccccuacugcaacuacagcaaguacugcuaccugaaccacaccgucacgggccgcaccucccugccccggugcugccuggugagcaacggguccuaccugaacgagacccacuucagcgacgacaucgagcagcaggcggacaacaugaucaccgagcuccugcagaaggaguacauggaccgccagggcaagacgccccugggccucguggaccuguucgucuucuccaccagcuucuaccugaucuccaucuuccugcaccucgugaagaucccgacccaccggcacgugaucgggaagcccugccccaagccccaccgccugaaccacaugggcaucugcagcugcgggcuguacaagcacccgggcguccccgugaaguggaagcggugaggacuaguaauaaggaaacuguaugaaugucugugggcaggaagugaagagauccuucuguaaagguuuuuggaauuaugucugcugaauaauaaacuuuuuugaaauaauaaaucugguagaaaaaugagaucuaaaaaaaaaaaaaaaaaaaaaaaaaaaaaaaaaaaaaaaaaaaaaaaaaaaaaaaaaaaaaaaaaaaaaaaaaaaaaaaaaaaaaaaaaaaaaaaaaaaa

SEQ ID NO: 39412 - RNA, 1785 nt, Artificial Sequence
  mRNA product Design b-4 (A100) comprising derived and/or modified sequence from LASV(LASV035-NIG-2009;Clade II)__AIT17588__GPCmut11 (opt1)
aggagagucccgcagucggcguccagcggcucugcuuguucgugugugugucguugcaggccuuauucaagcuuaccaugggccagaucaucaccuucuuccaggaggugccccacgucaucgaggaggugaugaacaucgugcugaucgcccucagccugcuggccauccucaaggggaucuacaacgucgcgaccugcggccuguucgggcugguguccuuccuccugcugugcggccgcagcugcuccacgaccuacaaggggguguacgagcuccagacccuggagcuggacauggccagccucaacaugaccaugccgcuguccugcacgaagaacaacagccaccacuacaucauggucggcaacgagaccggccuggagcucacccugaccaacacguccaucaucaaccacaaguucugcaaccugagcgacgcccacaagaagaaccucuacgaccacgcccugauguccaucaucagcaccuuccaccuguccauccccaacuucaaccaguacgaggccaugagcugcgacuucaacgggggcaagaucuccgugcaguacaaccucagccacgcguacgccguggacgccgccaaccacugcgggaccaucgcgaacggcguccugcagaccuucaugcggauggccuggggcggguccuacaucgcccuggacagcggcaagggguccugggacugcaucaugacgagcuaccaguaccucaucauccagaacaccaccugggaggaccacugccaguucucccgccccagccccaucggcuaccuggggcugcucagccagcggacccgcgacaucuacaucucccggcgccugcugggcacguucaccuggacccucagcgacuccgagggcaacgagacccccgggggcuacugccugacgcgguggaugcugaucgaggccgagcucaagugcuucgggaacaccgccguggcgaagugcaacgagaagcacgacgaggaguucugcgacaugcugcgccuguucgacuucaacaagcaggccauccggcgccucaaggccgaggcccagaugagcauccagcugaucaacaaggccgugaacgcgcugaucaacgaccagcucaucaugaagaaccaccuccgggacaucaugggcauccccuacugcaacuacuccaaguacugcuaccugaaccacaccgucaccgggaagacgagccugccccgcugcugccugguguccaacggcagcuaccugaacgagacccacuucuccgacgacaucgagcagcaggccgacaacaugaucaccgagcuccugcagaaggaguacaucgaccggcagggcaagaccccgcuggggcucguggaccuguucgucuucagcacguccuucuaccugaucagcaucuuccugcaccucgugaagaucccgacccaccgccacgugaucggcaagcccugccccaagccccaccggcugaaccacauggggaucugcuccugcggccuguacaagcacccggggguccccgugaaguggaagcgcugaggacuaguaauaaggaaacuguaugaaugucugugggcaggaagugaagagauccuucuguaaagguuuuuggaauuaugucugcugaauaauaaacuuuuuugaaauaauaaaucugguagaaaaaugagaucuaaaaaaaaaaaaaaaaaaaaaaaaaaaaaaaaaaaaaaaaaaaaaaaaaaaaaaaaaaaaaaaaaaaaaaaaaaaaaaaaaaaaaaaaaaaaaaaaaaaa

SEQ ID NO: 39413 - RNA, 1785 nt, Artificial Sequence
  mRNA product Design b-4 (A100) comprising derived and/or modified sequence from LASV(LASV1000-NIG-2009;Clade II)__AIT17782__GPCmut11 (opt1)
aggagagucccgcagucggcguccagcggcucugcuuguucgugugugugucguugcaggccuuauucaagcuuaccaugggccagaucaucaccuucuuccaggaggugccccacgucaucgaggaggugaugaacaucgugcugaucgcccucagccugcuggccauccucaaggggaucuacaacgucgcgaccugcggccuguucgggcugguguccuuccuccugcugugcggccgcagcugcuccacgaccuacaaggggguguacgagcuccagacccuggagcuggacauggccagccucaacaugaccaugccgcuguccugcacgaagaacaacagccaccacuacaucauggucggcaacgagaccggccuggagcucacccugaccaacacguccaucaucaaccacaaguucugcaaccugagcgacgcccacaagaagaaccucuacgaccacgcccugauguccaucaucagcaccuuccaccuguccauccccaacuucaaccaguacgaggccaugagcugcgacuucaacgggggcaagaucuccgugcaguacaaccucagccacaccuacgcgguggacgccgccaaccacugcgggaccaucgccaacggcguccugcagacguucaugcggauggcguggggcggguccuacaucgcccuggacagcggcaagggguccugggacugcaucaugaccagcuaccaguaccucaucauccagaacaccaccugggaggaccacugccaguucucccgccccagccccaucggcuaccuggggcugcucagccagcggacgcgcgacaucuacaucucccggcgccugcugggcaccuucaccuggacccucagcgacuccgagggcaacgagacgcccgggggcuacugccugacccgguggaugcugaucgaggccgagcucaagugcuucgggaacaccgccguggccaagugcaacgagaagcacgacgaggaguucugcgacaugcugcgccuguucgacuucaacaagcaggcgaucaagcggcucaagaccgaggcccagaugagcauccagcugaucaacaaggccgugaacgcccugaucaacgaccagcucaucaugaagaaccaccuccgcgacaucaugggcauccccuacugcaacuacuccaaguacugcuaccugaaccacacggucaccgggaagaccagccugccccggugcugccugguguccaacggcagcuaccugaacgagacccacuucuccgacgacaucgagcagcaggccgacaacaugaucacggagcuccugcagaaggaguacaucgaccgccagggcaagaccccgcuggggcucguggaccuguucgucuucagcaccuccuucuaccugaucagcaucuuccugcaccucgugaagaucccgacccaccggcacguggucggcaagcccugccccaagccccaccgccugaaccacauggggaucugcuccugcggccuguacaagcacccgggggugcccgugaaguggaagcggugaggacuaguaauaaggaaacuguaugaaugucugugggcaggaagugaagagauccuucuguaaagguuuuuggaauuaugucugcugaauaauaaacuuuuuugaaauaauaaaucugguagaaaaaugagaucuaaaaaaaaaaaaaaaaaaaaaaaaaaaaaaaaaaaaaaaaaaaaaaaaaaaaaaaaaaaaaaaaaaaaaaaaaaaaaaaaaaaaaaaaaaaaaaaaaaaa

SEQ ID NO: 39414 - RNA, 1785 nt, Artificial Sequence
  mRNA product Design b-4 (A100) comprising derived and/or modified sequence from LASV(LASV221-NIG-2010;Clade II)__AIT17624__GPCmut11 (opt1)
aggagagucccgcagucggcguccagcggcucugcuuguucgugugugugucguugcaggccuuauucaagcuuaccaugggccagaucaucaccuucuuccaggaggugccccacgucaucgaggaggugaugaacaucgugcugaucgcccucagccugcuggccauccucaaggggaucuacaacgucgcgaccugcggccuguucgggcugguguccuuccuccugcugugcggccgcagcugcuccacgaccuacaaggggguguacgagcuccagacccuggagcuggacauggccagccucaacaugaccaugccgcuguccugcacgaagaacaacagccaccacuacaucauggucggcaacgagaccggccuggagcucacccugaccaacacguccaucaucaaccacaaguucugcaaccugagcgacgcccacaagaagaaccucuacgaccacgcccugauguccaucaucagcaccuuccaccuguccauccccaacuucaaccaguacgaggccaugagcugcgacuucaacgggggcaagaucuccgugcaguacaaccucagccacaccuacgcgaucgacgccgccaaccacugcgggaccaucgccaacggcgugcugcagacguucaugcggauggcguggggcggguccuacaucgcccuggacagcggcaagggguccugggacugcaucaugaccagcuaccaguaccucaucauccagaacaccaccugggaggaccacugccaguucucccgccccagccccaucggcuaccuggggcugcucagccagcggacgcgcgacaucuacaucucccggcgccugcugggcaccuucaccuggacccucagcgacuccgagggcaacgagacgcccgggggcuacugccugacccgguggaugcugaucgaggccgagcucaagugcuucgggaacaccgccgucgccaagugcaacgagaagcacgacgaggaguucugcgacaugcugcgccuguucgacuucaacaagcaggcgauccggcgccucaagaccgaggcccagaugagcauccagcugaucaacaaggccgugaacgcccugaucaacgaccagcucaucaugaagaaccaccuccgggacaucaugggcauccccuacugcaacuacuccaaguacugcuaccugaaccacacggugaccgggaagaccagccugccccgcugcugccuggucuccaacggcagcuaccugaacgagacccacuucuccgacgacaucgagcagcaggccgacaacaugaucacggagaugcuccagaaggaguacauggaccggcagggcaagaccccgcuggggcugguggaccucuucguguucagcaccuccuucuaccugaucagcaucuuccugcaccuggucaagaucccgacccaccgccacgugaucggcaagcccugccccaagccccaccggcucaaccacauggggaucugcuccugcggccuguacaagcacccgggggugcccgucaaguggaagcgcugaggacuaguaauaaggaaacuguaugaaugucugugggcaggaagugaagagauccuucuguaaagguuuuuggaauuaugucugcugaauaauaaacuuuuuugaaauaauaaaucugguagaaaaaugagaucuaaaaaaaaaaaaaaaaaaaaaaaaaaaaaaaaaaaaaaaaaaaaaaaaaaaaaaaaaaaaaaaaaaaaaaaaaaaaaaaaaaaaaaaaaaaaaaaaaaaa

SEQ ID NO: 39415 - RNA, 1785 nt, Artificial Sequence
  mRNA product Design b-4 (A100) comprising derived and/or modified sequence from LASV(LASV237-NIG-2010;Clade II)__AIT17638__GPCmut11 (opt1)
aggagagucccgcagucggcguccagcggcucugcuuguucgugugugugucguugcaggccuuauucaagcuuaccaugggccagaucaucaccuucuuccaggaggugccccacgucaucgaggaggugaugaacaucgugcugaucgcccucagccugcuggccauccucaaggggaucuacaacgucgcgaccugcggccuguucgggcugguguccuuccuccugcugugcggccgcagcugcuccacgaccuacaaggggguguacgagcuccagacccuggagcuggacauggccagccucaacaugaccaugccgcuguccugcacgaagaacaacagccaccacuacaucauggucggcaacgagaccggccuggagcucacccugaccaacacguccaucaucaaccacaaguucugcaaccugagcgacgcccacaagaaggaccucuacgaccacgcccugauguccaucaucagcaccuuccaccuguccauccccaacuucaaccaguacgaggccaugagcugcgacuucaacgggggcaagaucuccgugcaguacaaccucagccacaccuacgcgguggacgccgccaaccacugcgggaccaucgccaacggcguccugcagacguucaugcggauggcguggggcggguccuacaucgcccuggacagcggcaagggguccugggacugcaucaugaccagcuaccaguaccucaucauccagaacaccaccugggaggaccacugccaguucucccgccccagccccaucggcuaccuggggcugcucagccagcggacgcgcgacaucuacaucucccggcgccugcugggcaccuucaccuggacccucagcgacuccgagggcaacgagacgcccgggggcuacugccugacccgguggaugcugaucgaggccgagcucaagugcuucgggaacaccgccguggccaagugcaacgagaagcacgacgaggaguucugcgacaugcugcgccuguucgacuucaacaagcaggcgauccggcgccucaagaccgaggcccagaugagcauccagcugaucaacaaggccgugaacgcccugaucaacgaccagcucaucaugaagaaccaccuccgggacaucaugggcauccccuacugcaacuacuccaaguacugcuaccugaaccacacggucaccgggaagaccagccugccccgcugcugccugguguccaacggcagcuaccugaacgagacccacuucuccgacgacaucgagcagcaggccgacaacaugaucacggagcuccugcagaaggaguacauggaccggcagggcaagaccccgcuggggcucguggaccuguucgucuucagcaccuccuucuaccugaucagcaucuuccugcaccucaucaagaucccgacccaccgccacaucacgggcaagcccugccccaagccccaccggcugaaccacauggggaucugcuccugcggccuguacaagcacccgggggugcccgugaaguggaagcgcugaggacuaguaauaaggaaacuguaugaaugucugugggcaggaagugaagagauccuucuguaaagguuuuuggaauuaugucugcugaauaauaaacuuuuuugaaauaauaaaucugguagaaaaaugagaucuaaaaaaaaaaaaaaaaaaaaaaaaaaaaaaaaaaaaaaaaaaaaaaaaaaaaaaaaaaaaaaaaaaaaaaaaaaaaaaaaaaaaaaaaaaaaaaaaaaaa

SEQ ID NO: 39416 - RNA, 1785 nt, Artificial Sequence
  mRNA product Design b-4 (A100) comprising derived and/or modified sequence from LASV(LASV253-NIG-2011;Clade II)__AIT17670__GPCmut11 (opt1)
aggagagucccgcagucggcguccagcggcucugcuuguucgugugugugucguugcaggccuuauucaagcuuaccaugggccagaucaucaccuucuuccaggaggugccccacgucaucgaggaggugaugaacaucgugcugaucgcccucagccugcuggccauccucaaggggaucuacaacgucgcgaccugcggccuguucgggcugguguccuuccuccugcugugcggccgcagcugcuccacgaccuacaaggggguguacgagcuccagacccuggagcuggacauggccagccucaacaugaccaugccgcuguccugcacgaagaacaacagccaccacuacaucauggucggcaacgagaccggccuggagcucacccugaccaacacguccaucaucaaccacaaguucugcaaccugagcgacgcccacaagaagaaccucuacgaccacgcccugauguccaucaucagcaccuuccaccuguccauccccaacuucaaccaguacgaggccaugagcugcgacuucaacgggggcaagaucuccgugcaguacaaccucagccacaccuacgcgguggacgccgccaaccacugcgggaccaucgccaacggcguccugcagacguucaugcggauggcguggggcggguccuacaucgcccuggacagcggcaagggguccugggacugcaucaugaccagcuaccaguaccucaucauccagaacaccaccugggaggaccacugccaguucucccgccccagccccaucggcuaccuggggcugcucagccagcggacgcgcgacaucuacaucucccggcgccugcugggcaccuucaccuggacccucagcgacuccgagggcaacgagacgcccgggggcuacugccugacccgguggaugcugaucgaggccgagcucaagugcuucgggaacaccgccguggccaagugcaacgagaagcacgacgaggaguucugcgacaugcugcgccuguucgacuucaacaagcaggcgauccggcgccucaaggccgaggcccagaugagcauccagcugaucaacaaggccgugaacgcccugaucaacgaccagcucaucaugaagaaccaccuccgggacaucaugggcaucccguacugcaacuacuccaaguacugcuaccugaaccacaccgucacggggcgcaccagccugccccggugcugccugguguccaacggcagcuaccugaacgagacccacuucuccgacgacaucgagcagcaggcggacaacaugaucaccgagcuccugcagaaggaguacaucgaccgccagggcaagacgccccuggggcucguggaccuguucgucuucagcaccuccuucuaccugaucagcaucuuccugcaccucgugaagaucccgacccaccggcacaucaucggcaagcccugccccaagccccaccgccugaaccacauggggaucugcuccugcggccuguacaagcacccgggggugcccgucaaguggaagcggugaggacuaguaauaaggaaacuguaugaaugucugugggcaggaagugaagagauccuucuguaaagguuuuuggaauuaugucugcugaauaauaaacuuuuuugaaauaauaaaucugguagaaaaaugagaucuaaaaaaaaaaaaaaaaaaaaaaaaaaaaaaaaaaaaaaaaaaaaaaaaaaaaaaaaaaaaaaaaaaaaaaaaaaaaaaaaaaaaaaaaaaaaaaaaaaaa

SEQ ID NO: 39417 - RNA, 1785 nt, Artificial Sequence
  mRNA product Design b-4 (A100) comprising derived and/or modified sequence from LASV(LASV254-NIG-2011;Clade II)__AIT17674__GPCmut11 (opt1)
aggagagucccgcagucggcguccagcggcucugcuuguucgugugugugucguugcaggccuuauucaagcuuaccaugggccagaucaucaccuucuuccaggaggugccccacgucaucgaggaggugaugaacaucgugcugaucgcccucagccugcuggccauccucaaggggaucuacaacgucgcgaccugcggccuguucgggcugguguccuuccuccugcugugcggccgcagcugcuccacgaccuacaaggggguguacgagcuccagacccuggagcuggacaugaccaaccucaacaugacgaugccgcugagcugcaccaagaacaacucccaccacuacaucauggucggcaacgagaccggccuggagcucacccugacgaacaccagcaucaucaaccacaaguucugcaaccuguccgacgcccacaagaagaaccucuacaaccacgcccugaugagcaucaucuccaccuuccaccugagcauccccaacuucaaccaguacgaggccauguccugcgacuucaacgggggcaagaucagcgugcaguacaaccucucccacagcuacgccguggacgcggccaaccacugcgggaccaucgccaacggcguccugcagacguucaugcggauggccuggggcggguccuacaucgcgcuggacagcggcaaggggaacugggacugcaucaugaccuccuaccaguaccucaucauccagaacaccaccugggaggaccacugccaguucagccgccccucccccaucggcuaccuggggcugcucagccagcggacgcgcgacaucuacaucagccggcgccugcugggcaccuucaccuggacccucuccgacagcgagggcaacgagacgcccgggggcuacugccugacccgguggaugcugaucgaggccgagcucaagugcuucgggaacaccgccguggccaagugcaacgagaagcacgacgaggaguucugcgacaugcugcgccuguucgacuucaacaagcaggccauccggcgccucaagaccgaggcgcaggccaacauccagcugaucaacaaggccgugaacgcccugaucaacgaccagcucaucaugaagaaccaccuccgggacaucaugggcauccccuacugcaacuacuccaaguacugcuaccugaaccacacggucaccgggaagaccagccugccccgcugcugccugguguccaacggcagcuaccugaacgagacccacuucuccgacgacaucgagcagcaggccgacaacaugaucacggagcuccugcagaaggaguacauggaccggcagggcaagaccccgcuggggcucguggaccuguucgucuucagcaccuccuucuaccugaucagcaucuuccugcaccucgugaagaucccgacccaccgccacgugaucggcaagcccugccccaagccccaccggcugaaccacauggggaucugcuccugcggccuguacaagcacccggggguccccgugaaguggaagcgcugaggacuaguaauaaggaaacuguaugaaugucugugggcaggaagugaagagauccuucuguaaagguuuuuggaauuaugucugcugaauaauaaacuuuuuugaaauaauaaaucugguagaaaaaugagaucuaaaaaaaaaaaaaaaaaaaaaaaaaaaaaaaaaaaaaaaaaaaaaaaaaaaaaaaaaaaaaaaaaaaaaaaaaaaaaaaaaaaaaaaaaaaaaaaaaaaa

SEQ ID NO: 39418 - RNA, 1785 nt, Artificial Sequence
  mRNA product Design b-4 (A100) comprising derived and/or modified sequence from LASV(Nig08-A19;Clade III)__ADU56618__GPCmut11 (opt1)
aggagagucccgcagucggcguccagcggcucugcuuguucgugugugugucguugcaggccuuauucaagcuuaccaugggccagaucgugaccuucuuccaggaggucccccacgugaucgaggaggugaugaacaucguccugaucgcccucagcauccuggccauccugaaggggcucuacaacaucgcgaccugcggccugaucgggcuggugacguuccuccugcuguccggccgcagcugcuccaugaccuacaaggggguguacgagcuccagacccuggagcugaacaugaacacccucaacaugacgaugccgcugagcugcaccaagaacaacucccaccacuacaucauggucggcaacgagaccggccuggagcucacccugacgaacaccagccugcuccaccacaaguucugcaaccuguccgacgcccacaagaagaaccuguacgaccacacccucaugagcaucaucuccaccuuccaccugagcauccccaacuucaaccaguacgaggccauguccugcgacuucaacgggggcaagaucacggugcaguacaaccugagccacuccuacgccaucgacgccgcgaaccacugcgggaccguggccaacggcguccuccagaccuucaugcggauggccuggggcgggagcuacaucgcccuggacuccggccgcgggaagugggacugcaucaugaccagcuaccaguaccugaucauccagaacacgaccugggaggaccacugccaguucucccggcccagccccaucggcuaccucgggcugcugucccagcgcacccgggacaucuacaucagccgccggcuccugggcaccuucacguggacccugagcgacuccgagggcaacgagacccccgggggcuacugccucacccgcuggaugcugaucgaggcggagcugaagugcuucgggaacacggccguggccaagugcaacgagaagcacgacgaggaguucugcgacaugcuccggcuguucgacuucaacaagcaggccauccgccggcugaaggccgaggcgcagaugagcauccagcucaucaacaaggccgugaacgcccugaucaacgaccagcugaucaugaagaaccaccuccgcgacaucaugggcauccccuacugcaacuacuccaaguacugcuaccugaaccacaccagcaccgggcggaccucccugccccgcugcugccucgucagcaacggcuccuaccugaacgagacgcacuucagcgacgacaucgagcagcaggccgacaacaugaucaccgagaugcugcagaaggaguaccucgaccggcagggcaagaccccgcuggggcugguggaccuguucguguucuccaccagcuucuaccucaucuccaucuuccugcaccuggucaagaucccgacgcaccgccacaucgugggcaagcccugccccaagccccaccggcucaaccacauggggaucugcagcugcggccuguacaagcagccgggggugcccguccgcuggaagcggugaggacuaguaauaaggaaacuguaugaaugucugugggcaggaagugaagagauccuucuguaaagguuuuuggaauuaugucugcugaauaauaaacuuuuuugaaauaauaaaucugguagaaaaaugagaucuaaaaaaaaaaaaaaaaaaaaaaaaaaaaaaaaaaaaaaaaaaaaaaaaaaaaaaaaaaaaaaaaaaaaaaaaaaaaaaaaaaaaaaaaaaaaaaaaaaaa

SEQ ID NO: 39419 - RNA, 1788 nt, Artificial Sequence
  mRNA product Design b-4 (A100) comprising derived and/or modified sequence from LASV(G1180-SLE-2010;Clade IV)__AIT17168__GPCmut11 (opt1)
aggagagucccgcagucggcguccagcggcucugcuuguucgugugugugucguugcaggccuuauucaagcuuaccaugggccagaucgugaccuucuuccaggaggucccccacgugaucgaggaggugaugaacaucguccugaucgcccucagcauccuggccgugcugaaggggcucuacaacuucgcgaccugcggccugguggggcugcucaccuuccugcugcucugcggccgcuccugcaccgccagccgguacaagggggucuacgagcugcagacccuggagcucaacauggagacccugaacaugacgaugccgcuguccugcaccaagaacaacagccaccacuacaucauggugggcaacgagaccggccucgagcugacccugacgaacaccuccaucaucaaccacaaguucugcaaccucagcgacgcccacaagaagaaccuguacgaccacgcccugauguccaucaucagcaccuuccaccucuccauccccaacuucaaccaguacgaggccaugagcugcgacuucaacgggggcaagaucuccgugcaguacaaccugagccacuccuacgcgggggacgccgccaaccacugcggcaccgucgccaacggggugcugcagacguucaugcgcauggcguggggcggcagcuacaucgcccucgacuccgggcacggcagcugggacugcaucaugaccuccuaccaguaccugaucauccagaacaccaccugggaggaccacugccaguucagccggcccucccccaucggguaccugggccuccugagccagcgcacgcgggacaucuacaucagccgccggcugcucggcaccuucaccuggacccuguccgacagcgaggggaaggacacgccgggcggguacugccugacccgcuggaugcucaucgaggccgagcugaagugcuucggcaacaccgccguggccaagugcaacgagaagcacgacgaggaguucugcgacaugcugcggcuguucgacuucaacaagcaggcgauccagcgccugaaggccgaggcccagauguccauccagcugaucaacaaggccgucaacgcccucaucaacgaccagcugaucaugaagaaccaccuccgggacaucauggggauccccuacugcaacuacagcaaguacugcuaccucaaccacaccacgaccggcaagaccucccugcccaagugcugccuggugagcaacggcuccuaccucaacgagacccacuucagcgacgacaucgagcagcaggcggacaacaugaucacggagaugcugcagaaggaguacauggagcgccaggggaagacgccccugggccucguggaccuguucgucuucuccaccagcuucuaccugaucuccaucuuccugcaccucgugaagaucccgacccaccggcacaucgugggcaagagcugccccaagccccaccgccugaaccacauggggaucugcuccugcgggcuguacaagcagcccggcgucccggugaaguggaagcggugaggacuaguaauaaggaaacuguaugaaugucugugggcaggaagugaagagauccuucuguaaagguuuuuggaauuaugucugcugaauaauaaacuuuuuugaaauaauaaaucugguagaaaaaugagaucuaaaaaaaaaaaaaaaaaaaaaaaaaaaaaaaaaaaaaaaaaaaaaaaaaaaaaaaaaaaaaaaaaaaaaaaaaaaaaaaaaaaaaaaaaaaaaaaaaaaa

SEQ ID NO: 39420 - RNA, 1788 nt, Artificial Sequence
  mRNA product Design b-4 (A100) comprising derived and/or modified sequence from LASV(G1442-SLE-2011;Clade IV)__AIT17180__GPCmut11 (opt1)
aggagagucccgcagucggcguccagcggcucugcuuguucgugugugugucguugcaggccuuauucaagcuuaccaugggccagaucgugaccuucuuccaggaggucccccacgugaucgaggaggugaugaacaucguccugaucgcccucagcauccuggccgugcugaaggggcucuacaacguggcgaccugcggccugaucgggcuggucacguuccuccugcugugcggccgcuccugcaccaccacccucuacaaggggguguacgagcugcagacgcuggagcucaacauggagacccugaacaugaccaugccgcugagcugcaccaagaacaacucccaccacuacauccgggugggcaacgagacgggccucgagcugacccugaccaacaccagcaucaucaaccacaaguucugcaaccucuccgacgcccacaagaagaaccuguacgaccacgcccugaugagcaucaucuccacguuccaccucagcauccccaacuucaaccaguacgaggccauguccugcgacuucaacgggggcaagaucagcguccaguacaaccugucccacagcuacgccggggacgcggccaaccacugcggcaccguggccaacggggugcugcagaccuucaugcgcauggccuggggcggcuccuacaucgcgcucgacagcgggcggggcaacugggacugcaucaugaccuccuaccaguaccugaucauccagaacacgaccugggacgaccacugccaguucagccgccccucccccaucggguaccugggccuccugagccagcggacccgcgacgucuacaucucccggcgccugcucggcaccuucacguggacccugagcgacagcgaggggaaggacaccccgggcggguacugccugacccgguggaugcucaucgaggccgagcugaagugcuucggcaacacggccguggccaagugcaacgagaagcacgacgaggaguucugcgacaugcugcgccucuucgacuucaacaagcaggccauccagcggcugaaggcggaggcccagauguccauccagcugaucaacaaggccgugaacgcccucaucaacgaccagcugaucaugaagaaccaccuccgcgacaucauggggauccccuacugcaacuacagcaaguacugcuaccugaacaacaccgccaccggcaagaccucccugcccaagugcugccugaucagcaacggcuccuaccucaacgagacgcacuucagcgacgacaucgagcaggaggcggacaacaugaucaccgagaugcugcagaaggaguacauggagcggcaggggaagacgccccugggccucgucgaccuguucguguucuccaccagcuucuaccugaucuccaucuuccugcaccucgugaagaucccgacccaccgccacaucgucggcaagagcugccccaagccccaccggcugaaccacauggggaucugcuccugcgggcuguacaagcagcccggcgugccggugcgcuggaagcggugaggacuaguaauaaggaaacuguaugaaugucugugggcaggaagugaagagauccuucuguaaagguuuuuggaauuaugucugcugaauaauaaacuuuuuugaaauaauaaaucugguagaaaaaugagaucuaaaaaaaaaaaaaaaaaaaaaaaaaaaaaaaaaaaaaaaaaaaaaaaaaaaaaaaaaaaaaaaaaaaaaaaaaaaaaaaaaaaaaaaaaaaaaaaaaaaa

SEQ ID NO: 39421 - RNA, 1788 nt, Artificial Sequence
  mRNA product Design b-4 (A100) comprising derived and/or modified sequence from LASV(G3010-SLE-2013;Clade IV)__AIT17344__GPCmut11 (opt1)
aggagagucccgcagucggcguccagcggcucugcuuguucgugugugugucguugcaggccuuauucaagcuuaccaugggccagaucgugaccuucuuccaggaggucccccacgugaucgaggaggugaugaacaucguccugaucgcccucagcauccuggccgugcugaaggggcucuacaacuucgcgaccugcggccugguggggcuggucacguuccuccugcugugcggccgcuccugcaccaccagccucuacaaggggguguacgagcugcagacccuggagcucaacauggagacgcugaacaugaccaugccgcuguccugcaccaagaacaacagccaccacuacaucauggugggcaacgagaccggccucgagcugacgcugaccaacaccuccaucaucaaccacaaguucugcaaccucagcgacgcccacaagaagaaccuguacaaccacgcccugauguccaucaucagcaccuuccaccucuccauccccaacuucaaccaguacgaggccaugagcugcgacuucaacgggggcaagaucuccguccaguacaaccugagccacuccuacgccggggacgcggccagccacugcggcacgguggccaacggggugcugcagaccuucaugcggauggccuggggcggcuccuacaucgcgcucgacagcggguacggcaagugggacugcaucaugaccuccuaccaguaccugaucauccagaacaccacgugggaggaccacugccaguucagccgccccucccccaucggguaccugggccuccugagccagcggacccgcgacaucuacaucagccggcgccugcucggcaccuucaccuggacgcuguccgacagcgaggggaaggacaccccgggcggguacugccugacccgguggaugcucaucgaggccgagcugaagugcuucggcaacaccgccgucgccaagugcaacgagaagcacgacgaggaguucugcgacaugcugcgccucuucgacuucaacaagcaggccauccagcggcugaagacggaggcgcagauguccauccagcugaucaacaaggccgugaacgcccucaucaacgaccagcugaucaugaagaaccaccuccgcgacaucauggggauccccuacugcaacuacagcaaguacugcuaccugaaccacaccaccaccggcaagacgucccugcccaagugcugccuggugagcaacggcuccuaccucaacgagacccacuucagcgacgacaucgagcagcaggccgacaacaugaucaccgagaugcugcagaaggaguacauggagcggcaggggaagacgccccugggccucgucgaccuguucguguucuccaccagcuucuaccugaucuccaucuuccugcaccucgugaagaucccgacccaccgccacaucgucggcaagagcugccccaagccccaccggcugaaccacauggggaucugcuccugcgggcuguacaagcagcccggcgugccggugcgcuggaagcggugaggacuaguaauaaggaaacuguaugaaugucugugggcaggaagugaagagauccuucuguaaagguuuuuggaauuaugucugcugaauaauaaacuuuuuugaaauaauaaaucugguagaaaaaugagaucuaaaaaaaaaaaaaaaaaaaaaaaaaaaaaaaaaaaaaaaaaaaaaaaaaaaaaaaaaaaaaaaaaaaaaaaaaaaaaaaaaaaaaaaaaaaaaaaaaaaa

SEQ ID NO: 39422 - RNA, 1788 nt, Artificial Sequence
  mRNA product Design b-4 (A100) comprising derived and/or modified sequence from LASV(G502-SLE-2009;Clade IV)__AIT17126__GPCmut11 (opt1)
aggagagucccgcagucggcguccagcggcucugcuuguucgugugugugucguugcaggccuuauucaagcuuaccaugggccagaucgugaccuucuuccaggaggucccccacgugaucgaggaggugaugaacaucguccugaucgcccucagcauccuggccgugcugaaggggcucuacaacuucgcgaccugcggccugguggggcugcucacguuccugcugcucugcggccgcuccugcaccaccgggcuguacaagggcgucuacgagcugcagacccucgagcugaacauggagacgcugaacaugaccaugccgcucagcugcaccaagaacaacucccaccacuacaucauggugggcaacgagaccgggcuggagcugacgcucaccaacaccagcaucaucaaccacaaguucugcaaccuguccgacgcccacaagaagaaccuguacgaccacgcccucaugagcaucaucuccaccuuccaccugagcauccccaacuucaaccaguacgaggccauguccugcgacuucaacggcgggaagaucagcgugcaguacaaccugucccacagcuacgccggcgacgcggccgaccacugcgggacggucgccaacggcgugcuccagaccuucaugcggauggccuggggcggguccuacaucgcgcuggacagcggccgcgggcggugggacugcaucaugaccuccuaccaguaccugaucauccagaacaccacgugggaggaccacugccaguucagccgccccucccccaucggcuaccucggccugcugagccagcggacccgcgacaucuacaucucccggcgccuccuggggaccuucaccuggacgcugagcgacagcgagggcaaggacacccccgggggcuacugccucacccgguggaugcugaucgaggccgagcugaagugcuucgggaacaccgccguggccaagugcaacgagaagcacgacgaggaguucugcgacaugcuccgccuguucgacuucaacaagcaggccauccagcggcugaaggcggaggcccagauguccauccagcucaucaacaaggccgucaacgcccugaucaacgaccagcuggugaugaagaaccaccuccgcgacaucaugggcauccccuacugcaacuacagccgguacugcuaccugaaccacacgaccaccggccgcaccucccugcccaagugcugccucgugagcaacggguccuaccugaacgagacgcacuucagcgacgacaucgagcagcaggccgacaacaugaucaccgagaugcugcagaaggaguacauggagcggcagggcaagaccccgcucgggcuggucgaccuguucguguucuccaccagcuucuaccugaucuccaucuuccuccaccuggugaagaucccgacgcaccgccacaucgucggcaagagcugccccaagccccaccggcugaaccacauggggaucugcuccugcggccucuacaagcagcccggcgugccggugaaguggaagcgcugaggacuaguaauaaggaaacuguaugaaugucugugggcaggaagugaagagauccuucuguaaagguuuuuggaauuaugucugcugaauaauaaacuuuuuugaaauaauaaaucugguagaaaaaugagaucuaaaaaaaaaaaaaaaaaaaaaaaaaaaaaaaaaaaaaaaaaaaaaaaaaaaaaaaaaaaaaaaaaaaaaaaaaaaaaaaaaaaaaaaaaaaaaaaaaaaa

SEQ ID NO: 39423 - RNA, 1788 nt, Artificial Sequence
  mRNA product Design b-4 (A100) comprising derived and/or modified sequence from LASV(G733-SLE-2010;Clade IV)__AIT17154__GPCmut11 (opt1)
aggagagucccgcagucggcguccagcggcucugcuuguucgugugugugucguugcaggccuuauucaagcuuaccaugggccagaucgugaccuucuuccaggaggucccccacgugaucgaggaggugaugaacaucguccugaucgcccucagcauccuggccgugcugaaggggcucuacaacuucgcgaccugcggcaucguggggcuggucuccuuccugcuccugugcggccgcagcugcacgaccucccuguacaaggggguguacgagcuccagacccuggagcugaacauggagacccucaacaugacgaugccgcugagcugcaccaagaacaacucccaccacuacaucauggugggcaacgagaccggccuggagcucacccugacgaacaccagcaucaucaaccacaaguucugcaaccuguccgacgcccacaagaagaaccucuacgaccacgcccugaugagcaucaucuccaccuuccaccugagcauccccaacuucaaccaguacgaggccauguccugcgacuucaacgggggcaagaucagcguccaguacaaccucucccacagcuacgccggggacgcggccaaccacugcggcaccaucgccaacggggugcugcagacguucaugcggauggccuggggcggcuccuacaucgcgcuggacagcgggcgcgaccggugggacugcaucaugaccuccuaccaguaccucaucauccagaacaccaccugggaggaccacugccaguucagccgccccucccccaucggcuaccuggggcugcucagccagcggacgcgcgacaucuacaucagccggcgccugcugggcaccuucaccuggacccucuccgacagcgagggcaaggacacgcccgggggcuacugccugacccgguggaugcugaucgaggccgagcucaagugcuucgggaacaccgccguggccaagugcaacgagaagcacgacgaggaguucugcgacaugcugcgccuguucgacuucaacaagcaggccauccagcggcucaaggcggaggcccagauguccauccagcugaucaacaaggccgucaacgcccugaucaacgaccagcucaucaugaagaaccaccuccgcgacaucaugggcauccccuacugcaacuacagcaaguacugcuaccugaaccacaccacgaccgggaagaccucccugcccaagugcugccuggugagcaacggcuccuaccugaacgagacccacuucagcgacgacaucgagcagcaggccgacaacaugaucacggagaugcuccagaaggaguacauggagcggcagggcaagaccccgcuggggcugguggaccucuucgucuucuccaccagcuucuaccugaucuccaucuuccugcaccuggugaagaucccgacccaccgccacguggucggcaagagcugccccaagccccaccggcucaaccacauggggaucugcuccugcggccuguacgggcagcccggcgugccggugaaguggaagcgcugaggacuaguaauaaggaaacuguaugaaugucugugggcaggaagugaagagauccuucuguaaagguuuuuggaauuaugucugcugaauaauaaacuuuuuugaaauaauaaaucugguagaaaaaugagaucuaaaaaaaaaaaaaaaaaaaaaaaaaaaaaaaaaaaaaaaaaaaaaaaaaaaaaaaaaaaaaaaaaaaaaaaaaaaaaaaaaaaaaaaaaaaaaaaaaaaa

SEQ ID NO: 39424 - RNA, 1788 nt, Artificial Sequence
  mRNA product Design b-4 (A100) comprising derived and/or modified sequence from MOPV/LASV reassortant(IGS-1;Clade IV)__AFY05576__GPCmut11 (opt1)
aggagagucccgcagucggcguccagcggcucugcuuguucgugugugugucguugcaggccuuauucaagcuuaccaugggccagaucgugaccuucuuccaggaggucccccacgugaucgaggaggugaugaacaucguccugaucgcccucagcgugcuggccgugcugaaggggcucuacaacuucgcgaccugcggccuggucgggcuggugacguuccuccugcugugcggccgcuccugcaccaccagccucuacaaggggguguacgagcugcagacccuggagcucaacauggagacgcugaacaugaccaugccgcuguccugcaccaagaacaacagccaccacuacaucauggucggcaacgagaccggccucgagcugacgcugaccaacaccuccaucaucaaccacaaguucugcaaccucagcgacgcccacaagaagaaccuguacgaccacgcccugauguccaucaucagcaccuuccaccucuccauccccaacuucaaccaguacgaggccaugagcugcgacuucaacgggggcaagaucuccgugcaguacaaccugagccacuccuacgccggggacgcggccaaccacugcggcacgguggccaacgggguccugcagaccuucaugcggauggccuggggcggcagcuacaucgcgcucgacuccgggcgcggcaacugggacugcaucaugaccagcuaccaguaccugaucauccagaacaccacgugggaggaccacugccaguucucccggcccagccccaucggguaccugggccuccugucccagcgcacccgggacaucuacaucagccgccggcugcucggcaccuucaccuggacgcugagcgacuccgagggggaggacaccccgggcggguacugccugacccgcuggaugcucaucgaggccgagcugaagugcuucggcaacaccgccguggccaagugcaacgagaagcacgacgaggaguucugcgacaugcugcggcuguucgacuucaacaagcaggccauccagcgccugaaggcggaggcccagaugagcauccagcugaucaacaaggccgugaacgcccucaucaacgaccagcugaucaugaagaaccaccuccgggacaucauggggauccccuacugcaacuacuccaaguacugcuaccucaaccacacgaccaccggccgcaccagccugcccaagugcugccuggucuccaacggcagcuaccucaacgagacgcacuucuccgacgacaucgagcagcaggccgacaacaugaucaccgagaugcugcagaaggaguacauggagcggcaggggaagacgccccugggccucguggaccuguucguguucagcaccuccuucuaccugaucagcaucuuccugcaccucgucaagaucccgacccaccgccacaucguggggaaguccugccccaagccccaccggcugaaccacaugggcaucugcagcugcgggcuguacaagcagcccggcgugccggucaaguggaagcgcugaggacuaguaauaaggaaacuguaugaaugucugugggcaggaagugaagagauccuucuguaaagguuuuuggaauuaugucugcugaauaauaaacuuuuuugaaauaauaaaucugguagaaaaaugagaucuaaaaaaaaaaaaaaaaaaaaaaaaaaaaaaaaaaaaaaaaaaaaaaaaaaaaaaaaaaaaaaaaaaaaaaaaaaaaaaaaaaaaaaaaaaaaaaaaaaaa

SEQ ID NO: 39425 - RNA, 1788 nt, Artificial Sequence
  mRNA product Design b-4 (A100) comprising derived and/or modified sequence from LASV(LM765-SLE-2012;Clade IV)__AIT17814__GPCmut11 (opt1)
aggagagucccgcagucggcguccagcggcucugcuuguucgugugugugucguugcaggccuuauucaagcuuaccaugggccagaucgugaccuucuuccaggaggucccccacgugaucgaggaggugaugaacaucguccugaucgcccucagcauccuggccgugcugaaggggcucuacaacuucgcgaccugcggccugguggggcuggucacguuccuccugcugugcggccgcuccugcaccaccagccucuacaaggggguguacgagcugcagacccuggagcucaacauggagacgcugaacaugaccaugccgcuguccugcaccaagaacaacagccaccacuacaucauggugggcaacgagaccggccucgagcugacgcugaccaacaccuccaucaucgaccacaaguucugcaaccucagcgacgcccaccggaagaaccuguacgaccacgcccugauguccaucaucagcaccuuccaccucuccauccccaacuucaaccaguacgaggccaugagcugcgacuucaacgggggcaagaucuccguccaguacaaccugagccacuccuacgccaaggacgcggccgaccacugcgggacgguggccaacggcgugcugcagaccuucaugcgcauggccuggggcgggagcuacaucgcgcucgacuccggccgggggcgcugggacugcaucaugaccagcuaccaguaccugaucauccagaacaccacgugggaggaccacugccaguucucccggcccagccccaucggcuaccuggggcuccugucccagcgcacccgggacaucuacaucagccgccggcugcucggcaccuucaccuggacgcugagcgacuccgagggcaaggacacccccgggggcuacugccugacccgcuggaugcucaucgaggccgagcugaagugcuucgggaacaccgccgucgccaagugcaacgagaagcacgacgaggaguucugcgacaugcugcggcuguucgacuucaacaagcaggccauccagcgccugaaggcggaggcccagaugagcauccagcugaucaacaaggccgugaacgcccucaucaacgaccagcugaucaugaagaaccaccuccgggacaucaugggcauccccuacugcaacuacuccaaguacugcuaccucaaccacacgaccaccgggaagaccagccugcccaagugcugccugguguccaacggcagcuaccucaacgagacgcacuucuccgacgacaucgagcagcaggccgacaacaugaucaccgagaugcugcagaaggaguacauggagcgccagggcaagaccccgcuggggcucgucgaccuguucguguucagcaccuccuucuaccugaucagcaucuuccugcaccucgugaagaucccgacgcaccggcacaucgucggcaagcccugccccaagccccaccgccugaaccacauggggaucugcuccugcggccuguacaagcagccgggggugcccgugaaguggaagcggugaggacuaguaauaaggaaacuguaugaaugucugugggcaggaagugaagagauccuucuguaaagguuuuuggaauuaugucugcugaauaauaaacuuuuuugaaauaauaaaucugguagaaaaaugagaucuaaaaaaaaaaaaaaaaaaaaaaaaaaaaaaaaaaaaaaaaaaaaaaaaaaaaaaaaaaaaaaaaaaaaaaaaaaaaaaaaaaaaaaaaaaaaaaaaaaaa

SEQ ID NO: 39426 - RNA, 1788 nt, Artificial Sequence
  mRNA product Design b-4 (A100) comprising derived and/or modified sequence from LASV(LM776-SLE-2012;Clade IV)__AIT17824__GPCmut11 (opt1)
aggagagucccgcagucggcguccagcggcucugcuuguucgugugugugucguugcaggccuuauucaagcuuaccaugggccagaucgugaccuucuuccaggaggucccccacgugaucgaggaggugaugaacaucguccugaucgcccucagcauccuggccgugcugaaggggcucuacaacuucgcgaccugcggccugguggggcuggucacguuccuccugcugugcggccgcuccugcaccaccagcguguacaaggggguguacgagcuccagacccuggagcugaacauggagacgcucaacaugaccaugccgcuguccugcaccaagaacaacagccaccacuacaucauggucggcaacgagaccggccuggagcucacgcugaccaacaccuccaucaucaaccacaaguucugcaaccugagcgacgcccacaagaagaaccucuacgaccacgcccugauguccaucaucagcaccuuccaccuguccauccccaacuucaaccaguacgaggccaugagcugcgacuucaacgggggcaagaucuccgugcaguacaaccucagccacuccuacgccggggacgcggccaaccacugcggcacgguggccaacgggguccugcagaccuucaugcggauggccuggggcggcagcuacaucgcgcuggacuccgggcacggcaagugggacugcaucaugaccagcuaccaguaccucaucauccagaacaccacgugggaggaccacugccaguucucccgccccagccccaucggguaccugggccugcucucccagcggacccgcgacaucuacaucagccggcgccugcugggcaccuucaccuggacgcucagcgacuccgaggggaaggacaccccgggcggguacugccugacccgguggaugcugaucgaggccgagcucaagugcuucggcaacaccgccguggccaagugcaacgagaagcacgacgaggaguucugcgacaugcugcgccuguucgacuucaacaagcaggccauccagcggcucaaggcggaggcccagaugagcauccagcugaucaacaaggccgugaacgcccugaucaacgaccagcucaucaugaagaaccaccuccgcgacaucauggggauccccuacugcaacuacuccaaguacugcuaccugaaccacacgaccaccggcaagaccagccugcccaagugcugccuggucuccaacggcagcuaccugaacgagacgcacuucuccgacgacaucgagcagcaggccgacaacaugaucaccgagaugcuccagaaggaguacauggagcggcaggggaagacgccccugggccugguggaccucuucguguucagcaccuccuucuaccugaucagcaucuuccugcaccuggucaagaucccgacccaccgccacaucguggggaaguccugccccaagccccaccggcucaaccacaugggcaucugcagcugcgggcuguacaagcagcccggcgugccgguccgcuggaagcggugaggacuaguaauaaggaaacuguaugaaugucugugggcaggaagugaagagauccuucuguaaagguuuuuggaauuaugucugcugaauaauaaacuuuuuugaaauaauaaaucugguagaaaaaugagaucuaaaaaaaaaaaaaaaaaaaaaaaaaaaaaaaaaaaaaaaaaaaaaaaaaaaaaaaaaaaaaaaaaaaaaaaaaaaaaaaaaaaaaaaaaaaaaaaaaaaa

SEQ ID NO: 39427 - RNA, 1788 nt, Artificial Sequence
  mRNA product Design b-4 (A100) comprising derived and/or modified sequence from LASV(Mad39;Clade IV)__ANH09722__GPCmut11 (opt1)
aggagagucccgcagucggcguccagcggcucugcuuguucgugugugugucguugcaggccuuauucaagcuuaccaugggccagaucgugaccuucuuccaggaggucccccacgugaucgaggaggugaugaacaucguccugaucgcccucagcauccuggccgugcugaaggggcucuacaacguggcgaccugcggccugaucgggcuggucacguuccuccugcugugcggccgcuccugcaccaccacccucuacaaggggguguacgagcugcaggcccuggagcucaacauggagacgcugaacaugaccaugccgcugagcugcaccaagaacaacucccaccacuacauccgggugggcaacgagaccggccucgagcugacgcugaccaacaccagccucaucaaccacaaguucugcaaccuguccgacgcccacaagaagaaccuguacgaccacgcccucaugagcaucaucuccaccuuccaccugagcauccccaacuucaaccaguacgaggccauguccugcgacuucaacgacgggaagaucagcguccaguacaaccugucccacacguacgcgggcgacaccgccaaccacugcgggaccguggccaacggcgugcuccagaccuucaugcgcauggccuggggcgggagcuacaucgcgcuggacuccggccgcgggggcugggacugcaucaugacgagcuaccaguaccugaucauccagaacaccaccugggaggaccacugccaguucucccggcccagccccaucggguaccucggccugcugucccagcggacccgcgacaucuacaucagccggcgccuccugggcacguucaccuggacccuguccgacagcgaggggaaggacaccccgggcggguacugccucacgcgguggaugcugaucgaggccgagcugaagugcuucggcaacaccgccgucgccaagugcaacgagaagcacgacgaggaguucugcgacaugcuccgccuguucgacuucaacaagcaggccauccagcggcugaaggcggaggcccagaugagcauccagcucaucaacaaggccgugaacgcccugaucaacgaccagcugaucaugaagaaccaccuccgcgacaucauggggauccccuacugcaacuacuccaaguacugcuaccugaaccacaccgugaccggcaagacgagccugcccaagugcugccucgucuccaacggcagcuaccugaacgagacccacuucuccgacgacaucgagcagcaggccgacaacaugaucaccgagaugcugcagaaggaguacauggagcggcaggggaagacgccccucggccugguggaccuguucguguucagcaccuccuucuaccugaucagcaucuuccuccaccuggucaagaucccgacccaccgccacgugguggggaagcccugccccaagccccaccggcugaaccacaugggcaucugcuccugcggguucuacaagcagccgggcguccccgugcgcuggaagcggugaggacuaguaauaaggaaacuguaugaaugucugugggcaggaagugaagagauccuucuguaaagguuuuuggaauuaugucugcugaauaauaaacuuuuuugaaauaauaaaucugguagaaaaaugagaucuaaaaaaaaaaaaaaaaaaaaaaaaaaaaaaaaaaaaaaaaaaaaaaaaaaaaaaaaaaaaaaaaaaaaaaaaaaaaaaaaaaaaaaaaaaaaaaaaaaaa

SEQ ID NO: 39428 - RNA, 1788 nt, Artificial Sequence
  mRNA product Design b-4 (A100) comprising derived and/or modified sequence from LASV(Z0947-SLE-2011;Clade IV)__AIT17840__GPCmut11 (opt1)
aggagagucccgcagucggcguccagcggcucugcuuguucgugugugugucguugcaggccuuauucaagcuuaccaugggccagaucgugaccuucuuccaggaggucccccacgugaucgaggaggugaugaacaucguccugaucgcccucagcauccuggccgugcugaaggggcucuacaacuucgcgaccugcggccugguggggcuggucacguuccuccugcugugcggccgcuccugcaccaucagccucuacaaggggguguacgagcugcagacccuggagcucaacauggagacccugaacaugacgaugccgcuguccugcaccaagaacaacagccaccacuacaucauggugggcaacgagaccggccucgagcugacccugacgaacaccuccaucaucaaccacaaguucugcaaccucagcgacgcccacaagaagaaccuguacgaccacgcccugauguccaucaucagcaccuuccaccucuccauccccaacuucaaccaguacgaggccaugagcugcgacuucaacgggggcaagaucuccguccaguacaaccugagccacuccuacgccggggacgcggccaaccacugcggcaccguggccaacggggugcugcagacguucaugcggauggccuggggcggcagcuacaucgcgcucgacuccgggcgcgaccggugggacugcaucaugaccagcuaccaguaccugaucauccagaacaccaccugggaggaccacugccaguucucccgccccagccccaucggcuaccuggggcuccugucccagcggacgcgcgacaucuacaucagccggcgccugcucggcaccuucaccuggacccugagcgacuccgagggcaaggacacgcccgggggcuacugccugacccgguggaugcucaucgaggccgagcugaagugcuucgggaacaccgccgucgccaagugcaacgagaagcacgacgaggaguucugcgacaugcugcgccucuucgacuucaacaagcaggccauccagcggcugaaggcggaggcccagaugagcauccagcugaucaacaaggccgugaacgcccucaucaacgaccagcugaucaugaagaaccaccuccgcgacaucaugggcauccccuacugcaacuacuccaaguacugcuaccugaaccacaccacgaccgggaagaccagccugcccaagugcugccugguguccaacggcagcuaccucaacgagacccacuucuccgacgacaucgagcagcaggccgacaacaugaucacggagaugcugcagaaggaguacauggagcggcagggcaagaccccgcuggggcucgucgaccuguucguguucagcaccuccuucuaccugaucagcaucuuccugcaccucgugaagaucccgacccaccgccacaucgucggcaagcccugccccaagccccaccggcugaaccacauggggaucugcuccugcggccuguacaagcagccgggggugcccgugaaguggaagcgcugaggacuaguaauaaggaaacuguaugaaugucugugggcaggaagugaagagauccuucuguaaagguuuuuggaauuaugucugcugaauaauaaacuuuuuugaaauaauaaaucugguagaaaaaugagaucuaaaaaaaaaaaaaaaaaaaaaaaaaaaaaaaaaaaaaaaaaaaaaaaaaaaaaaaaaaaaaaaaaaaaaaaaaaaaaaaaaaaaaaaaaaaaaaaaaaaa

SEQ ID NO: 39429 - RNA, 1788 nt, Artificial Sequence
  mRNA product Design b-4 (A100) comprising derived and/or modified sequence from LASV(Josiah;Clade IV)__NP_694870__GPCmut11 (opt1)
aggagagucccgcagucggcguccagcggcucugcuuguucgugugugugucguugcaggccuuauucaagcuuaccaugggccagaucgugaccuucuuccaggaggucccccacgugaucgaggaggugaugaacaucguccugaucgcccucagcgugcuggccgugcugaaggggcucuacaacuucgcgaccugcggccuggucgggcuggugacguuccuccugcugugcggccgcuccugcaccaccagccucuacaaggggguguacgagcugcagacccuggagcucaacauggagacgcugaacaugaccaugccgcuguccugcaccaagaacaacagccaccacuacaucauggucggcaacgagaccggccucgagcugacgcugaccaacaccuccaucaucaaccacaaguucugcaaccucagcgacgcccacaagaagaaccuguacgaccacgcccugauguccaucaucagcaccuuccaccucuccauccccaacuucaaccaguacgaggccaugagcugcgacuucaacgggggcaagaucuccgugcaguacaaccugagccacuccuacgccggggacgcggccaaccacugcggcacgguggccaacgggguccugcagaccuucaugcggauggccuggggcggcagcuacaucgcgcucgacuccgggcgcggcaacugggacugcaucaugaccagcuaccaguaccugaucauccagaacaccacgugggaggaccacugccaguucucccggcccagccccaucggguaccugggccuccugucccagcgcacccgggacaucuacaucagccgccggcugcucggcaccuucaccuggacgcugagcgacuccgaggggaaggacaccccgggcggguacugccugacccgcuggaugcucaucgaggccgagcugaagugcuucggcaacaccgccguggccaagugcaacgagaagcacgacgaggaguucugcgacaugcugcggcuguucgacuucaacaagcaggccauccagcgccugaaggcggaggcccagaugagcauccagcugaucaacaaggccgugaacgcccucaucaacgaccagcugaucaugaagaaccaccuccgggacaucauggggauccccuacugcaacuacuccaaguacugcuaccucaaccacacgaccaccggccgcaccagccugcccaagugcugccuggucuccaacggcagcuaccucaacgagacgcacuucuccgacgacaucgagcagcaggccgacaacaugaucaccgagaugcugcagaaggaguacauggagcggcaggggaagacgccccugggccugguggaccucuucguguucagcaccuccuucuaccugaucagcaucuuccugcaccucgucaagaucccgacccaccgccacaucguggggaaguccugccccaagccccaccggcugaaccacaugggcaucugcagcugcgggcuguacaagcagcccggcgugccggucaaguggaagcgcugaggacuaguaauaaggaaacuguaugaaugucugugggcaggaagugaagagauccuucuguaaagguuuuuggaauuaugucugcugaauaauaaacuuuuuugaaauaauaaaucugguagaaaaaugagaucuaaaaaaaaaaaaaaaaaaaaaaaaaaaaaaaaaaaaaaaaaaaaaaaaaaaaaaaaaaaaaaaaaaaaaaaaaaaaaaaaaaaaaaaaaaaaaaaaaaaa

SEQ ID NO: 39430 - RNA, 1785 nt, Artificial Sequence
  mRNA product Design b-4 (A100) comprising derived and/or modified sequence from LASV(LP;Clade I)__AAF86701__GPCmut11 (opt1)
aggagagucccgcagucggcguccagcggcucugcuuguucgugugugugucguugcaggccuuauucaagcuuaccaugggccagaucaucaccuucuuccaggaggugccccacgucaucgaggaggugaugaacaucgugcugaucgcccucagccugcuggccauccucaaggggcuguacaacaucgcgaccugcggcaucaucgggcuggucgccuuccucuuccugugcggcaaguccugcagccugacgcucaagggcggguacgagcugcagacccuggagcucaacauggagacccugaacaugaccaugccgcuguccugcacgaagaacagcucccaccacuacauccgcgugggcaacgagaccgggcucgagcugacccugaccaacacgagcaucaucaaccacaaguucugcaaccucuccgacgcccacaagaagaaccuguacgaccacgcccugaugagcaucaucuccaccuuccaccucagcauccccaacuucaaccaguacgaggccauguccugcgacuucaacggcgggaagaucagcgugcaguacaaccugucccacagcuacgcgggcgacgccgccgagcacugcgggaccgucgccaacggcgugcugcagaccuucaugcggauggcguggggcgggcgcuacaucgcccucgacuccggcaaggggaacugggacugcaucaugacgagcuaccaguaccugaucauccagaacaccaccugggaggaccacugccaguucucccggcccagccccaucggcuaccugggccuccugucccagcgcacccgggacaucuacaucagccgccggcugcucgggacguucaccuggacccugagcgacuccgagggcaacgagacccccgggggcuacugccugacgcgcuggaugcucaucgaggccgagcugaagugcuucgggaacaccgccguggccaagugcaacgagaagcacgacgaggaguucugcgacaugcugcggcuguucgacuucaacaagcaggcgauccgccggcugaaggccgaggcccagaugagcauccagcugaucaacaaggccgucaacgcccucaucaacgaccagcugaucaugaagaaccaccuccgcgacaucaugggcauccccuacugcaacuacuccaaguacugcuaccucaaccacaccagcuccggccggaccagccugcccaagugcugccugaucuccaacgggagcuaccucaacgagacgcaguucuccgacgacaucgagcagcaggcggacaacaugaucaccgagaugcugcagaaggaguacaucgagcgccagggcaagaccccgcuggggcugguggacaucuucaucuucagcaccuccuucuaccucaucagcaucuuccugcaccugaucaagaucccgacgcaccggcacaucgugggcaagcccugccccaagccccaccgccucaaccacaugggggucugcuccugcggccuguacaagcacccgggcgugcccaccaaguggaagcggugaggacuaguaauaaggaaacuguaugaaugucugugggcaggaagugaagagauccuucuguaaagguuuuuggaauuaugucugcugaauaauaaacuuuuuugaaauaauaaaucugguagaaaaaugagaucuaaaaaaaaaaaaaaaaaaaaaaaaaaaaaaaaaaaaaaaaaaaaaaaaaaaaaaaaaaaaaaaaaaaaaaaaaaaaaaaaaaaaaaaaaaaaaaaaaaaa

SEQ ID NO: 39431 - RNA, 1785 nt, Artificial Sequence
  mRNA product Design b-4 (A100) comprising derived and/or modified sequence from LASV(803213;Clade II)__AAF86703__GPCmut11 (opt1)
aggagagucccgcagucggcguccagcggcucugcuuguucgugugugugucguugcaggccuuauucaagcuuaccaugggccagaucaucaccuucuuccaggaggugccccacgucaucgaggaggugaugaacaucgugcugaucgcccucagccugcuggccauccucaaggggaucuacaacgucgcgaccugcggccuguucgggcugaucuccuuccuccugcugugcggccgcagcugcuccgugacguacaaggggguguacgagcuccagacccuggagcugaacauggccaaccucaacaugaccaugccgcugagcugcaccaagaacaacucccaccacuacaucauggucggcaacgagacgggccuggagcucacccugaccaacaccagcaucaucaaccacaaguucugcaaccuguccgacgcccacaagaagaaccucuacgaccacgcccugaugagcaucaucuccacguuccaccugagcauccccaacuucaaccaguacgaggccauguccugcgacuucaacgggggcaagaucagcgugcaguacaaccucucccacagcuucgcgguggacgccgccaaccacugcgggaccaucgccaacggcguccugcagaccuucaugcggauggcguggggcggguccuacaucgcccuggacagcggcaaggggaacugggacugcaucaugaccuccuaccaguaccucaucauccagaacacgaccugggaggaccacugccaguucagccgccccucccccaucggcuaccuggggcugcucagccagcggacccgcgacaucuacaucagccggcgccugcugggcaccuucacguggacccucuccgacagcgagggcaacgaggcccccgggggcuacugccugacccgguggaugcugaucgaggccgagcucaagugcuucgggaacaccgccguggcgaagugcaacgagaagcacgacgaggaguucugcgacaugcugcgccuguucgacuucaacaagcaggccaucaagcggcucaagacggaggcccagauguccauccagcugaucaacaaggccgugaacgcccugaucaacgaccagcucaucaugaagaaccaccuccgcgacaucaugggcauccccuacugcaacuacagccgguacugcuaccugaaccacaccgucaccgggaagaccucccugccccgcugcugccuggugagcaacggcuccuaccugaacgagacgcacuucagcgacgacaucgagcagcaggcggacaacaugaucaccgagaugcuccagaaggaguacauggaccggcagggcaagaccccgcuggggcugguggaccuguucgucuucuccaccagcuucuaccucaucuccaucuuccugcaccuggugaagaucccgacgcaccgccacaucgugggcaagcccugccccaagccccaccggcucaaccacauggggaucugcagcugcggccuguacaagcacccggggguccccgugaaguggaagcgcugaggacuaguaauaaggaaacuguaugaaugucugugggcaggaagugaagagauccuucuguaaagguuuuuggaauuaugucugcugaauaauaaacuuuuuugaaauaauaaaucugguagaaaaaugagaucuaaaaaaaaaaaaaaaaaaaaaaaaaaaaaaaaaaaaaaaaaaaaaaaaaaaaaaaaaaaaaaaaaaaaaaaaaaaaaaaaaaaaaaaaaaaaaaaaaaaa

SEQ ID NO: 39432 - RNA, 1785 nt, Artificial Sequence
  mRNA product Design b-4 (A100) comprising derived and/or modified sequence from LASV(GA391;Clade III)__CAA36645__GPCmut11 (opt1)
aggagagucccgcagucggcguccagcggcucugcuuguucgugugugugucguugcaggccuuauucaagcuuaccaugggccagaucgugaccuucuuccaggaggucccccacgugaucgaggaggugaugaacaucguccugaucgcccucagcauccuggccauccugaaggggcucuacaacguggcgaccugcggccugaucgggcuggugacguuccuccugcuguccggccgcagcugcucccucaucuacaaggggaccuacgagcugcagacccuggagcucaacauggagacccugaacaugacgaugccgcugagcugcaccaagaacaacucccaccacuacauccgggucggcaacgagaccggccucgagcugacccugacgaacaccagcauccucaaccacaaguucugcaaccuguccgacgcccacaagcgcaaccuguacgaccacagccucauguccaucaucagcaccuuccaccuguccauccccaacuucaaccaguacgaggccaugagcugcgacuucaacgggggcaagaucaccgugcaguacaaccugucccacagcuucgccguggacgccgcggggcacugcggcacgcucgccaacgggguccugcagaccuucaugcggauggccuggggcggcuccuacaucgcccuggacagcgggcgcggcaacugggacugcaucaugaccuccuaccaguaccucaucauccagaacaccacgugggacgaccacugccaguucagccggcccucccccaucggguaccugggccugcucagccagcgcacccgggacaucuacaucagccgccggcugcugggcaccuucaccuggacgcucuccgacagcgaggggaacgagaccccgggcggguacugccugacccgcuggaugcugaucgaggcggagcucaagugcuucggcaacaccgccguggccaagugcaacgagaagcacgacgaggaguucugcgacaugcugcggcuguucgacuucaacaagcaggccauccgccggcucaagacggaggcccagauguccauccagcugaucaacaaggcggugaacgcccugaucaacgaccagcucaucaugaagaaccaccuccgcgacaucauggggauccccuacugcaacuacagccgguacugcuaccugaaccacaccuccaccggcaagaccagccugccccgcugcugccugaucuccaacggcagcuaccugaacgagacgaaguucuccgacgacaucgagcagcaggccgacaacaugaucaccgagaugcugcagaaggaguacaucgaccggcaggggaagacgccccucggccuggucgaccuguucguguucagcaccuccuucuaccucaucagcaucuuccugcaccuggugaagaucccgacccaccgccacaucgucgggaagcccugccccaagccccaccggcucaaccacaugggcaucugcuccugcgggcuguacaagcagccgggcgugcccgugcgcuggaagcggugaggacuaguaauaaggaaacuguaugaaugucugugggcaggaagugaagagauccuucuguaaagguuuuuggaauuaugucugcugaauaauaaacuuuuuugaaauaauaaaucugguagaaaaaugagaucuaaaaaaaaaaaaaaaaaaaaaaaaaaaaaaaaaaaaaaaaaaaaaaaaaaaaaaaaaaaaaaaaaaaaaaaaaaaaaaaaaaaaaaaaaaaaaaaaaaaa

SEQ ID NO: 39433 - RNA, 1788 nt, Artificial Sequence
  mRNA product Design b-4 (A100) comprising derived and/or modified sequence from LASV(AV;Clade V)__CCA30314__GPCmut11 (opt1)
aggagagucccgcagucggcguccagcggcucugcuuguucgugugugugucguugcaggccuuauucaagcuuaccaugggccagaucgugaccuucuuccaggaggucccccacgugaucgaggaggugaugaacaucguccugaucgcccucagcauccuggccgugcugaaggggcucuacaacaucgcgaccugcggccugaucgggcugaucacguuccuccugcugugcggccgcuccugcagcuccaaccucuacaaggggguguacgagcugcagagccuggaccucaacauggagacccugaacaugaccaugccgcuguccugcaccaagaacaacagccaccacuacauccgggucggcaacgacacgggccucgagcugacccugaccaacaccuccauccucaaccacaaguucugcaaccugagcgacgcccacaagaaggaccuguacgaccacgcccucauguccaucaucagcacguuccaccuguccauccccaacuucaaccaguacgaggccaugagcugcgacuucaacgggggcaagaucuccgugcaguacaaccugagccacuccuacgccaucgacgcggccaaccacugcgggaccguggccaacggcauccuccagaccuucaugcgcauggccuggggcgggagcuacaucgcgcuggacuccggccgggggaacugggacugcaucaugaccagcuaccaguaccugaucauccagaacacgaccugggagaaccacugccaguucucccgccccagccccaucggcuaccucgggcugcugagccagcggacccgcgacaucuacaucucccggcgccuccugggcaccuucacguggacccugagcgacuccgagggcaacgccacccccgggggcuacugccucacccgguggaugcugaucgaggccgagcugaagugcuucgggaacacggccgucgccaagugcaacgagaagcacgacgaggaguucugcgacaugcuccgccuguucgacuucaacaagcaggcgaucagccggcugaaguccgaggcccagaugagcauccagcucaucaacaaggccgugaacgcccugaucaacgaccagcugaucaugaagaaccaccuccgcgacaucaugggcauccccuacugcaacuacuccaaguacugcuaccugaaccacaccaucaccgggaagaccagccugcccaagugcugccucguguccaacggcagcuaccugaacgagacgcacuucuccgacgacaucgagcagcaggccgacaacaugaucaccgagaugcugcagaaggaguacauggagcggcagggcaagaccccgcuggggcucgucgaccuguucguguucagcaccuccuucuaccugaucagcaucuuccuccgccuggugaagaucccgacgcaccggcacaucgucggcaagcccugccccaagccccaccgccugaaccacauggggaucugcuccugcggccucuacaagcagccgggggugcccgugcgguggaagcgcugaggacuaguaauaaggaaacuguaugaaugucugugggcaggaagugaagagauccuucuguaaagguuuuuggaauuaugucugcugaauaauaaacuuuuuugaaauaauaaaucugguagaaaaaugagaucuaaaaaaaaaaaaaaaaaaaaaaaaaaaaaaaaaaaaaaaaaaaaaaaaaaaaaaaaaaaaaaaaaaaaaaaaaaaaaaaaaaaaaaaaaaaaaaaaaaaa

SEQ ID NO: 39434 - RNA, 1785 nt, Artificial Sequence
  mRNA product Design b-4 (A100) comprising derived and/or modified sequence from LASV(Togo/2016/7082;Clade VI)__AMR44577__GPCmut11 (opt1)
aggagagucccgcagucggcguccagcggcucugcuuguucgugugugugucguugcaggccuuauucaagcuuaccaugggccagaucaucaccuucuuccaggaggugccccacgucaucgaggaggugaugaacaucgugcugaucgcccucagccugcuggccauccucaagggggucuacaacguggcgaccugcggcaucaucgggcuggugacguuccuguuccucugcggccgcuccugcagccugaucuacaagggguccuacgagcugcagacccucgagcugaacauggagacccugaacaugaccaugccgcucagcugcacgaagaacuccagccaccacuacauccgggucggcaacgagaccggccuggagcugacccucaccaacacguccaucaucaaccacaaguucugcaaccugagcgacgcccacaagcgcaaccuguacgaccacgcccucauguccauccugagcaccuuccaccuguccauccccaacuucaaccaguacgaggccaugagcugcgacuucaacgggggcaagaucuccgugcaguacaaccucagccacgccuacgcgguggacgccgccgagcacugcgggaccgucgccaacggcgugcugcagaccuucaugcggauggcguggggcggguccuacaucgcccuggacagcggccgcgggaacugggacugcaucaugacguccuaccaguaccucaucauccagaacaccaccugggaggaccacugccaguucagccggcccucccccaucggcuaccuggggcugcucagccagcgcacccgggacaucuacaucagccgccggcugcugggcacguucaccuggacccucuccgacagcgagggcaacgagacccccgggggcuacugccugacgcgcuggaugcugaucgaggccgagcucaagugcuucgggaacaccgccguggccaagugcaacgagaagcacgacgaggaguucugcgacaugcugcggcuguucgacuucaacaagcaggcgauccagcgccucaaguccgaggcccagaugagcauccagcugaucaacaaggccgucaacgcccugaucaacgaccagcucaucaugaagaaccaccuccgggacaugaugggcauccccuacugcaacuacuccaaguacugcuaccugaaccacaccagcuccgggcgcaccagccugcccaagugcugccugguguccaacggcagcuaccugaacgagacgcacuucuccgacgacaucgagcagcaggccgacaacaugaucaccgagaugcuccagaaggaguacaucgaccggcagggcaagaccccgcuggggcugguggaccuguucgucuucagcaccuccuucuaccucaucagcaucuuccugcaccugaucaagaucccgacgcaccgccacaucgugggcaagcccugccccaagccccaccggcucaaccacauggggaucugcuccugcggccuguacaagcagccgggggugcccacccgcuggaagcggugaggacuaguaauaaggaaacuguaugaaugucugugggcaggaagugaagagauccuucuguaaagguuuuuggaauuaugucugcugaauaauaaacuuuuuugaaauaauaaaucugguagaaaaaugagaucuaaaaaaaaaaaaaaaaaaaaaaaaaaaaaaaaaaaaaaaaaaaaaaaaaaaaaaaaaaaaaaaaaaaaaaaaaaaaaaaaaaaaaaaaaaaaaaaaaaaa

SEQ ID NO: 39435 - RNA, 1785 nt, Artificial Sequence
  mRNA product Design b-4 (A100) comprising derived and/or modified sequence from LASV(KAK-428;Clade n.d. (VII))__ANH09740__GPCmut11 (opt1)
aggagagucccgcagucggcguccagcggcucugcuuguucgugugugugucguugcaggccuuauucaagcuuaccaugggccagaucgugaccuucuuccaggaggucccccacgugaucgaggaggugaugaacaucguccugaucgcccucagccugcuggccauccucaaggggcuguacaacuucgcgaccugcggcgugaucgggcugaucacguuccuccugcugugcggccgcuccugcagcgccaccuacaaggggcaguacgagcuccagacccuggagcugaacauggagucccucaacaugaccaugccgcugagcugcacgaagaacaacucccaccacuacauccgggccggcaacaacaccggccuggagcucacccugaccaacacgagcaucaucucccacaaguucugcaaccugagcgacgcccacaagaagaaccucuacgaccacacccugauguccaucaucaccaccuuccaccugagcauccccaacuucaaccaguacgaggccauguccugcgacuucaacgggggcaagaucagcauccaguacaaccucucccacagcuacgcgggggacgccgcccagcacugcggcacgguggccaacgggguccugcagaccuucaugcgcauggcguggggcggcuccuaccuggcccucgacagcgggcggcgcggcugggacugcaucaucuccagcuaccaguaccugaucauccagaacaccaccugggacgaccacugccaguucucccggcccagccccaucggguaccugggcuucgugagccagaagacgcgcgacaucuacaucucccggcgccuccugggcaccuucaccuggacccugagcgacuccgaggggcacgacaugccgggcggguacugccucacgcgguggaugcugaucgaggccgaccugaagugcuucggcaacaccgccguggccaagugcaacgagaagcacgacgaggaguucugcgacauguggcgccucuucgacuucaacaagcaggcgauccagcggcugaaggccgaggcccagaugaacauccagcugaucaacaaggccgucaacgcccucaucaacgaccagcugaugaugaagaaccaccuccgcgacaucauggggauccccuacugcaacuacagcaaguucugcuaccugaacaacaccaccacgggccggaccucccugccccgcugcugccugaucagcaacggcuccuaccucaacgagacccacuucagcgacgacaucgagcagcaggcggacaacaugaucaccgagaugcugcagaaggaguacauggaccggcaggggaagacgccccugggccucguggaccuguucguguucuccaccagcuucuaccugaucaccaucuuccugcaccucgucaagaucccgacccaccgccacaucguggggaagcccugccccaagccccaccggcugaaccacaugggcaucugcuccugcgggcuguacaagcagccgggcgugcccguccgcuggaagcggugaggacuaguaauaaggaaacuguaugaaugucugugggcaggaagugaagagauccuucuguaaagguuuuuggaauuaugucugcugaauaauaaacuuuuuugaaauaauaaaucugguagaaaaaugagaucuaaaaaaaaaaaaaaaaaaaaaaaaaaaaaaaaaaaaaaaaaaaaaaaaaaaaaaaaaaaaaaaaaaaaaaaaaaaaaaaaaaaaaaaaaaaaaaaaaaaa

SEQ ID NO: 39436 - RNA, 1785 nt, Artificial Sequence; identical to SEQ ID NO: 39430
  mRNA product Design b-4 (A100) comprising derived and/or modified sequence from LASV(Pinneo-NIG-1969;Clade I)__AIT17836__GPCmut11 (opt1)

SEQ ID NO: 39437 - RNA, 1785 nt, Artificial Sequence
  mRNA product Design b-4 (A100) comprising derived and/or modified sequence from LASV(ISTH0009-NIG-2011;Clade II)__AIT17404__GPCmut11 (opt1)
aggagagucccgcagucggcguccagcggcucugcuuguucgugugugugucguugcaggccuuauucaagcuuaccaugggccagaucaucaccuucuuccaggaggugccccacgucaucgaggaggugaugaacaucgugcugaucgcccucagccugcuggccauccucaaggggaucuacaacgucgcgaccugcggccuguucgggcugguguccuuccuccugcugugcggccgcagcugcuccacgaccuacaaggggguguacgagcuccagacccuggagcuggacauggccagccucaacaugaccaugccgcuguccugcacgaagaacaacagccaccacuacaucauggucggcaacgagaccggccuggagcucacccugaccaacacguccaucaucaaccacaaguucugcaaccugagcgacgcccacaagaagaaccucuacgaccacgcccugauguccaucaucagcaccuuccaccuguccauccccaacuucaaccaguacgaggccaugagcugcgacuucaacgggggcaagaucuccgugcaguacaaccucagccacgcguacgccguggacgccgccaaccacugcgggaccaucgcgaacggcguccugcagaccuucaugcggauggccuggggcggguccuacaucgcccuggacagcggcaagggguccugggacugcaucaugacgagcuaccaguaccucaucauccagaacaccaccugggaggaccacugccaguucucccgccccagccccaucggcuaccuggggcugcucagccagcggacccgcgacaucuacaucucccggcgccugcugggcacguucaccuggacccucagcgacuccgagggcaacgagacccccgggggcuacugccugacgcgguggaugcugaucgaggccgagcucaagugcuucgggaacaccgccguggcgaagugcaacgagaagcacgacgaggaguucugcgacaugcugcgccuguucgacuucaacaagcaggccauccggcgccucaagaccgaggcccagaugagcauccagcugaucaacaaggccgugaacgcccugaucaacgaccagcucaucaugaagaaccaccuccgggacaucaugggcaucccguacugcaacuacuccaaguacugcuaccugaaccacaccgucacggggaagaccagccugccccgcugcugccugguguccaacggcagcuaccugaacgagacccacuucuccgacgacaucgagcagcaggcggacaacaugaucaccgagcuccugcagaaggaguacauggaccggcagggcaagacgccccuggggcugguggaccucuucgucuucagcaccuccuucuaccugaucagcaucuuccugcaccucaucaagaucccgacccaccgccacaucaccggcaagcccugccccaagccccaccggcugaaccacauggggaucugcuccugcggccuguacaagcacccgggggugcccgugaaguggaagcgcugaggacuaguaauaaggaaacuguaugaaugucugugggcaggaagugaagagauccuucuguaaagguuuuuggaauuaugucugcugaauaauaaacuuuuuugaaauaauaaaucugguagaaaaaugagaucuaaaaaaaaaaaaaaaaaaaaaaaaaaaaaaaaaaaaaaaaaaaaaaaaaaaaaaaaaaaaaaaaaaaaaaaaaaaaaaaaaaaaaaaaaaaaaaaaaaaa

SEQ ID NO: 39438 - RNA, 1785 nt, Artificial Sequence
  mRNA product Design b-4 (A100) comprising derived and/or modified sequence from LASV(ISTH2010-NIG-2012;Clade II)__AIT17482__GPCmut11 (opt1)
aggagagucccgcagucggcguccagcggcucugcuuguucgugugugugucguugcaggccuuauucaagcuuaccaugggccagaucaucaccuucuuccaggaggugccccacgucaucgaggaggugaugaacaucgugcugaucgcccucagccugcuggccauccucaaggggaucuacaacgucgcgaccugcggccuguucgggcugguguccuuccuccugcugugcggccgcagcugcuccacgaccuacaaggggguguacgagcuccagacccuggagcuggacauggccagccucaacaugaccaugccgcuguccugcacgaagaacaacagccaccacuacaucauggucggcaacgagaccggccuggagcucacccugaccaacacguccaucaucaaccacaaguucugcaaccugagcgacgcccacaagaagaaccucuacgaccacgcccugauguccaucaucagcaccuuccaccuguccauccccaacuucaaccaguacgaggccaugagcugcgacuucaacgggggcaagaucuccgugcaguacaaccucagccacgcguacgccguggacgccgccaaccacugcgggaccaucgcgaacggcguccugcagaccuucaugcggauggccuggggcggguccuacaucgcccuggacagcggcaagggguccugggacugcaucaugacgagcuaccaguaccucaucauccagaacaucaccugggaggaccacugccaguucucccgccccagccccaucggcuaccuggggcugcucagccagcggacccgcgacaucuacaucucccggcgccugcugggcaccuucacguggacccucagcgacuccgagggcaacgagacccccgggggcuacugccugacccgguggaugcugaucgaggccgagcucaagugcuucgggaacacggccguggcgaagugcaacgagaagcacgacgaggaguucugcgacaugcugcgccuguucgacuucaacaagcaggccauccggcgccucaagaccgaggcccagaugagcauccagcugaucaacaaggccgugaacgcccugaucaacgaccagcucaucaugaagaaccaccuccgggacaucaugggcauccccuacugcaacuacuccaaguacugcuaccugaaccacaccgucaccgggaagacgagccugccccgcugcugccugguguccaacggcagcuaccugaacgagacccacuucuccgacgacaucgagcagcaggcggacaacaugaucaccgagcuccugcagaaggaguacaucgaccggcagggcaagaccccgcuggggcugguggaccucuucgucuucagcacguccuucuaccugaucagcaucuuccugcaccucgugaagaucccgacccaccgccacguggucggcaagcccugccccaagccccaccggcugaaccacauggggaucugcuccugcggccuguacaagcacccgggggugcccgugaaguggaagcgcugaggacuaguaauaaggaaacuguaugaaugucugugggcaggaagugaagagauccuucuguaaagguuuuuggaauuaugucugcugaauaauaaacuuuuuugaaauaauaaaucugguagaaaaaugagaucuaaaaaaaaaaaaaaaaaaaaaaaaaaaaaaaaaaaaaaaaaaaaaaaaaaaaaaaaaaaaaaaaaaaaaaaaaaaaaaaaaaaaaaaaaaaaaaaaaaaa

SEQ ID NO: 39439 - RNA, 1785 nt, Artificial Sequence
  mRNA product Design b-4 (A100) comprising derived and/or modified sequence from LASV(Lassa virus/H.sapiens-wt/NGA/2015/ISTH_0543;Clade II)__AVO03639__GPCmut11 (opt1)
aggagagucccgcagucggcguccagcggcucugcuuguucgugugugugucguugcaggccuuauucaagcuuaccaugggccagaucaucaccuucuuccaggaggugccccacgucaucgaggaggugaugaacaucgugcugaucgcccucagccugcuggccauccucaaggggaucuacaacgucgcgaccugcggccuguucgggcugguguccuuccuccugcugugcggccgcagcugcuccacgaccuacaaggggguguacgagcuccagacccuggagcuggacauggccaaccucaacaugaccaugccgcugagcugcacgaagaacaacucccaccacuacaucauggucggcaacgagaccggccuggagcucacccugaccaacacgagcaucaucaaccacaaguucugcaaccuguccgacgcccacaagaagaaccucuacgaccacgcccugaugagcaucaucuccaccuuccaccugagcauccccaacuucaaccaguacgaggccauguccugcgacuucaacgggggcaagaucagcgugcaguacaaccucucccacaccuacgcgguggacgccgccaaccacugcgggaccaucgccaacggcguccugcagacguucaugcggauggcguggggcgggagcuacaucgcccuggacuccggcaaggggagcugggacugcaucaugaccuccuaccaguaccucgugauccagaacaccaccugggaggaccacugccaguucagccgccccucccccaucggcuaccuggggcugcucagccagcggacgcgcgacaucuacaucagccggcgccugcugggcaccuucaccuggacccucuccgacagcgagggcaacgagacgcccgggggcuacugccugacccgguggaugcugaucgaggccgagcucaagugcuucgggaacaccgccguggccaagugcaacgagaagcacgacgaggaguucugcgacaugcugcgccuguucgacuucaacaagcaggcgauccggcgccucaagaccgaggcccagauguccauccagcugaucaacaaggccgucaacgcccugaucaacgaccagcucaucaugaagaaccaccuccgggacaucaugggcauccccuacugcaacuacagcaaguacugcuaccugaaccacacggugaccgggaagaccucccugccccgcugcugccuggugagcaacggcuccuaccugaacgagacccacuucagcgacgacaucgagcagcaggccgacaacaugaucacggagcuccugcagaaggaguacaucgaccggcagggcaagaccccgcuggggcuggucgaccucuucguguucuccaccagcuucuaccugaucuccaucuuccugcaccucgugaagaucccgacccaccgccacaucacgggcaagcccugccccaagccccaccggcugaaccacauggggaucugcagcugcggccuguacaagcacccggggguccccgugaaguggaagcgcugaggacuaguaauaaggaaacuguaugaaugucugugggcaggaagugaagagauccuucuguaaagguuuuuggaauuaugucugcugaauaauaaacuuuuuugaaauaauaaaucugguagaaaaaugagaucuaaaaaaaaaaaaaaaaaaaaaaaaaaaaaaaaaaaaaaaaaaaaaaaaaaaaaaaaaaaaaaaaaaaaaaaaaaaaaaaaaaaaaaaaaaaaaaaaaaaa

SEQ ID NO: 39440 - RNA, 1785 nt, Artificial Sequence
  mRNA product Design b-4 (A100) comprising derived and/or modified sequence from LASV(Lassa virus/H.sapiens-wt/NGA/2016/ISTH_0009;Clade II)__AVO03571__GPCmut11 (opt1)
aggagagucccgcagucggcguccagcggcucugcuuguucgugugugugucguugcaggccuuauucaagcuuaccaugggccagaucaucaccuucuuccaggaggugccccacgucaucgaggaggugaugaacaucgugcugaucgcccucagccugcuggccauccucaaggggaucuacaacgucgcgaccugcggccugcuggggcucguguccuuccugcugcucugcggccgcagcugcuccacgaccuacaaggggguguacgagcugcagacccuggagcucgacauggccagccugaacaugaccaugccgcuguccugcacgaagaacaacagccaccacuacaucauggucggcaacgagaccggccucgagcugacccugaccaacacguccaucaucaaccacaaguucugcaaccucagcgacgcccacaagaagaaccuguacgaccacgcccugauguccaucaucagcaccuuccaccucuccauccccaacuucaaccaguacgaggccaugagcugcgacuucaacgggggccggaucuccgugcaguacaaccugagccacuccuacgcgguggacgccgccaaccacugcgggaccaucgccaacggcguccugcagaccuucaugcgcauggcguggggcgggagcuacaucgcccucgacuccggcaaggggagcugggacugcaucaugacguccuaccaguaccugaucauccagaacaccaccugggaggaccacugccaguucagccggcccagccccaucggcuaccuggggcuccugucccagcgcacccgggacaucuacaucagccgccggcugcucggcacguucaccuggacccuguccgacagcgagggcaacgagacccccgggggcuacugccugacgcgcuggaugcucaucgaggccgagcugaagugcuucgggaacaccgccguggccaagugcaacgagaagcacgacgaggaguucugcgacaugcugcggcuguucgacuucaacaagcaggcgauccgccggcugaagaccgaggcccagauguccauccagcugaucaacaaggccgugaacgcccucaucaacgaccagcugaucaugaagaaccaccuccgcgacaucaugggcaucccguacugcaacuacagcaaguacugcuaccucaaccacaccgucacggggaagaccucccugccccggugcugccuggugagcaacggcuccuaccucaacgagacccacuucagcgacgacaucgagcagcaggccgacaacaugaucaccgagcugcugcagaaggaguacaucgaccgccagggcaagacgccccuggggcucguggaccuguucgucuucuccaccagcuucuaccugaucuccaucuuccuccaccuggugaagaucccgacccaccggcacaucaccggcaagcccugccccaagccccaccgccugaaccacauggggaucugcagcugcggccucuacaaccacccgggggugcccgucaaguggaagcggugaggacuaguaauaaggaaacuguaugaaugucugugggcaggaagugaagagauccuucuguaaagguuuuuggaauuaugucugcugaauaauaaacuuuuuugaaauaauaaaucugguagaaaaaugagaucuaaaaaaaaaaaaaaaaaaaaaaaaaaaaaaaaaaaaaaaaaaaaaaaaaaaaaaaaaaaaaaaaaaaaaaaaaaaaaaaaaaaaaaaaaaaaaaaaaaaa

SEQ ID NO: 39441 - RNA, 1785 nt, Artificial Sequence
  mRNA product Design b-4 (A100) comprising derived and/or modified sequence from LASV(Lassa virus/H.sapiens-wt/NGA/2016/ISTH_0017;Clade II)__AVO03567__GPCmut11 (opt1)
aggagagucccgcagucggcguccagcggcucugcuuguucgugugugugucguugcaggccuuauucaagcuuaccaugggccagaucaucaccuucuuccaggaggugccccacgucaucgaggaggugaugaacaucgugcugaucgcccucagccugcuggccauccucaaggggaucuacaacgucgcgaccugcggccuguucgggcugguguccuuccuccugcugugcggccgcagcugcuccacgaccuacaaggggguguacgagcuccagacccuggagcuggacauggccagccucaacaugaccaugccgcuguccugcacgaagaacaacagccaccacuacaucauggucggcaacgagaccggccuggagcucacccugaccaacacguccaucaucaaccacaaguucugcaaccugagcgacgcccacaagaagaaccucuacgaccacgcccugauguccaucaucagcaccuuccaccuguccauccccaacuucaaccaguacgaggccaugagcugcgacuucaacgggggcaagaucuccgugcaguacaaccucagccacaccuacgcgaucgacgccgccaaccacugcgggaccaucgccaacggcgugcugcagacguucaugcggauggcguggggcggguccuacaucgcccuggacagcggcaagggguccugggacugcaucaugaccagcuaccaguaccucaucauccagaacaccaccugggaggaccacugccaguucucccgccccagccccaucggcuaccuggggcugcucagccagcggacgcgcgacaucuacaucucccggcgccugcugggcaccuucaccuggacccucagcgacuccgagggcaacgagacgcccgggggcuacugccugacccgguggaugcugaucgaggccgagcucaagugcuucgggaacaccgccgucgccaagugcaacgagaagcacgacgaggaguucugcgacaugcugcgccuguucgacuucaacaagcaggcgauccggcgccucaagaccgaggcccagaugagcauccagcugaucaacaaggccgugaacgcccugaucaacgaccagcucaucaugaagaaccaccuccgggacaucaugggcauccccuacugcaacuacuccaaguacugcuaccugaaccacacggugaccgggaagaccagccugccccgcugcugccuggucuccaacggcagcuaccugaacgagacccacuucuccgacgacaucgagcagcaggccgacaacaugaucacggagcuccugcagaaggaguacauggaccggcagggcaagaccccgcuggggcugguggaccucuucguguucagcaccuccuucuaccugaucagcaucuuccugcaccucguccgcaucccgacccaccggcacgugaucggcaagcccugccccaagccccaccgccugaaccacauggggaucugcuccugcggccuguacaagcacccgggggugcccgucaaguggaagcggugaggacuaguaauaaggaaacuguaugaaugucugugggcaggaagugaagagauccuucuguaaagguuuuuggaauuaugucugcugaauaauaaacuuuuuugaaauaauaaaucugguagaaaaaugagaucuaaaaaaaaaaaaaaaaaaaaaaaaaaaaaaaaaaaaaaaaaaaaaaaaaaaaaaaaaaaaaaaaaaaaaaaaaaaaaaaaaaaaaaaaaaaaaaaaaaaa

SEQ ID NO: 39442 - RNA, 1785 nt, Artificial Sequence
  mRNA product Design b-4 (A100) comprising derived and/or modified sequence from LASV(Lassa virus/H.sapiens-wt/NGA/2018/ISTH_0959;Clade II)__AVV65099__GPCmut11 (opt1)
aggagagucccgcagucggcguccagcggcucugcuuguucgugugugugucguugcaggccuuauucaagcuuaccaugggccagaucaucaccuucuuccaggaggugccccacgucaucgaggaggugaugaacaucgugcugaucgcccucagccugcuggccauccucaaggggaucuacaacgucgugaccugcggccuguucgggcugguguccuuccuccugcugugcggccgcagcugcuccacgaccuacaagggggucuacgagcuccagacccuggagcuggacauggcgagccucaacaugaccaugccgcuguccugcacgaagaacaacagccaccacuacaucauggugggcaacgagaccggccuggagcucacccugaccaacacguccaucaucaaccacaaguucugcaaccugagcgacgcccacaagaagaaccucuacgaccacgcccugauguccaucaucagcaccuuccaccuguccauccccaacuucaaccaguacgaggccaugagcugcgacuucaacgggggcaagaucuccgugcaguacaaccucagccacgccuacgcgaucgacgccgccaaccacugcgggaccaucgccaacggcguccugcagaccuucaugcggauggcguggggcggguccuacaucgcccuggacagcggcaagggguccugggacugcaucaugacgagcuaccaguaccucaucauccagaacaccaccugggaggaccacugccaguucucccgccccagccccaucggcuaccuggggcugcucagccagcggacccgcgacaucuacaucucccggcgccugcugggcacguucaccuggacccucagcgacuccgagggcaacgagacccccgggggcuacugccugacgcgguggaugcugaucgaggccgagcucaagugcuucgggaacaccgccguggccaagugcaacgagaagcacgacgaggaguucugcgacaugcugcgccuguucgacuucaacaagcaggcgauccggcgccucaagaccgaggcccagaugagcauccagcugaucaacaaggccgugaacgcccugaucaacgaccagcucaucaugaagaaccaccuccgggacaucaugggcaucccguacugcaacuacuccaaguacugcuaccugaaccacaccgucacggggaagaccagccugccccgcugcugccugguguccaacggcagcuaccugaacgagacccacuucuccgacgacaucgagcagcaggccgacaacaugaucaccgagcuccugcagaaggaguacaucgaccggcagggcaagacgccccuggggcugguggaccucuucgucuucagcaccuccuucuaccugaucagcaucuuccugcaccucgugaagaucccgacccaccgccacgugaucggcaagcccugccccaagccccaccggcugaaccacauggggaucugcuccugcggccuguacaagcacccggggguccccgugaaguggaagcgcugaggacuaguaauaaggaaacuguaugaaugucugugggcaggaagugaagagauccuucuguaaagguuuuuggaauuaugucugcugaauaauaaacuuuuuugaaauaauaaaucugguagaaaaaugagaucuaaaaaaaaaaaaaaaaaaaaaaaaaaaaaaaaaaaaaaaaaaaaaaaaaaaaaaaaaaaaaaaaaaaaaaaaaaaaaaaaaaaaaaaaaaaaaaaaaaaa

SEQ ID NO: 39443 - RNA, 1785 nt, Artificial Sequence
  mRNA product Design b-4 (A100) comprising derived and/or modified sequence from LASV(LASV003-NIG-2008;Clade II)__AIT17580__GPCmut11 (opt1)
aggagagucccgcagucggcguccagcggcucugcuuguucgugugugugucguugcaggccuuauucaagcuuaccaugggccagaucaucaccuucuuccaggaggugccccacgucaucgaggaggugaugaacaucgugcugaucgcccucagccugcuggccauccucaaggggaucuacaacgucgcgaccugcggccuguucgggcugguguccuuccuccugcugugcggccgcagcugcuccacgaccuacaaggggguguacgagcuccagacccuggagcuggacauggccagccucaacaugaccaugccgcuguccugcacgaagaacaacagccaccacuacaucauggucggcaacgagaccggccuggagcucacccugaccaacacguccaucaucaaccacaaguucugcaaccugagcgacgcccacaagaagaaccucuacgaccacgcccugauguccaucaucagcaccuuccaccuguccauccccaacuucaaccaguacgaggccaugagcugcgacuucaacgggggcaagaucuccgugcaguacaaccucagccacaccuacgcgguggacgccgccaaccacugcgggaccaucgccaacggcguccugcagacguucaugcggauggcguggggcggguccuacaucgcccuggacagcggcaagggguccugggacugcaucaugaccagcuaccaguaccucaucauccagaacaccaccugggaggaccacugccaguucucccgccccagccccaucggcuaccuggggcugcucagccagcggacgcgcgacaucuacaucucccggcgccugcugggcaccuucaccuggacccucagcgacuccgagagcaacgagacgccgggcggguacugccugacccgguggaugcugaucgaggccgagcucaagugcuucggcaacaccgccguggccaagugcaacgagaagcacgacgaggaguucugcgacaugcugcgccuguucgacuucaacaagcaggcgauccggcgccucaaggccgaggcccagauguccauccagcugaucaacaaggccgugaacgcccugaucaacgaccagcucaucaugaagaaccaccuccgggacaucauggggauccccuacugcaacuacagcaaguacugcuaccugaaccacaccgucacgggccgcaccucccugccccggugcugccuggugagcaacggguccuaccugaacgagacccacuucagcgacgacaucgagcagcaggcggacaacaugaucaccgagcuccugcagaaggaguacauggaccgccagggcaagacgccccugggccugguggaccucuucgucuucuccaccagcuucuaccugaucuccaucuuccugcaccucgugaagaucccgacccaccggcacgugaucgggaagcccugccccaagccccaccgccugaaccacaugggcaucugcagcugcgggcuguacaagcacccgggcguccccgugaaguggaagcggugaggacuaguaauaaggaaacuguaugaaugucugugggcaggaagugaagagauccuucuguaaagguuuuuggaauuaugucugcugaauaauaaacuuuuuugaaauaauaaaucugguagaaaaaugagaucuaaaaaaaaaaaaaaaaaaaaaaaaaaaaaaaaaaaaaaaaaaaaaaaaaaaaaaaaaaaaaaaaaaaaaaaaaaaaaaaaaaaaaaaaaaaaaaaaaaaa

SEQ ID NO: 39444 - RNA, 1785 nt, Artificial Sequence
  mRNA product Design b-4 (A100) comprising derived and/or modified sequence from LASV(LASV035-NIG-2009;Clade II)__AIT17588__GPCmut11 (opt1)
aggagagucccgcagucggcguccagcggcucugcuuguucgugugugugucguugcaggccuuauucaagcuuaccaugggccagaucaucaccuucuuccaggaggugccccacgucaucgaggaggugaugaacaucgugcugaucgcccucagccugcuggccauccucaaggggaucuacaacgucgcgaccugcggccuguucgggcugguguccuuccuccugcugugcggccgcagcugcuccacgaccuacaaggggguguacgagcuccagacccuggagcuggacauggccagccucaacaugaccaugccgcuguccugcacgaagaacaacagccaccacuacaucauggucggcaacgagaccggccuggagcucacccugaccaacacguccaucaucaaccacaaguucugcaaccugagcgacgcccacaagaagaaccucuacgaccacgcccugauguccaucaucagcaccuuccaccuguccauccccaacuucaaccaguacgaggccaugagcugcgacuucaacgggggcaagaucuccgugcaguacaaccucagccacgcguacgccguggacgccgccaaccacugcgggaccaucgcgaacggcguccugcagaccuucaugcggauggccuggggcggguccuacaucgcccuggacagcggcaagggguccugggacugcaucaugacgagcuaccaguaccucaucauccagaacaccaccugggaggaccacugccaguucucccgccccagccccaucggcuaccuggggcugcucagccagcggacccgcgacaucuacaucucccggcgccugcugggcacguucaccuggacccucagcgacuccgagggcaacgagacccccgggggcuacugccugacgcgguggaugcugaucgaggccgagcucaagugcuucgggaacaccgccguggcgaagugcaacgagaagcacgacgaggaguucugcgacaugcugcgccuguucgacuucaacaagcaggccauccggcgccucaaggccgaggcccagaugagcauccagcugaucaacaaggccgugaacgcgcugaucaacgaccagcucaucaugaagaaccaccuccgggacaucaugggcauccccuacugcaacuacuccaaguacugcuaccugaaccacaccgucaccgggaagacgagccugccccgcugcugccugguguccaacggcagcuaccugaacgagacccacuucuccgacgacaucgagcagcaggccgacaacaugaucaccgagcuccugcagaaggaguacaucgaccggcagggcaagaccccgcuggggcugguggaccucuucgucuucagcacguccuucuaccugaucagcaucuuccugcaccucgugaagaucccgacccaccgccacgugaucggcaagcccugccccaagccccaccggcugaaccacauggggaucugcuccugcggccuguacaagcacccggggguccccgugaaguggaagcgcugaggacuaguaauaaggaaacuguaugaaugucugugggcaggaagugaagagauccuucuguaaagguuuuuggaauuaugucugcugaauaauaaacuuuuuugaaauaauaaaucugguagaaaaaugagaucuaaaaaaaaaaaaaaaaaaaaaaaaaaaaaaaaaaaaaaaaaaaaaaaaaaaaaaaaaaaaaaaaaaaaaaaaaaaaaaaaaaaaaaaaaaaaaaaaaaaa

SEQ ID NO: 39445 - RNA, 1785 nt, Artificial Sequence
  mRNA product Design b-4 (A100) comprising derived and/or modified sequence from LASV(LASV1000-NIG-2009;Clade II)__AIT17782__GPCmut11 (opt1)
aggagagucccgcagucggcguccagcggcucugcuuguucgugugugugucguugcaggccuuauucaagcuuaccaugggccagaucaucaccuucuuccaggaggugccccacgucaucgaggaggugaugaacaucgugcugaucgcccucagccugcuggccauccucaaggggaucuacaacgucgcgaccugcggccuguucgggcugguguccuuccuccugcugugcggccgcagcugcuccacgaccuacaaggggguguacgagcuccagacccuggagcuggacauggccagccucaacaugaccaugccgcuguccugcacgaagaacaacagccaccacuacaucauggucggcaacgagaccggccuggagcucacccugaccaacacguccaucaucaaccacaaguucugcaaccugagcgacgcccacaagaagaaccucuacgaccacgcccugauguccaucaucagcaccuuccaccuguccauccccaacuucaaccaguacgaggccaugagcugcgacuucaacgggggcaagaucuccgugcaguacaaccucagccacaccuacgcgguggacgccgccaaccacugcgggaccaucgccaacggcguccugcagacguucaugcggauggcguggggcggguccuacaucgcccuggacagcggcaagggguccugggacugcaucaugaccagcuaccaguaccucaucauccagaacaccaccugggaggaccacugccaguucucccgccccagccccaucggcuaccuggggcugcucagccagcggacgcgcgacaucuacaucucccggcgccugcugggcaccuucaccuggacccucagcgacuccgagggcaacgagacgcccgggggcuacugccugacccgguggaugcugaucgaggccgagcucaagugcuucgggaacaccgccguggccaagugcaacgagaagcacgacgaggaguucugcgacaugcugcgccuguucgacuucaacaagcaggcgaucaagcggcucaagaccgaggcccagaugagcauccagcugaucaacaaggccgugaacgcccugaucaacgaccagcucaucaugaagaaccaccuccgcgacaucaugggcauccccuacugcaacuacuccaaguacugcuaccugaaccacacggucaccgggaagaccagccugccccggugcugccugguguccaacggcagcuaccugaacgagacccacuucuccgacgacaucgagcagcaggccgacaacaugaucacggagcuccugcagaaggaguacaucgaccgccagggcaagaccccgcuggggcugguggaccucuucgucuucagcaccuccuucuaccugaucagcaucuuccugcaccucgugaagaucccgacccaccggcacguggucggcaagcccugccccaagccccaccgccugaaccacauggggaucugcuccugcggccuguacaagcacccgggggugcccgugaaguggaagcggugaggacuaguaauaaggaaacuguaugaaugucugugggcaggaagugaagagauccuucuguaaagguuuuuggaauuaugucugcugaauaauaaacuuuuuugaaauaauaaaucugguagaaaaaugagaucuaaaaaaaaaaaaaaaaaaaaaaaaaaaaaaaaaaaaaaaaaaaaaaaaaaaaaaaaaaaaaaaaaaaaaaaaaaaaaaaaaaaaaaaaaaaaaaaaaaaa

SEQ ID NO: 39446 - RNA, 1785 nt, Artificial Sequence
  mRNA product Design b-4 (A100) comprising derived and/or modified sequence from LASV(LASV221-NIG-2010;Clade II)__AIT17624__GPCmut11 (opt1)
aggagagucccgcagucggcguccagcggcucugcuuguucgugugugugucguugcaggccuuauucaagcuuaccaugggccagaucaucaccuucuuccaggaggugccccacgucaucgaggaggugaugaacaucgugcugaucgcccucagccugcuggccauccucaaggggaucuacaacgucgcgaccugcggccuguucgggcugguguccuuccuccugcugugcggccgcagcugcuccacgaccuacaaggggguguacgagcuccagacccuggagcuggacauggccagccucaacaugaccaugccgcuguccugcacgaagaacaacagccaccacuacaucauggucggcaacgagaccggccuggagcucacccugaccaacacguccaucaucaaccacaaguucugcaaccugagcgacgcccacaagaagaaccucuacgaccacgcccugauguccaucaucagcaccuuccaccuguccauccccaacuucaaccaguacgaggccaugagcugcgacuucaacgggggcaagaucuccgugcaguacaaccucagccacaccuacgcgaucgacgccgccaaccacugcgggaccaucgccaacggcgugcugcagacguucaugcggauggcguggggcggguccuacaucgcccuggacagcggcaagggguccugggacugcaucaugaccagcuaccaguaccucaucauccagaacaccaccugggaggaccacugccaguucucccgccccagccccaucggcuaccuggggcugcucagccagcggacgcgcgacaucuacaucucccggcgccugcugggcaccuucaccuggacccucagcgacuccgagggcaacgagacgcccgggggcuacugccugacccgguggaugcugaucgaggccgagcucaagugcuucgggaacaccgccgucgccaagugcaacgagaagcacgacgaggaguucugcgacaugcugcgccuguucgacuucaacaagcaggcgauccggcgccucaagaccgaggcccagaugagcauccagcugaucaacaaggccgugaacgcccugaucaacgaccagcucaucaugaagaaccaccuccgggacaucaugggcauccccuacugcaacuacuccaaguacugcuaccugaaccacacggugaccgggaagaccagccugccccgcugcugccuggucuccaacggcagcuaccugaacgagacccacuucuccgacgacaucgagcagcaggccgacaacaugaucacggagaugcuccagaaggaguacauggaccggcagggcaagaccccgcuggggcugguggaccuguucguguucagcaccuccuucuaccucaucagcaucuuccugcaccuggucaagaucccgacccaccgccacgugaucggcaagcccugccccaagccccaccggcucaaccacauggggaucugcuccugcggccuguacaagcacccgggggugcccgucaaguggaagcgcugaggacuaguaauaaggaaacuguaugaaugucugugggcaggaagugaagagauccuucuguaaagguuuuuggaauuaugucugcugaauaauaaacuuuuuugaaauaauaaaucugguagaaaaaugagaucuaaaaaaaaaaaaaaaaaaaaaaaaaaaaaaaaaaaaaaaaaaaaaaaaaaaaaaaaaaaaaaaaaaaaaaaaaaaaaaaaaaaaaaaaaaaaaaaaaaaa

SEQ ID NO: 39447 - RNA, 1785 nt, Artificial Sequence
  mRNA product Design b-4 (A100) comprising derived and/or modified sequence from LASV(LASV237-NIG-2010;Clade II)__AIT17638__GPCmut11 (opt1)
aggagagucccgcagucggcguccagcggcucugcuuguucgugugugugucguugcaggccuuauucaagcuuaccaugggccagaucaucaccuucuuccaggaggugccccacgucaucgaggaggugaugaacaucgugcugaucgcccucagccugcuggccauccucaaggggaucuacaacgucgcgaccugcggccuguucgggcugguguccuuccuccugcugugcggccgcagcugcuccacgaccuacaaggggguguacgagcuccagacccuggagcuggacauggccagccucaacaugaccaugccgcuguccugcacgaagaacaacagccaccacuacaucauggucggcaacgagaccggccuggagcucacccugaccaacacguccaucaucaaccacaaguucugcaaccugagcgacgcccacaagaaggaccucuacgaccacgcccugauguccaucaucagcaccuuccaccuguccauccccaacuucaaccaguacgaggccaugagcugcgacuucaacgggggcaagaucuccgugcaguacaaccucagccacaccuacgcgguggacgccgccaaccacugcgggaccaucgccaacggcguccugcagacguucaugcggauggcguggggcggguccuacaucgcccuggacagcggcaagggguccugggacugcaucaugaccagcuaccaguaccucaucauccagaacaccaccugggaggaccacugccaguucucccgccccagccccaucggcuaccuggggcugcucagccagcggacgcgcgacaucuacaucucccggcgccugcugggcaccuucaccuggacccucagcgacuccgagggcaacgagacgcccgggggcuacugccugacccgguggaugcugaucgaggccgagcucaagugcuucgggaacaccgccguggccaagugcaacgagaagcacgacgaggaguucugcgacaugcugcgccuguucgacuucaacaagcaggcgauccggcgccucaagaccgaggcccagaugagcauccagcugaucaacaaggccgugaacgcccugaucaacgaccagcucaucaugaagaaccaccuccgggacaucaugggcauccccuacugcaacuacuccaaguacugcuaccugaaccacacggucaccgggaagaccagccugccccgcugcugccugguguccaacggcagcuaccugaacgagacccacuucuccgacgacaucgagcagcaggccgacaacaugaucacggagcuccugcagaaggaguacauggaccggcagggcaagaccccgcuggggcugguggaccucuucgucuucagcaccuccuucuaccugaucagcaucuuccugcaccucaucaagaucccgacccaccgccacaucacgggcaagcccugccccaagccccaccggcugaaccacauggggaucugcuccugcggccuguacaagcacccgggggugcccgugaaguggaagcgcugaggacuaguaauaaggaaacuguaugaaugucugugggcaggaagugaagagauccuucuguaaagguuuuuggaauuaugucugcugaauaauaaacuuuuuugaaauaauaaaucugguagaaaaaugagaucuaaaaaaaaaaaaaaaaaaaaaaaaaaaaaaaaaaaaaaaaaaaaaaaaaaaaaaaaaaaaaaaaaaaaaaaaaaaaaaaaaaaaaaaaaaaaaaaaaaaa

SEQ ID NO: 39448 - RNA, 1785 nt, Artificial Sequence
  mRNA product Design b-4 (A100) comprising derived and/or modified sequence from LASV(LASV253-NIG-2011;Clade II)__AIT17670__GPCmut11 (opt1)
aggagagucccgcagucggcguccagcggcucugcuuguucgugugugugucguugcaggccuuauucaagcuuaccaugggccagaucaucaccuucuuccaggaggugccccacgucaucgaggaggugaugaacaucgugcugaucgcccucagccugcuggccauccucaaggggaucuacaacgucgcgaccugcggccuguucgggcugguguccuuccuccugcugugcggccgcagcugcuccacgaccuacaaggggguguacgagcuccagacccuggagcuggacauggccagccucaacaugaccaugccgcuguccugcacgaagaacaacagccaccacuacaucauggucggcaacgagaccggccuggagcucacccugaccaacacguccaucaucaaccacaaguucugcaaccugagcgacgcccacaagaagaaccucuacgaccacgcccugauguccaucaucagcaccuuccaccuguccauccccaacuucaaccaguacgaggccaugagcugcgacuucaacgggggcaagaucuccgugcaguacaaccucagccacaccuacgcgguggacgccgccaaccacugcgggaccaucgccaacggcguccugcagacguucaugcggauggcguggggcggguccuacaucgcccuggacagcggcaagggguccugggacugcaucaugaccagcuaccaguaccucaucauccagaacaccaccugggaggaccacugccaguucucccgccccagccccaucggcuaccuggggcugcucagccagcggacgcgcgacaucuacaucucccggcgccugcugggcaccuucaccuggacccucagcgacuccgagggcaacgagacgcccgggggcuacugccugacccgguggaugcugaucgaggccgagcucaagugcuucgggaacaccgccguggccaagugcaacgagaagcacgacgaggaguucugcgacaugcugcgccuguucgacuucaacaagcaggcgauccggcgccucaaggccgaggcccagaugagcauccagcugaucaacaaggccgugaacgcccugaucaacgaccagcucaucaugaagaaccaccuccgggacaucaugggcaucccguacugcaacuacuccaaguacugcuaccugaaccacaccgucacggggcgcaccagccugccccggugcugccugguguccaacggcagcuaccugaacgagacccacuucuccgacgacaucgagcagcaggcggacaacaugaucaccgagcuccugcagaaggaguacaucgaccgccagggcaagacgccccuggggcugguggaccucuucgucuucagcaccuccuucuaccugaucagcaucuuccugcaccucgugaagaucccgacccaccggcacaucaucggcaagcccugccccaagccccaccgccugaaccacauggggaucugcuccugcggccuguacaagcacccgggggugcccgucaaguggaagcggugaggacuaguaauaaggaaacuguaugaaugucugugggcaggaagugaagagauccuucuguaaagguuuuuggaauuaugucugcugaauaauaaacuuuuuugaaauaauaaaucugguagaaaaaugagaucuaaaaaaaaaaaaaaaaaaaaaaaaaaaaaaaaaaaaaaaaaaaaaaaaaaaaaaaaaaaaaaaaaaaaaaaaaaaaaaaaaaaaaaaaaaaaaaaaaaaa

SEQ ID NO: 39449 - RNA, 1785 nt, Artificial Sequence
  mRNA product Design b-4 (A100) comprising derived and/or modified sequence from LASV(LASV254-NIG-2011;Clade II)__AIT17674__GPCmut11 (opt1)
aggagagucccgcagucggcguccagcggcucugcuuguucgugugugugucguugcaggccuuauucaagcuuaccaugggccagaucaucaccuucuuccaggaggugccccacgucaucgaggaggugaugaacaucgugcugaucgcccucagccugcuggccauccucaaggggaucuacaacgucgcgaccugcggccuguucgggcugguguccuuccuccugcugugcggccgcagcugcuccacgaccuacaaggggguguacgagcuccagacccuggagcuggacaugaccaaccucaacaugacgaugccgcugagcugcaccaagaacaacucccaccacuacaucauggucggcaacgagaccggccuggagcucacccugacgaacaccagcaucaucaaccacaaguucugcaaccuguccgacgcccacaagaagaaccucuacaaccacgcccugaugagcaucaucuccaccuuccaccugagcauccccaacuucaaccaguacgaggccauguccugcgacuucaacgggggcaagaucagcgugcaguacaaccucucccacagcuacgccguggacgcggccaaccacugcgggaccaucgccaacggcguccugcagacguucaugcggauggccuggggcggguccuacaucgcgcuggacagcggcaaggggaacugggacugcaucaugaccuccuaccaguaccucaucauccagaacaccaccugggaggaccacugccaguucagccgccccucccccaucggcuaccuggggcugcucagccagcggacgcgcgacaucuacaucagccggcgccugcugggcaccuucaccuggacccucuccgacagcgagggcaacgagacgcccgggggcuacugccugacccgguggaugcugaucgaggccgagcucaagugcuucgggaacaccgccguggccaagugcaacgagaagcacgacgaggaguucugcgacaugcugcgccuguucgacuucaacaagcaggccauccggcgccucaagaccgaggcgcaggccaacauccagcugaucaacaaggccgugaacgcccugaucaacgaccagcucaucaugaagaaccaccuccgggacaucaugggcauccccuacugcaacuacuccaaguacugcuaccugaaccacacggucaccgggaagaccagccugccccgcugcugccugguguccaacggcagcuaccugaacgagacccacuucuccgacgacaucgagcagcaggccgacaacaugaucacggagcuccugcagaaggaguacauggaccggcagggcaagaccccgcuggggcugguggaccucuucgucuucagcaccuccuucuaccugaucagcaucuuccugcaccucgugaagaucccgacccaccgccacgugaucggcaagcccugccccaagccccaccggcugaaccacauggggaucugcuccugcggccuguacaagcacccggggguccccgugaaguggaagcgcugaggacuaguaauaaggaaacuguaugaaugucugugggcaggaagugaagagauccuucuguaaagguuuuuggaauuaugucugcugaauaauaaacuuuuuugaaauaauaaaucugguagaaaaaugagaucuaaaaaaaaaaaaaaaaaaaaaaaaaaaaaaaaaaaaaaaaaaaaaaaaaaaaaaaaaaaaaaaaaaaaaaaaaaaaaaaaaaaaaaaaaaaaaaaaaaaa

SEQ ID NO: 39450 - RNA, 1785 nt, Artificial Sequence
  mRNA product Design b-4 (A100) comprising derived and/or modified sequence from LASV(Nig08-A19;Clade III)__ADU56618__GPCmut11 (opt1)
aggagagucccgcagucggcguccagcggcucugcuuguucgugugugugucguugcaggccuuauucaagcuuaccaugggccagaucgugaccuucuuccaggaggucccccacgugaucgaggaggugaugaacaucguccugaucgcccucagcauccuggccauccugaaggggcucuacaacaucgcgaccugcggccugaucgggcuggugacguuccuccugcuguccggccgcagcugcuccaugaccuacaaggggguguacgagcuccagacccuggagcugaacaugaacacccucaacaugacgaugccgcugagcugcaccaagaacaacucccaccacuacaucauggucggcaacgagaccggccuggagcucacccugacgaacaccagccugcuccaccacaaguucugcaaccuguccgacgcccacaagaagaaccuguacgaccacacccucaugagcaucaucuccaccuuccaccugagcauccccaacuucaaccaguacgaggccauguccugcgacuucaacgggggcaagaucacggugcaguacaaccugagccacuccuacgccaucgacgccgcgaaccacugcgggaccguggccaacggcguccuccagaccuucaugcggauggccuggggcgggagcuacaucgcccuggacuccggccgcgggaagugggacugcaucaugaccagcuaccaguaccugaucauccagaacacgaccugggaggaccacugccaguucucccggcccagccccaucggcuaccucgggcugcugucccagcgcacccgggacaucuacaucagccgccggcuccugggcaccuucacguggacccugagcgacuccgagggcaacgagacccccgggggcuacugccucacccgcuggaugcugaucgaggcggagcugaagugcuucgggaacacggccguggccaagugcaacgagaagcacgacgaggaguucugcgacaugcuccggcuguucgacuucaacaagcaggccauccgccggcugaaggccgaggcgcagaugagcauccagcucaucaacaaggccgugaacgcccugaucaacgaccagcugaucaugaagaaccaccuccgcgacaucaugggcauccccuacugcaacuacuccaaguacugcuaccugaaccacaccagcaccgggcggaccucccugccccgcugcugccucgucagcaacggcuccuaccugaacgagacgcacuucagcgacgacaucgagcagcaggccgacaacaugaucaccgagaugcugcagaaggaguaccuggaccggcagggcaagaccccgcucgggcugguggaccuguucguguucuccaccagcuucuaccucaucuccaucuuccugcaccuggucaagaucccgacgcaccgccacaucgugggcaagcccugccccaagccccaccggcucaaccacauggggaucugcagcugcggccuguacaagcagccgggggugcccguccgcuggaagcggugaggacuaguaauaaggaaacuguaugaaugucugugggcaggaagugaagagauccuucuguaaagguuuuuggaauuaugucugcugaauaauaaacuuuuuugaaauaauaaaucugguagaaaaaugagaucuaaaaaaaaaaaaaaaaaaaaaaaaaaaaaaaaaaaaaaaaaaaaaaaaaaaaaaaaaaaaaaaaaaaaaaaaaaaaaaaaaaaaaaaaaaaaaaaaaaaa

SEQ ID NO: 39451 - RNA, 1788 nt, Artificial Sequence
  mRNA product Design b-4 (A100) comprising derived and/or modified sequence from LASV(G1180-SLE-2010;Clade IV)__AIT17168__GPCmut11 (opt1)
aggagagucccgcagucggcguccagcggcucugcuuguucgugugugugucguugcaggccuuauucaagcuuaccaugggccagaucgugaccuucuuccaggaggucccccacgugaucgaggaggugaugaacaucguccugaucgcccucagcauccuggccgugcugaaggggcucuacaacuucgcgaccugcggccugguggggcugcucaccuuccugcugcucugcggccgcuccugcaccgccagccgguacaagggggucuacgagcugcagacccuggagcucaacauggagacccugaacaugacgaugccgcuguccugcaccaagaacaacagccaccacuacaucauggugggcaacgagaccggccucgagcugacccugacgaacaccuccaucaucaaccacaaguucugcaaccucagcgacgcccacaagaagaaccuguacgaccacgcccugauguccaucaucagcaccuuccaccucuccauccccaacuucaaccaguacgaggccaugagcugcgacuucaacgggggcaagaucuccgugcaguacaaccugagccacuccuacgcgggggacgccgccaaccacugcggcaccgucgccaacggggugcugcagacguucaugcgcauggcguggggcggcagcuacaucgcccucgacuccgggcacggcagcugggacugcaucaugaccuccuaccaguaccugaucauccagaacaccaccugggaggaccacugccaguucagccggcccucccccaucggguaccugggccuccugagccagcgcacgcgggacaucuacaucagccgccggcugcucggcaccuucaccuggacccuguccgacagcgaggggaaggacacgccgggcggguacugccugacccgcuggaugcucaucgaggccgagcugaagugcuucggcaacaccgccguggccaagugcaacgagaagcacgacgaggaguucugcgacaugcugcggcuguucgacuucaacaagcaggcgauccagcgccugaaggccgaggcccagauguccauccagcugaucaacaaggccgucaacgcccucaucaacgaccagcugaucaugaagaaccaccuccgggacaucauggggauccccuacugcaacuacagcaaguacugcuaccucaaccacaccacgaccggcaagaccucccugcccaagugcugccuggugagcaacggcuccuaccucaacgagacccacuucagcgacgacaucgagcagcaggcggacaacaugaucacggagaugcugcagaaggaguacauggagcgccaggggaagacgccccugggccugguggaccucuucgucuucuccaccagcuucuaccugaucuccaucuuccugcaccucgugaagaucccgacccaccggcacaucgugggcaagagcugccccaagccccaccgccugaaccacauggggaucugcuccugcgggcuguacaagcagcccggcgucccggugaaguggaagcggugaggacuaguaauaaggaaacuguaugaaugucugugggcaggaagugaagagauccuucuguaaagguuuuuggaauuaugucugcugaauaauaaacuuuuuugaaauaauaaaucugguagaaaaaugagaucuaaaaaaaaaaaaaaaaaaaaaaaaaaaaaaaaaaaaaaaaaaaaaaaaaaaaaaaaaaaaaaaaaaaaaaaaaaaaaaaaaaaaaaaaaaaaaaaaaaaa

SEQ ID NO: 39452 - RNA, 1788 nt, Artificial Sequence
  mRNA product Design b-4 (A100) comprising derived and/or modified sequence from LASV(G1442-SLE-2011;Clade IV)__AIT17180__GPCmut11 (opt1)
aggagagucccgcagucggcguccagcggcucugcuuguucgugugugugucguugcaggccuuauucaagcuuaccaugggccagaucgugaccuucuuccaggaggucccccacgugaucgaggaggugaugaacaucguccugaucgcccucagcauccuggccgugcugaaggggcucuacaacguggcgaccugcggccugaucgggcuggucacguuccuccugcugugcggccgcuccugcaccaccacccucuacaaggggguguacgagcugcagacgcuggagcucaacauggagacccugaacaugaccaugccgcugagcugcaccaagaacaacucccaccacuacauccgggugggcaacgagacgggccucgagcugacccugaccaacaccagcaucaucaaccacaaguucugcaaccucuccgacgcccacaagaagaaccuguacgaccacgcccugaugagcaucaucuccacguuccaccucagcauccccaacuucaaccaguacgaggccauguccugcgacuucaacgggggcaagaucagcguccaguacaaccugucccacagcuacgccggggacgcggccaaccacugcggcaccguggccaacggggugcugcagaccuucaugcgcauggccuggggcggcuccuacaucgcgcucgacagcgggcggggcaacugggacugcaucaugaccuccuaccaguaccugaucauccagaacacgaccugggacgaccacugccaguucagccgccccucccccaucggguaccugggccuccugagccagcggacccgcgacgucuacaucucccggcgccugcucggcaccuucacguggacccugagcgacagcgaggggaaggacaccccgggcggguacugccugacccgguggaugcucaucgaggccgagcugaagugcuucggcaacacggccguggccaagugcaacgagaagcacgacgaggaguucugcgacaugcugcgccucuucgacuucaacaagcaggccauccagcggcugaaggcggaggcccagauguccauccagcugaucaacaaggccgugaacgcccucaucaacgaccagcugaucaugaagaaccaccuccgcgacaucauggggauccccuacugcaacuacagcaaguacugcuaccugaacaacaccgccaccggcaagaccucccugcccaagugcugccugaucagcaacggcuccuaccucaacgagacgcacuucagcgacgacaucgagcaggaggcggacaacaugaucaccgagaugcugcagaaggaguacauggagcggcaggggaagacgccccugggccuggucgaccucuucguguucuccaccagcuucuaccugaucuccaucuuccugcaccucgugaagaucccgacccaccgccacaucgucggcaagagcugccccaagccccaccggcugaaccacauggggaucugcuccugcgggcuguacaagcagcccggcgugccggugcgcuggaagcggugaggacuaguaauaaggaaacuguaugaaugucugugggcaggaagugaagagauccuucuguaaagguuuuuggaauuaugucugcugaauaauaaacuuuuuugaaauaauaaaucugguagaaaaaugagaucuaaaaaaaaaaaaaaaaaaaaaaaaaaaaaaaaaaaaaaaaaaaaaaaaaaaaaaaaaaaaaaaaaaaaaaaaaaaaaaaaaaaaaaaaaaaaaaaaaaaa

SEQ ID NO: 39453 - RNA, 1788 nt, Artificial Sequence
  mRNA product Design b-4 (A100) comprising derived and/or modified sequence from LASV(G3010-SLE-2013;Clade IV)__AIT17344__GPCmut11 (opt1)
aggagagucccgcagucggcguccagcggcucugcuuguucgugugugugucguugcaggccuuauucaagcuuaccaugggccagaucgugaccuucuuccaggaggucccccacgugaucgaggaggugaugaacaucguccugaucgcccucagcauccuggccgugcugaaggggcucuacaacuucgcgaccugcggccugguggggcuggucacguuccuccugcugugcggccgcuccugcaccaccagccucuacaaggggguguacgagcugcagacccuggagcucaacauggagacgcugaacaugaccaugccgcuguccugcaccaagaacaacagccaccacuacaucauggugggcaacgagaccggccucgagcugacgcugaccaacaccuccaucaucaaccacaaguucugcaaccucagcgacgcccacaagaagaaccuguacaaccacgcccugauguccaucaucagcaccuuccaccucuccauccccaacuucaaccaguacgaggccaugagcugcgacuucaacgggggcaagaucuccguccaguacaaccugagccacuccuacgccggggacgcggccagccacugcggcacgguggccaacggggugcugcagaccuucaugcggauggccuggggcggcuccuacaucgcgcucgacagcggguacggcaagugggacugcaucaugaccuccuaccaguaccugaucauccagaacaccacgugggaggaccacugccaguucagccgccccucccccaucggguaccugggccuccugagccagcggacccgcgacaucuacaucagccggcgccugcucggcaccuucaccuggacgcuguccgacagcgaggggaaggacaccccgggcggguacugccugacccgguggaugcucaucgaggccgagcugaagugcuucggcaacaccgccgucgccaagugcaacgagaagcacgacgaggaguucugcgacaugcugcgccucuucgacuucaacaagcaggccauccagcggcugaagacggaggcgcagauguccauccagcugaucaacaaggccgugaacgcccucaucaacgaccagcugaucaugaagaaccaccuccgcgacaucauggggauccccuacugcaacuacagcaaguacugcuaccugaaccacaccaccaccggcaagacgucccugcccaagugcugccuggugagcaacggcuccuaccucaacgagacccacuucagcgacgacaucgagcagcaggccgacaacaugaucaccgagaugcugcagaaggaguacauggagcggcaggggaagacgccccugggccuggucgaccucuucguguucuccaccagcuucuaccugaucuccaucuuccugcaccucgugaagaucccgacccaccgccacaucgucggcaagagcugccccaagccccaccggcugaaccacauggggaucugcuccugcgggcuguacaagcagcccggcgugccggugcgcuggaagcggugaggacuaguaauaaggaaacuguaugaaugucugugggcaggaagugaagagauccuucuguaaagguuuuuggaauuaugucugcugaauaauaaacuuuuuugaaauaauaaaucugguagaaaaaugagaucuaaaaaaaaaaaaaaaaaaaaaaaaaaaaaaaaaaaaaaaaaaaaaaaaaaaaaaaaaaaaaaaaaaaaaaaaaaaaaaaaaaaaaaaaaaaaaaaaaaaa

SEQ ID NO: 39454 - RNA, 1788 nt, Artificial Sequence
  mRNA product Design b-4 (A100) comprising derived and/or modified sequence from LASV(G502-SLE-2009;Clade IV)__AIT17126__GPCmut11 (opt1)
aggagagucccgcagucggcguccagcggcucugcuuguucgugugugugucguugcaggccuuauucaagcuuaccaugggccagaucgugaccuucuuccaggaggucccccacgugaucgaggaggugaugaacaucguccugaucgcccucagcauccuggccgugcugaaggggcucuacaacuucgcgaccugcggccugguggggcugcucacguuccugcugcucugcggccgcuccugcaccaccgggcuguacaagggcgucuacgagcugcagacccucgagcugaacauggagacgcugaacaugaccaugccgcucagcugcaccaagaacaacucccaccacuacaucauggugggcaacgagaccgggcuggagcugacgcucaccaacaccagcaucaucaaccacaaguucugcaaccuguccgacgcccacaagaagaaccuguacgaccacgcccucaugagcaucaucuccaccuuccaccugagcauccccaacuucaaccaguacgaggccauguccugcgacuucaacggcgggaagaucagcgugcaguacaaccugucccacagcuacgccggcgacgcggccgaccacugcgggacggucgccaacggcgugcuccagaccuucaugcggauggccuggggcggguccuacaucgcgcuggacagcggccgcgggcggugggacugcaucaugaccuccuaccaguaccugaucauccagaacaccacgugggaggaccacugccaguucagccgccccucccccaucggcuaccucggccugcugagccagcggacccgcgacaucuacaucucccggcgccuccuggggaccuucaccuggacgcugagcgacagcgagggcaaggacacccccgggggcuacugccucacccgguggaugcugaucgaggccgagcugaagugcuucgggaacaccgccguggccaagugcaacgagaagcacgacgaggaguucugcgacaugcuccgccuguucgacuucaacaagcaggccauccagcggcugaaggcggaggcccagauguccauccagcucaucaacaaggccgucaacgcccugaucaacgaccagcuggugaugaagaaccaccuccgcgacaucaugggcauccccuacugcaacuacagccgguacugcuaccugaaccacacgaccaccggccgcaccucccugcccaagugcugccucgugagcaacggguccuaccugaacgagacgcacuucagcgacgacaucgagcagcaggccgacaacaugaucaccgagaugcugcagaaggaguacauggagcggcagggcaagaccccgcuggggcucgucgaccuguucguguucuccaccagcuucuaccugaucuccaucuuccuccaccuggugaagaucccgacgcaccgccacaucgucggcaagagcugccccaagccccaccggcugaaccacauggggaucugcuccugcggccucuacaagcagcccggcgugccggugaaguggaagcgcugaggacuaguaauaaggaaacuguaugaaugucugugggcaggaagugaagagauccuucuguaaagguuuuuggaauuaugucugcugaauaauaaacuuuuuugaaauaauaaaucugguagaaaaaugagaucuaaaaaaaaaaaaaaaaaaaaaaaaaaaaaaaaaaaaaaaaaaaaaaaaaaaaaaaaaaaaaaaaaaaaaaaaaaaaaaaaaaaaaaaaaaaaaaaaaaaa

SEQ ID NO: 39455 - RNA, 1788 nt, Artificial Sequence
  mRNA product Design b-4 (A100) comprising derived and/or modified sequence from LASV(G733-SLE-2010;Clade IV)__AIT17154__GPCmut11 (opt1)
aggagagucccgcagucggcguccagcggcucugcuuguucgugugugugucguugcaggccuuauucaagcuuaccaugggccagaucgugaccuucuuccaggaggucccccacgugaucgaggaggugaugaacaucguccugaucgcccucagcauccuggccgugcugaaggggcucuacaacuucgcgaccugcggcaucguggggcuggucuccuuccugcuccugugcggccgcagcugcacgaccucccuguacaaggggguguacgagcuccagacccuggagcugaacauggagacccucaacaugacgaugccgcugagcugcaccaagaacaacucccaccacuacaucauggugggcaacgagaccggccuggagcucacccugacgaacaccagcaucaucaaccacaaguucugcaaccuguccgacgcccacaagaagaaccucuacgaccacgcccugaugagcaucaucuccaccuuccaccugagcauccccaacuucaaccaguacgaggccauguccugcgacuucaacgggggcaagaucagcguccaguacaaccucucccacagcuacgccggggacgcggccaaccacugcggcaccaucgccaacggggugcugcagacguucaugcggauggccuggggcggcuccuacaucgcgcuggacagcgggcgcgaccggugggacugcaucaugaccuccuaccaguaccucaucauccagaacaccaccugggaggaccacugccaguucagccgccccucccccaucggcuaccuggggcugcucagccagcggacgcgcgacaucuacaucagccggcgccugcugggcaccuucaccuggacccucuccgacagcgagggcaaggacacgcccgggggcuacugccugacccgguggaugcugaucgaggccgagcucaagugcuucgggaacaccgccguggccaagugcaacgagaagcacgacgaggaguucugcgacaugcugcgccuguucgacuucaacaagcaggccauccagcggcucaaggcggaggcccagauguccauccagcugaucaacaaggccgucaacgcccugaucaacgaccagcucaucaugaagaaccaccuccgcgacaucaugggcauccccuacugcaacuacagcaaguacugcuaccugaaccacaccacgaccgggaagaccucccugcccaagugcugccuggugagcaacggcuccuaccugaacgagacccacuucagcgacgacaucgagcagcaggccgacaacaugaucacggagaugcuccagaaggaguacauggagcggcagggcaagaccccgcuggggcugguggaccuguucgucuucuccaccagcuucuaccucaucuccaucuuccugcaccuggugaagaucccgacccaccgccacguggucggcaagagcugccccaagccccaccggcucaaccacauggggaucugcuccugcggccuguacgggcagcccggcgugccggugaaguggaagcgcugaggacuaguaauaaggaaacuguaugaaugucugugggcaggaagugaagagauccuucuguaaagguuuuuggaauuaugucugcugaauaauaaacuuuuuugaaauaauaaaucugguagaaaaaugagaucuaaaaaaaaaaaaaaaaaaaaaaaaaaaaaaaaaaaaaaaaaaaaaaaaaaaaaaaaaaaaaaaaaaaaaaaaaaaaaaaaaaaaaaaaaaaaaaaaaaaa

SEQ ID NO: 39456 - RNA, 1788 nt, Artificial Sequence
  mRNA product Design b-4 (A100) comprising derived and/or modified sequence from MOPV/LASV reassortant(IGS-1;Clade IV)__AFY05576__GPCmut11 (opt1)
aggagagucccgcagucggcguccagcggcucugcuuguucgugugugugucguugcaggccuuauucaagcuuaccaugggccagaucgugaccuucuuccaggaggucccccacgugaucgaggaggugaugaacaucguccugaucgcccucagcgugcuggccgugcugaaggggcucuacaacuucgcgaccugcggccuggucgggcuggugacguuccuccugcugugcggccgcuccugcaccaccagccucuacaaggggguguacgagcugcagacccuggagcucaacauggagacgcugaacaugaccaugccgcuguccugcaccaagaacaacagccaccacuacaucauggucggcaacgagaccggccucgagcugacgcugaccaacaccuccaucaucaaccacaaguucugcaaccucagcgacgcccacaagaagaaccuguacgaccacgcccugauguccaucaucagcaccuuccaccucuccauccccaacuucaaccaguacgaggccaugagcugcgacuucaacgggggcaagaucuccgugcaguacaaccugagccacuccuacgccggggacgcggccaaccacugcggcacgguggccaacgggguccugcagaccuucaugcggauggccuggggcggcagcuacaucgcgcucgacuccgggcgcggcaacugggacugcaucaugaccagcuaccaguaccugaucauccagaacaccacgugggaggaccacugccaguucucccggcccagccccaucggguaccugggccuccugucccagcgcacccgggacaucuacaucagccgccggcugcucggcaccuucaccuggacgcugagcgacuccgagggggaggacaccccgggcggguacugccugacccgcuggaugcucaucgaggccgagcugaagugcuucggcaacaccgccguggccaagugcaacgagaagcacgacgaggaguucugcgacaugcugcggcuguucgacuucaacaagcaggccauccagcgccugaaggcggaggcccagaugagcauccagcugaucaacaaggccgugaacgcccucaucaacgaccagcugaucaugaagaaccaccuccgggacaucauggggauccccuacugcaacuacuccaaguacugcuaccucaaccacacgaccaccggccgcaccagccugcccaagugcugccuggucuccaacggcagcuaccucaacgagacgcacuucuccgacgacaucgagcagcaggccgacaacaugaucaccgagaugcugcagaaggaguacauggagcggcaggggaagacgccccugggccugguggaccucuucguguucagcaccuccuucuaccugaucagcaucuuccugcaccucgucaagaucccgacccaccgccacaucguggggaaguccugccccaagccccaccggcugaaccacaugggcaucugcagcugcgggcuguacaagcagcccggcgugccggucaaguggaagcgcugaggacuaguaauaaggaaacuguaugaaugucugugggcaggaagugaagagauccuucuguaaagguuuuuggaauuaugucugcugaauaauaaacuuuuuugaaauaauaaaucugguagaaaaaugagaucuaaaaaaaaaaaaaaaaaaaaaaaaaaaaaaaaaaaaaaaaaaaaaaaaaaaaaaaaaaaaaaaaaaaaaaaaaaaaaaaaaaaaaaaaaaaaaaaaaaaa

SEQ ID NO: 39457 - RNA, 1788 nt, Artificial Sequence
  mRNA product Design b-4 (A100) comprising derived and/or modified sequence from LASV(LM765-SLE-2012;Clade IV)__AIT17814__GPCmut11 (opt1)
aggagagucccgcagucggcguccagcggcucugcuuguucgugugugugucguugcaggccuuauucaagcuuaccaugggccagaucgugaccuucuuccaggaggucccccacgugaucgaggaggugaugaacaucguccugaucgcccucagcauccuggccgugcugaaggggcucuacaacuucgcgaccugcggccugguggggcuggucacguuccuccugcugugcggccgcuccugcaccaccagccucuacaaggggguguacgagcugcagacccuggagcucaacauggagacgcugaacaugaccaugccgcuguccugcaccaagaacaacagccaccacuacaucauggugggcaacgagaccggccucgagcugacgcugaccaacaccuccaucaucgaccacaaguucugcaaccucagcgacgcccaccggaagaaccuguacgaccacgcccugauguccaucaucagcaccuuccaccucuccauccccaacuucaaccaguacgaggccaugagcugcgacuucaacgggggcaagaucuccguccaguacaaccugagccacuccuacgccaaggacgcggccgaccacugcgggacgguggccaacggcgugcugcagaccuucaugcgcauggccuggggcgggagcuacaucgcgcucgacuccggccgggggcgcugggacugcaucaugaccagcuaccaguaccugaucauccagaacaccacgugggaggaccacugccaguucucccggcccagccccaucggcuaccuggggcuccugucccagcgcacccgggacaucuacaucagccgccggcugcucggcaccuucaccuggacgcugagcgacuccgagggcaaggacacccccgggggcuacugccugacccgcuggaugcucaucgaggccgagcugaagugcuucgggaacaccgccgucgccaagugcaacgagaagcacgacgaggaguucugcgacaugcugcggcuguucgacuucaacaagcaggccauccagcgccugaaggcggaggcccagaugagcauccagcugaucaacaaggccgugaacgcccucaucaacgaccagcugaucaugaagaaccaccuccgggacaucaugggcauccccuacugcaacuacuccaaguacugcuaccucaaccacacgaccaccgggaagaccagccugcccaagugcugccugguguccaacggcagcuaccucaacgagacgcacuucuccgacgacaucgagcagcaggccgacaacaugaucaccgagaugcugcagaaggaguacauggagcgccagggcaagaccccgcuggggcuggucgaccucuucguguucagcaccuccuucuaccugaucagcaucuuccugcaccucgugaagaucccgacgcaccggcacaucgucggcaagcccugccccaagccccaccgccugaaccacauggggaucugcuccugcggccuguacaagcagccgggggugcccgugaaguggaagcggugaggacuaguaauaaggaaacuguaugaaugucugugggcaggaagugaagagauccuucuguaaagguuuuuggaauuaugucugcugaauaauaaacuuuuuugaaauaauaaaucugguagaaaaaugagaucuaaaaaaaaaaaaaaaaaaaaaaaaaaaaaaaaaaaaaaaaaaaaaaaaaaaaaaaaaaaaaaaaaaaaaaaaaaaaaaaaaaaaaaaaaaaaaaaaaaaa

SEQ ID NO: 39458 - RNA, 1788 nt, Artificial Sequence
  mRNA product Design b-4 (A100) comprising derived and/or modified sequence from LASV(LM776-SLE-2012;Clade IV)__AIT17824__GPCmut11 (opt1)
aggagagucccgcagucggcguccagcggcucugcuuguucgugugugugucguugcaggccuuauucaagcuuaccaugggccagaucgugaccuucuuccaggaggucccccacgugaucgaggaggugaugaacaucguccugaucgcccucagcauccuggccgugcugaaggggcucuacaacuucgcgaccugcggccugguggggcuggucacguuccuccugcugugcggccgcuccugcaccaccagcguguacaaggggguguacgagcuccagacccuggagcugaacauggagacgcucaacaugaccaugccgcuguccugcaccaagaacaacagccaccacuacaucauggucggcaacgagaccggccuggagcucacgcugaccaacaccuccaucaucaaccacaaguucugcaaccugagcgacgcccacaagaagaaccucuacgaccacgcccugauguccaucaucagcaccuuccaccuguccauccccaacuucaaccaguacgaggccaugagcugcgacuucaacgggggcaagaucuccgugcaguacaaccucagccacuccuacgccggggacgcggccaaccacugcggcacgguggccaacgggguccugcagaccuucaugcggauggccuggggcggcagcuacaucgcgcuggacuccgggcacggcaagugggacugcaucaugaccagcuaccaguaccucaucauccagaacaccacgugggaggaccacugccaguucucccgccccagccccaucggguaccugggccugcucucccagcggacccgcgacaucuacaucagccggcgccugcugggcaccuucaccuggacgcucagcgacuccgaggggaaggacaccccgggcggguacugccugacccgguggaugcugaucgaggccgagcucaagugcuucggcaacaccgccguggccaagugcaacgagaagcacgacgaggaguucugcgacaugcugcgccuguucgacuucaacaagcaggccauccagcggcucaaggcggaggcccagaugagcauccagcugaucaacaaggccgugaacgcccugaucaacgaccagcucaucaugaagaaccaccuccgcgacaucauggggauccccuacugcaacuacuccaaguacugcuaccugaaccacacgaccaccggcaagaccagccugcccaagugcugccuggucuccaacggcagcuaccugaacgagacgcacuucuccgacgacaucgagcagcaggccgacaacaugaucaccgagaugcuccagaaggaguacauggagcggcaggggaagacgccccugggccugguggaccuguucguguucagcaccuccuucuaccucaucagcaucuuccugcaccuggucaagaucccgacccaccgccacaucguggggaaguccugccccaagccccaccggcucaaccacaugggcaucugcagcugcgggcuguacaagcagcccggcgugccgguccgcuggaagcggugaggacuaguaauaaggaaacuguaugaaugucugugggcaggaagugaagagauccuucuguaaagguuuuuggaauuaugucugcugaauaauaaacuuuuuugaaauaauaaaucugguagaaaaaugagaucuaaaaaaaaaaaaaaaaaaaaaaaaaaaaaaaaaaaaaaaaaaaaaaaaaaaaaaaaaaaaaaaaaaaaaaaaaaaaaaaaaaaaaaaaaaaaaaaaaaaa

SEQ ID NO: 39459 - RNA, 1788 nt, Artificial Sequence
  mRNA product Design b-4 (A100) comprising derived and/or modified sequence from LASV(Mad39;Clade IV)__ANH09722__GPCmut11 (opt1)
aggagagucccgcagucggcguccagcggcucugcuuguucgugugugugucguugcaggccuuauucaagcuuaccaugggccagaucgugaccuucuuccaggaggucccccacgugaucgaggaggugaugaacaucguccugaucgcccucagcauccuggccgugcugaaggggcucuacaacguggcgaccugcggccugaucgggcuggucacguuccuccugcugugcggccgcuccugcaccaccacccucuacaaggggguguacgagcugcaggcccuggagcucaacauggagacgcugaacaugaccaugccgcugagcugcaccaagaacaacucccaccacuacauccgggugggcaacgagaccggccucgagcugacgcugaccaacaccagccucaucaaccacaaguucugcaaccuguccgacgcccacaagaagaaccuguacgaccacgcccucaugagcaucaucuccaccuuccaccugagcauccccaacuucaaccaguacgaggccauguccugcgacuucaacgacgggaagaucagcguccaguacaaccugucccacacguacgcgggcgacaccgccaaccacugcgggaccguggccaacggcgugcuccagaccuucaugcgcauggccuggggcgggagcuacaucgcgcuggacuccggccgcgggggcugggacugcaucaugacgagcuaccaguaccugaucauccagaacaccaccugggaggaccacugccaguucucccggcccagccccaucggguaccucggccugcugucccagcggacccgcgacaucuacaucagccggcgccuccugggcacguucaccuggacccuguccgacagcgaggggaaggacaccccgggcggguacugccucacgcgguggaugcugaucgaggccgagcugaagugcuucggcaacaccgccgucgccaagugcaacgagaagcacgacgaggaguucugcgacaugcuccgccuguucgacuucaacaagcaggccauccagcggcugaaggcggaggcccagaugagcauccagcucaucaacaaggccgugaacgcccugaucaacgaccagcugaucaugaagaaccaccuccgcgacaucauggggauccccuacugcaacuacuccaaguacugcuaccugaaccacaccgugaccggcaagacgagccugcccaagugcugccucgucuccaacggcagcuaccugaacgagacccacuucuccgacgacaucgagcagcaggccgacaacaugaucaccgagaugcugcagaaggaguacauggagcggcaggggaagacgccccugggccucguggaccuguucguguucagcaccuccuucuaccugaucagcaucuuccuccaccuggucaagaucccgacccaccgccacgugguggggaagcccugccccaagccccaccggcugaaccacaugggcaucugcuccugcggguucuacaagcagccgggcguccccgugcgcuggaagcggugaggacuaguaauaaggaaacuguaugaaugucugugggcaggaagugaagagauccuucuguaaagguuuuuggaauuaugucugcugaauaauaaacuuuuuugaaauaauaaaucugguagaaaaaugagaucuaaaaaaaaaaaaaaaaaaaaaaaaaaaaaaaaaaaaaaaaaaaaaaaaaaaaaaaaaaaaaaaaaaaaaaaaaaaaaaaaaaaaaaaaaaaaaaaaaaaa

SEQ ID NO: 39460 - RNA, 1788 nt, Artificial Sequence
  mRNA product Design b-4 (A100) comprising derived and/or modified sequence from LASV(Z0947-SLE-2011;Clade IV)__AIT17840__GPCmut11 (opt1)
aggagagucccgcagucggcguccagcggcucugcuuguucgugugugugucguugcaggccuuauucaagcuuaccaugggccagaucgugaccuucuuccaggaggucccccacgugaucgaggaggugaugaacaucguccugaucgcccucagcauccuggccgugcugaaggggcucuacaacuucgcgaccugcggccugguggggcuggucacguuccuccugcugugcggccgcuccugcaccaucagccucuacaaggggguguacgagcugcagacccuggagcucaacauggagacccugaacaugacgaugccgcuguccugcaccaagaacaacagccaccacuacaucauggugggcaacgagaccggccucgagcugacccugacgaacaccuccaucaucaaccacaaguucugcaaccucagcgacgcccacaagaagaaccuguacgaccacgcccugauguccaucaucagcaccuuccaccucuccauccccaacuucaaccaguacgaggccaugagcugcgacuucaacgggggcaagaucuccguccaguacaaccugagccacuccuacgccggggacgcggccaaccacugcggcaccguggccaacggggugcugcagacguucaugcggauggccuggggcggcagcuacaucgcgcucgacuccgggcgcgaccggugggacugcaucaugaccagcuaccaguaccugaucauccagaacaccaccugggaggaccacugccaguucucccgccccagccccaucggcuaccuggggcuccugucccagcggacgcgcgacaucuacaucagccggcgccugcucggcaccuucaccuggacccugagcgacuccgagggcaaggacacgcccgggggcuacugccugacccgguggaugcucaucgaggccgagcugaagugcuucgggaacaccgccgucgccaagugcaacgagaagcacgacgaggaguucugcgacaugcugcgccucuucgacuucaacaagcaggccauccagcggcugaaggcggaggcccagaugagcauccagcugaucaacaaggccgugaacgcccucaucaacgaccagcugaucaugaagaaccaccuccgcgacaucaugggcauccccuacugcaacuacuccaaguacugcuaccugaaccacaccacgaccgggaagaccagccugcccaagugcugccugguguccaacggcagcuaccucaacgagacccacuucuccgacgacaucgagcagcaggccgacaacaugaucacggagaugcugcagaaggaguacauggagcggcagggcaagaccccgcuggggcuggucgaccucuucguguucagcaccuccuucuaccugaucagcaucuuccugcaccucgugaagaucccgacccaccgccacaucgucggcaagcccugccccaagccccaccggcugaaccacauggggaucugcuccugcggccuguacaagcagccgggggugcccgugaaguggaagcgcugaggacuaguaauaaggaaacuguaugaaugucugugggcaggaagugaagagauccuucuguaaagguuuuuggaauuaugucugcugaauaauaaacuuuuuugaaauaauaaaucugguagaaaaaugagaucuaaaaaaaaaaaaaaaaaaaaaaaaaaaaaaaaaaaaaaaaaaaaaaaaaaaaaaaaaaaaaaaaaaaaaaaaaaaaaaaaaaaaaaaaaaaaaaaaaaaa

SEQ ID NO: 39461 - RNA, 1788 nt, Artificial Sequence
  mRNA product Design b-4 (A100) comprising derived and/or modified sequence from LASV(Josiah;Clade IV)__NP_694870__GPCmut11 (opt4)
aggagagucccgcagucggcguccagcggcucugcuuguucgugugugugucguugcaggccuuauucaagcuuaccaugggccagaucgugaccuucuuccaggaggugccccacgugaucgaggaggugaugaacaucgugcugaucgcccugagcgugcuggccgugcugaagggccuguacaacuucgccaccugcggccuggugggccuggugaccuuccugcugcugugcggcagaagcugcaccaccagccuguacaagggcguguacgagcugcagacccuggagcugaacauggagacccugaacaugaccaugccccugagcugcaccaagaacaacagccaccacuacaucauggugggcaacgagaccggccuggagcugacccugaccaacaccagcaucaucaaccacaaguucugcaaccugagcgacgcccacaagaagaaccuguacgaccacgcccugaugagcaucaucagcaccuuccaccugagcauccccaacuucaaccaguacgaggccaugagcugcgacuucaacggcggcaagaucagcgugcaguacaaccugagccacagcuacgccggcgacgccgccaaccacugcggcaccguggccaacggcgugcugcagaccuucaugagaauggccuggggcggcagcuacaucgcccuggacagcggcagaggcaacugggacugcaucaugaccagcuaccaguaccugaucauccagaacaccaccugggaggaccacugccaguucagcagacccagccccaucggcuaccugggccugcugagccagagaaccagagacaucuacaucagcagaagacugcugggcaccuucaccuggacccugagcgacagcgagggcaaggacacccccggcggcuacugccugaccagauggaugcugaucgaggccgagcugaagugcuucggcaacaccgccguggccaagugcaacgagaagcacgacgaggaguucugcgacaugcugagacuguucgacuucaacaagcaggccauccagagacugaaggccgaggcccagaugagcauccagcugaucaacaaggccgugaacgcccugaucaacgaccagcugaucaugaagaaccaccugagagacaucaugggcauccccuacugcaacuacagcaaguacugcuaccugaaccacaccaccaccggcagaaccagccugcccaagugcugccuggugagcaacggcagcuaccugaacgagacccacuucagcgacgacaucgagcagcaggccgacaacaugaucaccgagaugcugcagaaggaguacauggagagacagggcaagaccccccugggccugguggaccuguucguguucagcaccagcuucuaccugaucagcaucuuccugcaccuggugaagauccccacccacagacacaucgugggcaagagcugccccaagccccacagacugaaccacaugggcaucugcagcugcggccuguacaagcagcccggcgugcccgugaaguggaagagaugaggacuaguaauaaggaaacuguaugaaugucugugggcaggaagugaagagauccuucuguaaagguuuuuggaauuaugucugcugaauaauaaacuuuuuugaaauaauaaaucugguagaaaaaugagaucuaaaaaaaaaaaaaaaaaaaaaaaaaaaaaaaaaaaaaaaaaaaaaaaaaaaaaaaaaaaaaaaaaaaaaaaaaaaaaaaaaaaaaaaaaaaaaaaaaaaa

SEQ ID NO: 39462 - RNA, 1785 nt, Artificial Sequence
  mRNA product Design b-4 (A100) comprising derived and/or modified sequence from LASV(LP;Clade I)__AAF86701__GPCmut11 (opt4)
aggagagucccgcagucggcguccagcggcucugcuuguucgugugugugucguugcaggccuuauucaagcuuaccaugggccagaucaucaccuucuuccaggaggugccccacgugaucgaggaggugaugaacaucgugcugaucgcccugagccugcuggccauccugaagggccuguacaacaucgccaccugcggcaucaucggccugguggccuuccuguuccugugcggcaagagcugcagccugacccugaagggcggcuacgagcugcagacccuggagcugaacauggagacccugaacaugaccaugccccugagcugcaccaagaacagcagccaccacuacaucagagugggcaacgagaccggccuggagcugacccugaccaacaccagcaucaucaaccacaaguucugcaaccugagcgacgcccacaagaagaaccuguacgaccacgcccugaugagcaucaucagcaccuuccaccugagcauccccaacuucaaccaguacgaggccaugagcugcgacuucaacggcggcaagaucagcgugcaguacaaccugagccacagcuacgccggcgacgccgccgagcacugcggcaccguggccaacggcgugcugcagaccuucaugagaauggccuggggcggcagauacaucgcccuggacagcggcaagggcaacugggacugcaucaugaccagcuaccaguaccugaucauccagaacaccaccugggaggaccacugccaguucagcagacccagccccaucggcuaccugggccugcugagccagagaaccagagacaucuacaucagcagaagacugcugggcaccuucaccuggacccugagcgacagcgagggcaacgagacccccggcggcuacugccugaccagauggaugcugaucgaggccgagcugaagugcuucggcaacaccgccguggccaagugcaacgagaagcacgacgaggaguucugcgacaugcugagacuguucgacuucaacaagcaggccaucagaagacugaaggccgaggcccagaugagcauccagcugaucaacaaggccgugaacgcccugaucaacgaccagcugaucaugaagaaccaccugagagacaucaugggcauccccuacugcaacuacagcaaguacugcuaccugaaccacaccagcagcggcagaaccagccugcccaagugcugccugaucagcaacggcagcuaccugaacgagacccaguucagcgacgacaucgagcagcaggccgacaacaugaucaccgagaugcugcagaaggaguacaucgagagacagggcaagaccccccugggccugguggacaucuucaucuucagcaccagcuucuaccugaucagcaucuuccugcaccugaucaagauccccacccacagacacaucgugggcaagcccugccccaagccccacagacugaaccacaugggcgugugcagcugcggccuguacaagcaccccggcgugcccaccaaguggaagagaugaggacuaguaauaaggaaacuguaugaaugucugugggcaggaagugaagagauccuucuguaaagguuuuuggaauuaugucugcugaauaauaaacuuuuuugaaauaauaaaucugguagaaaaaugagaucuaaaaaaaaaaaaaaaaaaaaaaaaaaaaaaaaaaaaaaaaaaaaaaaaaaaaaaaaaaaaaaaaaaaaaaaaaaaaaaaaaaaaaaaaaaaaaaaaaaaa

SEQ ID NO: 39463 - RNA, 1785 nt, Artificial Sequence
  mRNA product Design b-4 (A100) comprising derived and/or modified sequence from LASV(803213;Clade II)__AAF86703__GPCmut11 (opt4)
aggagagucccgcagucggcguccagcggcucugcuuguucgugugugugucguugcaggccuuauucaagcuuaccaugggccagaucaucaccuucuuccaggaggugccccacgugaucgaggaggugaugaacaucgugcugaucgcccugagccugcuggccauccugaagggcaucuacaacguggccaccugcggccuguucggccugaucagcuuccugcugcugugcggcagaagcugcagcgugaccuacaagggcguguacgagcugcagacccuggagcugaacauggccaaccugaacaugaccaugccccugagcugcaccaagaacaacagccaccacuacaucauggugggcaacgagaccggccuggagcugacccugaccaacaccagcaucaucaaccacaaguucugcaaccugagcgacgcccacaagaagaaccuguacgaccacgcccugaugagcaucaucagcaccuuccaccugagcauccccaacuucaaccaguacgaggccaugagcugcgacuucaacggcggcaagaucagcgugcaguacaaccugagccacagcuucgccguggacgccgccaaccacugcggcaccaucgccaacggcgugcugcagaccuucaugagaauggccuggggcggcagcuacaucgcccuggacagcggcaagggcaacugggacugcaucaugaccagcuaccaguaccugaucauccagaacaccaccugggaggaccacugccaguucagcagacccagccccaucggcuaccugggccugcugagccagagaaccagagacaucuacaucagcagaagacugcugggcaccuucaccuggacccugagcgacagcgagggcaacgaggcccccggcggcuacugccugaccagauggaugcugaucgaggccgagcugaagugcuucggcaacaccgccguggccaagugcaacgagaagcacgacgaggaguucugcgacaugcugagacuguucgacuucaacaagcaggccaucaagagacugaagaccgaggcccagaugagcauccagcugaucaacaaggccgugaacgcccugaucaacgaccagcugaucaugaagaaccaccugagagacaucaugggcauccccuacugcaacuacagcagauacugcuaccugaaccacaccgugaccggcaagaccagccugcccagaugcugccuggugagcaacggcagcuaccugaacgagacccacuucagcgacgacaucgagcagcaggccgacaacaugaucaccgagaugcugcagaaggaguacauggacagacagggcaagaccccccugggccugguggaccuguucguguucagcaccagcuucuaccugaucagcaucuuccugcaccuggugaagauccccacccacagacacaucgugggcaagcccugccccaagccccacagacugaaccacaugggcaucugcagcugcggccuguacaagcaccccggcgugcccgugaaguggaagagaugaggacuaguaauaaggaaacuguaugaaugucugugggcaggaagugaagagauccuucuguaaagguuuuuggaauuaugucugcugaauaauaaacuuuuuugaaauaauaaaucugguagaaaaaugagaucuaaaaaaaaaaaaaaaaaaaaaaaaaaaaaaaaaaaaaaaaaaaaaaaaaaaaaaaaaaaaaaaaaaaaaaaaaaaaaaaaaaaaaaaaaaaaaaaaaaaa

SEQ ID NO: 39464 - RNA, 1785 nt, Artificial Sequence
  mRNA product Design b-4 (A100) comprising derived and/or modified sequence from LASV(GA391;Clade III)__CAA36645__GPCmut11 (opt4)
aggagagucccgcagucggcguccagcggcucugcuuguucgugugugugucguugcaggccuuauucaagcuuaccaugggccagaucgugaccuucuuccaggaggugccccacgugaucgaggaggugaugaacaucgugcugaucgcccugagcauccuggccauccugaagggccuguacaacguggccaccugcggccugaucggccuggugaccuuccugcugcugagcggcagaagcugcagccugaucuacaagggcaccuacgagcugcagacccuggagcugaacauggagacccugaacaugaccaugccccugagcugcaccaagaacaacagccaccacuacaucagagugggcaacgagaccggccuggagcugacccugaccaacaccagcauccugaaccacaaguucugcaaccugagcgacgcccacaagagaaaccuguacgaccacagccugaugagcaucaucagcaccuuccaccugagcauccccaacuucaaccaguacgaggccaugagcugcgacuucaacggcggcaagaucaccgugcaguacaaccugagccacagcuucgccguggacgccgccggccacugcggcacccuggccaacggcgugcugcagaccuucaugagaauggccuggggcggcagcuacaucgcccuggacagcggcagaggcaacugggacugcaucaugaccagcuaccaguaccugaucauccagaacaccaccugggacgaccacugccaguucagcagacccagccccaucggcuaccugggccugcugagccagagaaccagagacaucuacaucagcagaagacugcugggcaccuucaccuggacccugagcgacagcgagggcaacgagacccccggcggcuacugccugaccagauggaugcugaucgaggccgagcugaagugcuucggcaacaccgccguggccaagugcaacgagaagcacgacgaggaguucugcgacaugcugagacuguucgacuucaacaagcaggccaucagaagacugaagaccgaggcccagaugagcauccagcugaucaacaaggccgugaacgcccugaucaacgaccagcugaucaugaagaaccaccugagagacaucaugggcauccccuacugcaacuacagcagauacugcuaccugaaccacaccagcaccggcaagaccagccugcccagaugcugccugaucagcaacggcagcuaccugaacgagaccaaguucagcgacgacaucgagcagcaggccgacaacaugaucaccgagaugcugcagaaggaguacaucgacagacagggcaagaccccccugggccugguggaccuguucguguucagcaccagcuucuaccugaucagcaucuuccugcaccuggugaagauccccacccacagacacaucgugggcaagcccugccccaagccccacagacugaaccacaugggcaucugcagcugcggccuguacaagcagcccggcgugcccgugagauggaagagaugaggacuaguaauaaggaaacuguaugaaugucugugggcaggaagugaagagauccuucuguaaagguuuuuggaauuaugucugcugaauaauaaacuuuuuugaaauaauaaaucugguagaaaaaugagaucuaaaaaaaaaaaaaaaaaaaaaaaaaaaaaaaaaaaaaaaaaaaaaaaaaaaaaaaaaaaaaaaaaaaaaaaaaaaaaaaaaaaaaaaaaaaaaaaaaaaa

SEQ ID NO: 39465 - RNA, 1788 nt, Artificial Sequence
  mRNA product Design b-4 (A100) comprising derived and/or modified sequence from LASV(AV;Clade V)__CCA30314__GPCmut11 (opt4)
aggagagucccgcagucggcguccagcggcucugcuuguucgugugugugucguugcaggccuuauucaagcuuaccaugggccagaucgugaccuucuuccaggaggugccccacgugaucgaggaggugaugaacaucgugcugaucgcccugagcauccuggccgugcugaagggccuguacaacaucgccaccugcggccugaucggccugaucaccuuccugcugcugugcggcagaagcugcagcagcaaccuguacaagggcguguacgagcugcagagccuggaccugaacauggagacccugaacaugaccaugccccugagcugcaccaagaacaacagccaccacuacaucagagugggcaacgacaccggccuggagcugacccugaccaacaccagcauccugaaccacaaguucugcaaccugagcgacgcccacaagaaggaccuguacgaccacgcccugaugagcaucaucagcaccuuccaccugagcauccccaacuucaaccaguacgaggccaugagcugcgacuucaacggcggcaagaucagcgugcaguacaaccugagccacagcuacgccaucgacgccgccaaccacugcggcaccguggccaacggcauccugcagaccuucaugagaauggccuggggcggcagcuacaucgcccuggacagcggcagaggcaacugggacugcaucaugaccagcuaccaguaccugaucauccagaacaccaccugggagaaccacugccaguucagcagacccagccccaucggcuaccugggccugcugagccagagaaccagagacaucuacaucagcagaagacugcugggcaccuucaccuggacccugagcgacagcgagggcaacgccacccccggcggcuacugccugaccagauggaugcugaucgaggccgagcugaagugcuucggcaacaccgccguggccaagugcaacgagaagcacgacgaggaguucugcgacaugcugagacuguucgacuucaacaagcaggccaucagcagacugaagagcgaggcccagaugagcauccagcugaucaacaaggccgugaacgcccugaucaacgaccagcugaucaugaagaaccaccugagagacaucaugggcauccccuacugcaacuacagcaaguacugcuaccugaaccacaccaucaccggcaagaccagccugcccaagugcugccuggugagcaacggcagcuaccugaacgagacccacuucagcgacgacaucgagcagcaggccgacaacaugaucaccgagaugcugcagaaggaguacauggagagacagggcaagaccccccugggccugguggaccuguucguguucagcaccagcuucuaccugaucagcaucuuccugagacuggugaagauccccacccacagacacaucgugggcaagcccugccccaagccccacagacugaaccacaugggcaucugcagcugcggccuguacaagcagcccggcgugcccgugagauggaagagaugaggacuaguaauaaggaaacuguaugaaugucugugggcaggaagugaagagauccuucuguaaagguuuuuggaauuaugucugcugaauaauaaacuuuuuugaaauaauaaaucugguagaaaaaugagaucuaaaaaaaaaaaaaaaaaaaaaaaaaaaaaaaaaaaaaaaaaaaaaaaaaaaaaaaaaaaaaaaaaaaaaaaaaaaaaaaaaaaaaaaaaaaaaaaaaaaa

SEQ ID NO: 39466 - RNA, 1785 nt, Artificial Sequence
  mRNA product Design b-4 (A100) comprising derived and/or modified sequence from LASV(Togo/2016/7082;Clade VI)__AMR44577__GPCmut11 (opt4)
aggagagucccgcagucggcguccagcggcucugcuuguucgugugugugucguugcaggccuuauucaagcuuaccaugggccagaucaucaccuucuuccaggaggugccccacgugaucgaggaggugaugaacaucgugcugaucgcccugagccugcuggccauccugaagggcguguacaacguggccaccugcggcaucaucggccuggugaccuuccuguuccugugcggcagaagcugcagccugaucuacaagggcagcuacgagcugcagacccuggagcugaacauggagacccugaacaugaccaugccccugagcugcaccaagaacagcagccaccacuacaucagagugggcaacgagaccggccuggagcugacccugaccaacaccagcaucaucaaccacaaguucugcaaccugagcgacgcccacaagagaaaccuguacgaccacgcccugaugagcauccugagcaccuuccaccugagcauccccaacuucaaccaguacgaggccaugagcugcgacuucaacggcggcaagaucagcgugcaguacaaccugagccacgccuacgccguggacgccgccgagcacugcggcaccguggccaacggcgugcugcagaccuucaugagaauggccuggggcggcagcuacaucgcccuggacagcggcagaggcaacugggacugcaucaugaccagcuaccaguaccugaucauccagaacaccaccugggaggaccacugccaguucagcagacccagccccaucggcuaccugggccugcugagccagagaaccagagacaucuacaucagcagaagacugcugggcaccuucaccuggacccugagcgacagcgagggcaacgagacccccggcggcuacugccugaccagauggaugcugaucgaggccgagcugaagugcuucggcaacaccgccguggccaagugcaacgagaagcacgacgaggaguucugcgacaugcugagacuguucgacuucaacaagcaggccauccagagacugaagagcgaggcccagaugagcauccagcugaucaacaaggccgugaacgcccugaucaacgaccagcugaucaugaagaaccaccugagagacaugaugggcauccccuacugcaacuacagcaaguacugcuaccugaaccacaccagcagcggcagaaccagccugcccaagugcugccuggugagcaacggcagcuaccugaacgagacccacuucagcgacgacaucgagcagcaggccgacaacaugaucaccgagaugcugcagaaggaguacaucgacagacagggcaagaccccccugggccugguggaccuguucguguucagcaccagcuucuaccugaucagcaucuuccugcaccugaucaagauccccacccacagacacaucgugggcaagcccugccccaagccccacagacugaaccacaugggcaucugcagcugcggccuguacaagcagcccggcgugcccaccagauggaagagaugaggacuaguaauaaggaaacuguaugaaugucugugggcaggaagugaagagauccuucuguaaagguuuuuggaauuaugucugcugaauaauaaacuuuuuugaaauaauaaaucugguagaaaaaugagaucuaaaaaaaaaaaaaaaaaaaaaaaaaaaaaaaaaaaaaaaaaaaaaaaaaaaaaaaaaaaaaaaaaaaaaaaaaaaaaaaaaaaaaaaaaaaaaaaaaaaa

SEQ ID NO: 39467 - RNA, 1785 nt, Artificial Sequence
  mRNA product Design b-4 (A100) comprising derived and/or modified sequence from LASV(KAK-428;Clade n.d. (VII))__ANH09740__GPCmut11 (opt4)
aggagagucccgcagucggcguccagcggcucugcuuguucgugugugugucguugcaggccuuauucaagcuuaccaugggccagaucgugaccuucuuccaggaggugccccacgugaucgaggaggugaugaacaucgugcugaucgcccugagccugcuggccauccugaagggccuguacaacuucgccaccugcggcgugaucggccugaucaccuuccugcugcugugcggcagaagcugcagcgccaccuacaagggccaguacgagcugcagacccuggagcugaacauggagagccugaacaugaccaugccccugagcugcaccaagaacaacagccaccacuacaucagagccggcaacaacaccggccuggagcugacccugaccaacaccagcaucaucagccacaaguucugcaaccugagcgacgcccacaagaagaaccuguacgaccacacccugaugagcaucaucaccaccuuccaccugagcauccccaacuucaaccaguacgaggccaugagcugcgacuucaacggcggcaagaucagcauccaguacaaccugagccacagcuacgccggcgacgccgcccagcacugcggcaccguggccaacggcgugcugcagaccuucaugagaauggccuggggcggcagcuaccuggcccuggacagcggcagaagaggcugggacugcaucaucagcagcuaccaguaccugaucauccagaacaccaccugggacgaccacugccaguucagcagacccagccccaucggcuaccugggcuucgugagccagaagaccagagacaucuacaucagcagaagacugcugggcaccuucaccuggacccugagcgacagcgagggccacgacaugcccggcggcuacugccugaccagauggaugcugaucgaggccgaccugaagugcuucggcaacaccgccguggccaagugcaacgagaagcacgacgaggaguucugcgacauguggagacuguucgacuucaacaagcaggccauccagagacugaaggccgaggcccagaugaacauccagcugaucaacaaggccgugaacgcccugaucaacgaccagcugaugaugaagaaccaccugagagacaucaugggcauccccuacugcaacuacagcaaguucugcuaccugaacaacaccaccaccggcagaaccagccugcccagaugcugccugaucagcaacggcagcuaccugaacgagacccacuucagcgacgacaucgagcagcaggccgacaacaugaucaccgagaugcugcagaaggaguacauggacagacagggcaagaccccccugggccugguggaccuguucguguucagcaccagcuucuaccugaucaccaucuuccugcaccuggugaagauccccacccacagacacaucgugggcaagcccugccccaagccccacagacugaaccacaugggcaucugcagcugcggccuguacaagcagcccggcgugcccgugagauggaagagaugaggacuaguaauaaggaaacuguaugaaugucugugggcaggaagugaagagauccuucuguaaagguuuuuggaauuaugucugcugaauaauaaacuuuuuugaaauaauaaaucugguagaaaaaugagaucuaaaaaaaaaaaaaaaaaaaaaaaaaaaaaaaaaaaaaaaaaaaaaaaaaaaaaaaaaaaaaaaaaaaaaaaaaaaaaaaaaaaaaaaaaaaaaaaaaaaa

SEQ ID NO: 39468 - RNA, 1785 nt, Artificial Sequence; identical to SEQ ID NO: 39462
  mRNA product Design b-4 (A100) comprising derived and/or modified sequence from LASV(Pinneo-NIG-1969;Clade I)__AIT17836__GPCmut11 (opt4)

SEQ ID NO: 39469 - RNA, 1785 nt, Artificial Sequence
  mRNA product Design b-4 (A100) comprising derived and/or modified sequence from LASV(ISTH0009-NIG-2011;Clade II)__AIT17404__GPCmut11 (opt4)
aggagagucccgcagucggcguccagcggcucugcuuguucgugugugugucguugcaggccuuauucaagcuuaccaugggccagaucaucaccuucuuccaggaggugccccacgugaucgaggaggugaugaacaucgugcugaucgcccugagccugcuggccauccugaagggcaucuacaacguggccaccugcggccuguucggccuggugagcuuccugcugcugugcggcagaagcugcagcaccaccuacaagggcguguacgagcugcagacccuggagcuggacauggccagccugaacaugaccaugccccugagcugcaccaagaacaacagccaccacuacaucauggugggcaacgagaccggccuggagcugacccugaccaacaccagcaucaucaaccacaaguucugcaaccugagcgacgcccacaagaagaaccuguacgaccacgcccugaugagcaucaucagcaccuuccaccugagcauccccaacuucaaccaguacgaggccaugagcugcgacuucaacggcggcaagaucagcgugcaguacaaccugagccacgccuacgccguggacgccgccaaccacugcggcaccaucgccaacggcgugcugcagaccuucaugagaauggccuggggcggcagcuacaucgcccuggacagcggcaagggcagcugggacugcaucaugaccagcuaccaguaccugaucauccagaacaccaccugggaggaccacugccaguucagcagacccagccccaucggcuaccugggccugcugagccagagaaccagagacaucuacaucagcagaagacugcugggcaccuucaccuggacccugagcgacagcgagggcaacgagacccccggcggcuacugccugaccagauggaugcugaucgaggccgagcugaagugcuucggcaacaccgccguggccaagugcaacgagaagcacgacgaggaguucugcgacaugcugagacuguucgacuucaacaagcaggccaucagaagacugaagaccgaggcccagaugagcauccagcugaucaacaaggccgugaacgcccugaucaacgaccagcugaucaugaagaaccaccugagagacaucaugggcauccccuacugcaacuacagcaaguacugcuaccugaaccacaccgugaccggcaagaccagccugcccagaugcugccuggugagcaacggcagcuaccugaacgagacccacuucagcgacgacaucgagcagcaggccgacaacaugaucaccgagcugcugcagaaggaguacauggacagacagggcaagaccccccugggccugguggaccuguucguguucagcaccagcuucuaccugaucagcaucuuccugcaccugaucaagauccccacccacagacacaucaccggcaagcccugccccaagccccacagacugaaccacaugggcaucugcagcugcggccuguacaagcaccccggcgugcccgugaaguggaagagaugaggacuaguaauaaggaaacuguaugaaugucugugggcaggaagugaagagauccuucuguaaagguuuuuggaauuaugucugcugaauaauaaacuuuuuugaaauaauaaaucugguagaaaaaugagaucuaaaaaaaaaaaaaaaaaaaaaaaaaaaaaaaaaaaaaaaaaaaaaaaaaaaaaaaaaaaaaaaaaaaaaaaaaaaaaaaaaaaaaaaaaaaaaaaaaaaa

SEQ ID NO: 39470 - RNA, 1785 nt, Artificial Sequence
  mRNA product Design b-4 (A100) comprising derived and/or modified sequence from LASV(ISTH2010-NIG-2012;Clade II)__AIT17482__GPCmut11 (opt4)
aggagagucccgcagucggcguccagcggcucugcuuguucgugugugugucguugcaggccuuauucaagcuuaccaugggccagaucaucaccuucuuccaggaggugccccacgugaucgaggaggugaugaacaucgugcugaucgcccugagccugcuggccauccugaagggcaucuacaacguggccaccugcggccuguucggccuggugagcuuccugcugcugugcggcagaagcugcagcaccaccuacaagggcguguacgagcugcagacccuggagcuggacauggccagccugaacaugaccaugccccugagcugcaccaagaacaacagccaccacuacaucauggugggcaacgagaccggccuggagcugacccugaccaacaccagcaucaucaaccacaaguucugcaaccugagcgacgcccacaagaagaaccuguacgaccacgcccugaugagcaucaucagcaccuuccaccugagcauccccaacuucaaccaguacgaggccaugagcugcgacuucaacggcggcaagaucagcgugcaguacaaccugagccacgccuacgccguggacgccgccaaccacugcggcaccaucgccaacggcgugcugcagaccuucaugagaauggccuggggcggcagcuacaucgcccuggacagcggcaagggcagcugggacugcaucaugaccagcuaccaguaccugaucauccagaacaucaccugggaggaccacugccaguucagcagacccagccccaucggcuaccugggccugcugagccagagaaccagagacaucuacaucagcagaagacugcugggcaccuucaccuggacccugagcgacagcgagggcaacgagacccccggcggcuacugccugaccagauggaugcugaucgaggccgagcugaagugcuucggcaacaccgccguggccaagugcaacgagaagcacgacgaggaguucugcgacaugcugagacuguucgacuucaacaagcaggccaucagaagacugaagaccgaggcccagaugagcauccagcugaucaacaaggccgugaacgcccugaucaacgaccagcugaucaugaagaaccaccugagagacaucaugggcauccccuacugcaacuacagcaaguacugcuaccugaaccacaccgugaccggcaagaccagccugcccagaugcugccuggugagcaacggcagcuaccugaacgagacccacuucagcgacgacaucgagcagcaggccgacaacaugaucaccgagcugcugcagaaggaguacaucgacagacagggcaagaccccccugggccugguggaccuguucguguucagcaccagcuucuaccugaucagcaucuuccugcaccuggugaagauccccacccacagacacguggugggcaagcccugccccaagccccacagacugaaccacaugggcaucugcagcugcggccuguacaagcaccccggcgugcccgugaaguggaagagaugaggacuaguaauaaggaaacuguaugaaugucugugggcaggaagugaagagauccuucuguaaagguuuuuggaauuaugucugcugaauaauaaacuuuuuugaaauaauaaaucugguagaaaaaugagaucuaaaaaaaaaaaaaaaaaaaaaaaaaaaaaaaaaaaaaaaaaaaaaaaaaaaaaaaaaaaaaaaaaaaaaaaaaaaaaaaaaaaaaaaaaaaaaaaaaaaa

SEQ ID NO: 39471 - RNA, 1785 nt, Artificial Sequence
  mRNA product Design b-4 (A100) comprising derived and/or modified sequence from LASV(Lassa virus/H.sapiens-wt/NGA/2015/ISTH_0543;Clade II)__AVO03639__GPCmut11 (opt4)
aggagagucccgcagucggcguccagcggcucugcuuguucgugugugugucguugcaggccuuauucaagcuuaccaugggccagaucaucaccuucuuccaggaggugccccacgugaucgaggaggugaugaacaucgugcugaucgcccugagccugcuggccauccugaagggcaucuacaacguggccaccugcggccuguucggccuggugagcuuccugcugcugugcggcagaagcugcagcaccaccuacaagggcguguacgagcugcagacccuggagcuggacauggccaaccugaacaugaccaugccccugagcugcaccaagaacaacagccaccacuacaucauggugggcaacgagaccggccuggagcugacccugaccaacaccagcaucaucaaccacaaguucugcaaccugagcgacgcccacaagaagaaccuguacgaccacgcccugaugagcaucaucagcaccuuccaccugagcauccccaacuucaaccaguacgaggccaugagcugcgacuucaacggcggcaagaucagcgugcaguacaaccugagccacaccuacgccguggacgccgccaaccacugcggcaccaucgccaacggcgugcugcagaccuucaugagaauggccuggggcggcagcuacaucgcccuggacagcggcaagggcagcugggacugcaucaugaccagcuaccaguaccuggugauccagaacaccaccugggaggaccacugccaguucagcagacccagccccaucggcuaccugggccugcugagccagagaaccagagacaucuacaucagcagaagacugcugggcaccuucaccuggacccugagcgacagcgagggcaacgagacccccggcggcuacugccugaccagauggaugcugaucgaggccgagcugaagugcuucggcaacaccgccguggccaagugcaacgagaagcacgacgaggaguucugcgacaugcugagacuguucgacuucaacaagcaggccaucagaagacugaagaccgaggcccagaugagcauccagcugaucaacaaggccgugaacgcccugaucaacgaccagcugaucaugaagaaccaccugagagacaucaugggcauccccuacugcaacuacagcaaguacugcuaccugaaccacaccgugaccggcaagaccagccugcccagaugcugccuggugagcaacggcagcuaccugaacgagacccacuucagcgacgacaucgagcagcaggccgacaacaugaucaccgagcugcugcagaaggaguacaucgacagacagggcaagaccccccugggccugguggaccuguucguguucagcaccagcuucuaccugaucagcaucuuccugcaccuggugaagauccccacccacagacacaucaccggcaagcccugccccaagccccacagacugaaccacaugggcaucugcagcugcggccuguacaagcaccccggcgugcccgugaaguggaagagaugaggacuaguaauaaggaaacuguaugaaugucugugggcaggaagugaagagauccuucuguaaagguuuuuggaauuaugucugcugaauaauaaacuuuuuugaaauaauaaaucugguagaaaaaugagaucuaaaaaaaaaaaaaaaaaaaaaaaaaaaaaaaaaaaaaaaaaaaaaaaaaaaaaaaaaaaaaaaaaaaaaaaaaaaaaaaaaaaaaaaaaaaaaaaaaaaa

SEQ ID NO: 39472 - RNA, 1785 nt, Artificial Sequence
  mRNA product Design b-4 (A100) comprising derived and/or modified sequence from LASV(Lassa virus/H.sapiens-wt/NGA/2016/ISTH_0009;Clade II)__AVO03571__GPCmut11 (opt4)
aggagagucccgcagucggcguccagcggcucugcuuguucgugugugugucguugcaggccuuauucaagcuuaccaugggccagaucaucaccuucuuccaggaggugccccacgugaucgaggaggugaugaacaucgugcugaucgcccugagccugcuggccauccugaagggcaucuacaacguggccaccugcggccugcugggccuggugagcuuccugcugcugugcggcagaagcugcagcaccaccuacaagggcguguacgagcugcagacccuggagcuggacauggccagccugaacaugaccaugccccugagcugcaccaagaacaacagccaccacuacaucauggugggcaacgagaccggccuggagcugacccugaccaacaccagcaucaucaaccacaaguucugcaaccugagcgacgcccacaagaagaaccuguacgaccacgcccugaugagcaucaucagcaccuuccaccugagcauccccaacuucaaccaguacgaggccaugagcugcgacuucaacggcggcagaaucagcgugcaguacaaccugagccacagcuacgccguggacgccgccaaccacugcggcaccaucgccaacggcgugcugcagaccuucaugagaauggccuggggcggcagcuacaucgcccuggacagcggcaagggcagcugggacugcaucaugaccagcuaccaguaccugaucauccagaacaccaccugggaggaccacugccaguucagcagacccagccccaucggcuaccugggccugcugagccagagaaccagagacaucuacaucagcagaagacugcugggcaccuucaccuggacccugagcgacagcgagggcaacgagacccccggcggcuacugccugaccagauggaugcugaucgaggccgagcugaagugcuucggcaacaccgccguggccaagugcaacgagaagcacgacgaggaguucugcgacaugcugagacuguucgacuucaacaagcaggccaucagaagacugaagaccgaggcccagaugagcauccagcugaucaacaaggccgugaacgcccugaucaacgaccagcugaucaugaagaaccaccugagagacaucaugggcauccccuacugcaacuacagcaaguacugcuaccugaaccacaccgugaccggcaagaccagccugcccagaugcugccuggugagcaacggcagcuaccugaacgagacccacuucagcgacgacaucgagcagcaggccgacaacaugaucaccgagcugcugcagaaggaguacaucgacagacagggcaagaccccccugggccugguggaccuguucguguucagcaccagcuucuaccugaucagcaucuuccugcaccuggugaagauccccacccacagacacaucaccggcaagcccugccccaagccccacagacugaaccacaugggcaucugcagcugcggccuguacaaccaccccggcgugcccgugaaguggaagagaugaggacuaguaauaaggaaacuguaugaaugucugugggcaggaagugaagagauccuucuguaaagguuuuuggaauuaugucugcugaauaauaaacuuuuuugaaauaauaaaucugguagaaaaaugagaucuaaaaaaaaaaaaaaaaaaaaaaaaaaaaaaaaaaaaaaaaaaaaaaaaaaaaaaaaaaaaaaaaaaaaaaaaaaaaaaaaaaaaaaaaaaaaaaaaaaaa

SEQ ID NO: 39473 - RNA, 1785 nt, Artificial Sequence
  mRNA product Design b-4 (A100) comprising derived and/or modified sequence from LASV(Lassa virus/H.sapiens-wt/NGA/2016/ISTH_0017;Clade II)__AVO03567__GPCmut11 (opt4)
aggagagucccgcagucggcguccagcggcucugcuuguucgugugugugucguugcaggccuuauucaagcuuaccaugggccagaucaucaccuucuuccaggaggugccccacgugaucgaggaggugaugaacaucgugcugaucgcccugagccugcuggccauccugaagggcaucuacaacguggccaccugcggccuguucggccuggugagcuuccugcugcugugcggcagaagcugcagcaccaccuacaagggcguguacgagcugcagacccuggagcuggacauggccagccugaacaugaccaugccccugagcugcaccaagaacaacagccaccacuacaucauggugggcaacgagaccggccuggagcugacccugaccaacaccagcaucaucaaccacaaguucugcaaccugagcgacgcccacaagaagaaccuguacgaccacgcccugaugagcaucaucagcaccuuccaccugagcauccccaacuucaaccaguacgaggccaugagcugcgacuucaacggcggcaagaucagcgugcaguacaaccugagccacaccuacgccaucgacgccgccaaccacugcggcaccaucgccaacggcgugcugcagaccuucaugagaauggccuggggcggcagcuacaucgcccuggacagcggcaagggcagcugggacugcaucaugaccagcuaccaguaccugaucauccagaacaccaccugggaggaccacugccaguucagcagacccagccccaucggcuaccugggccugcugagccagagaaccagagacaucuacaucagcagaagacugcugggcaccuucaccuggacccugagcgacagcgagggcaacgagacccccggcggcuacugccugaccagauggaugcugaucgaggccgagcugaagugcuucggcaacaccgccguggccaagugcaacgagaagcacgacgaggaguucugcgacaugcugagacuguucgacuucaacaagcaggccaucagaagacugaagaccgaggcccagaugagcauccagcugaucaacaaggccgugaacgcccugaucaacgaccagcugaucaugaagaaccaccugagagacaucaugggcauccccuacugcaacuacagcaaguacugcuaccugaaccacaccgugaccggcaagaccagccugcccagaugcugccuggugagcaacggcagcuaccugaacgagacccacuucagcgacgacaucgagcagcaggccgacaacaugaucaccgagcugcugcagaaggaguacauggacagacagggcaagaccccccugggccugguggaccuguucguguucagcaccagcuucuaccugaucagcaucuuccugcaccuggugagaauccccacccacagacacgugaucggcaagcccugccccaagccccacagacugaaccacaugggcaucugcagcugcggccuguacaagcaccccggcgugcccgugaaguggaagagaugaggacuaguaauaaggaaacuguaugaaugucugugggcaggaagugaagagauccuucuguaaagguuuuuggaauuaugucugcugaauaauaaacuuuuuugaaauaauaaaucugguagaaaaaugagaucuaaaaaaaaaaaaaaaaaaaaaaaaaaaaaaaaaaaaaaaaaaaaaaaaaaaaaaaaaaaaaaaaaaaaaaaaaaaaaaaaaaaaaaaaaaaaaaaaaaaa

SEQ ID NO: 39474 - RNA, 1785 nt, Artificial Sequence
  mRNA product Design b-4 (A100) comprising derived and/or modified sequence from LASV(Lassa virus/H.sapiens-wt/NGA/2018/ISTH_0959;Clade II)__AVV65099__GPCmut11 (opt4)
aggagagucccgcagucggcguccagcggcucugcuuguucgugugugugucguugcaggccuuauucaagcuuaccaugggccagaucaucaccuucuuccaggaggugccccacgugaucgaggaggugaugaacaucgugcugaucgcccugagccugcuggccauccugaagggcaucuacaacguggugaccugcggccuguucggccuggugagcuuccugcugcugugcggcagaagcugcagcaccaccuacaagggcguguacgagcugcagacccuggagcuggacauggccagccugaacaugaccaugccccugagcugcaccaagaacaacagccaccacuacaucauggugggcaacgagaccggccuggagcugacccugaccaacaccagcaucaucaaccacaaguucugcaaccugagcgacgcccacaagaagaaccuguacgaccacgcccugaugagcaucaucagcaccuuccaccugagcauccccaacuucaaccaguacgaggccaugagcugcgacuucaacggcggcaagaucagcgugcaguacaaccugagccacgccuacgccaucgacgccgccaaccacugcggcaccaucgccaacggcgugcugcagaccuucaugagaauggccuggggcggcagcuacaucgcccuggacagcggcaagggcagcugggacugcaucaugaccagcuaccaguaccugaucauccagaacaccaccugggaggaccacugccaguucagcagacccagccccaucggcuaccugggccugcugagccagagaaccagagacaucuacaucagcagaagacugcugggcaccuucaccuggacccugagcgacagcgagggcaacgagacccccggcggcuacugccugaccagauggaugcugaucgaggccgagcugaagugcuucggcaacaccgccguggccaagugcaacgagaagcacgacgaggaguucugcgacaugcugagacuguucgacuucaacaagcaggccaucagaagacugaagaccgaggcccagaugagcauccagcugaucaacaaggccgugaacgcccugaucaacgaccagcugaucaugaagaaccaccugagagacaucaugggcauccccuacugcaacuacagcaaguacugcuaccugaaccacaccgugaccggcaagaccagccugcccagaugcugccuggugagcaacggcagcuaccugaacgagacccacuucagcgacgacaucgagcagcaggccgacaacaugaucaccgagcugcugcagaaggaguacaucgacagacagggcaagaccccccugggccugguggaccuguucguguucagcaccagcuucuaccugaucagcaucuuccugcaccuggugaagauccccacccacagacacgugaucggcaagcccugccccaagccccacagacugaaccacaugggcaucugcagcugcggccuguacaagcaccccggcgugcccgugaaguggaagagaugaggacuaguaauaaggaaacuguaugaaugucugugggcaggaagugaagagauccuucuguaaagguuuuuggaauuaugucugcugaauaauaaacuuuuuugaaauaauaaaucugguagaaaaaugagaucuaaaaaaaaaaaaaaaaaaaaaaaaaaaaaaaaaaaaaaaaaaaaaaaaaaaaaaaaaaaaaaaaaaaaaaaaaaaaaaaaaaaaaaaaaaaaaaaaaaaa

SEQ ID NO: 39475 - RNA, 1785 nt, Artificial Sequence
  mRNA product Design b-4 (A100) comprising derived and/or modified sequence from LASV(LASV003-NIG-2008;Clade II)__AIT17580__GPCmut11 (opt4)
aggagagucccgcagucggcguccagcggcucugcuuguucgugugugugucguugcaggccuuauucaagcuuaccaugggccagaucaucaccuucuuccaggaggugccccacgugaucgaggaggugaugaacaucgugcugaucgcccugagccugcuggccauccugaagggcaucuacaacguggccaccugcggccuguucggccuggugagcuuccugcugcugugcggcagaagcugcagcaccaccuacaagggcguguacgagcugcagacccuggagcuggacauggccagccugaacaugaccaugccccugagcugcaccaagaacaacagccaccacuacaucauggugggcaacgagaccggccuggagcugacccugaccaacaccagcaucaucaaccacaaguucugcaaccugagcgacgcccacaagaagaaccuguacgaccacgcccugaugagcaucaucagcaccuuccaccugagcauccccaacuucaaccaguacgaggccaugagcugcgacuucaacggcggcaagaucagcgugcaguacaaccugagccacaccuacgccguggacgccgccaaccacugcggcaccaucgccaacggcgugcugcagaccuucaugagaauggccuggggcggcagcuacaucgcccuggacagcggcaagggcagcugggacugcaucaugaccagcuaccaguaccugaucauccagaacaccaccugggaggaccacugccaguucagcagacccagccccaucggcuaccugggccugcugagccagagaaccagagacaucuacaucagcagaagacugcugggcaccuucaccuggacccugagcgacagcgagagcaacgagacccccggcggcuacugccugaccagauggaugcugaucgaggccgagcugaagugcuucggcaacaccgccguggccaagugcaacgagaagcacgacgaggaguucugcgacaugcugagacuguucgacuucaacaagcaggccaucagaagacugaaggccgaggcccagaugagcauccagcugaucaacaaggccgugaacgcccugaucaacgaccagcugaucaugaagaaccaccugagagacaucaugggcauccccuacugcaacuacagcaaguacugcuaccugaaccacaccgugaccggcagaaccagccugcccagaugcugccuggugagcaacggcagcuaccugaacgagacccacuucagcgacgacaucgagcagcaggccgacaacaugaucaccgagcugcugcagaaggaguacauggacagacagggcaagaccccccugggccugguggaccuguucguguucagcaccagcuucuaccugaucagcaucuuccugcaccuggugaagauccccacccacagacacgugaucggcaagcccugccccaagccccacagacugaaccacaugggcaucugcagcugcggccuguacaagcaccccggcgugcccgugaaguggaagagaugaggacuaguaauaaggaaacuguaugaaugucugugggcaggaagugaagagauccuucuguaaagguuuuuggaauuaugucugcugaauaauaaacuuuuuugaaauaauaaaucugguagaaaaaugagaucuaaaaaaaaaaaaaaaaaaaaaaaaaaaaaaaaaaaaaaaaaaaaaaaaaaaaaaaaaaaaaaaaaaaaaaaaaaaaaaaaaaaaaaaaaaaaaaaaaaaa

SEQ ID NO: 39476 - RNA, 1785 nt, Artificial Sequence
  mRNA product Design b-4 (A100) comprising derived and/or modified sequence from LASV(LASV035-NIG-2009;Clade II)__AIT17588__GPCmut11 (opt4)
aggagagucccgcagucggcguccagcggcucugcuuguucgugugugugucguugcaggccuuauucaagcuuaccaugggccagaucaucaccuucuuccaggaggugccccacgugaucgaggaggugaugaacaucgugcugaucgcccugagccugcuggccauccugaagggcaucuacaacguggccaccugcggccuguucggccuggugagcuuccugcugcugugcggcagaagcugcagcaccaccuacaagggcguguacgagcugcagacccuggagcuggacauggccagccugaacaugaccaugccccugagcugcaccaagaacaacagccaccacuacaucauggugggcaacgagaccggccuggagcugacccugaccaacaccagcaucaucaaccacaaguucugcaaccugagcgacgcccacaagaagaaccuguacgaccacgcccugaugagcaucaucagcaccuuccaccugagcauccccaacuucaaccaguacgaggccaugagcugcgacuucaacggcggcaagaucagcgugcaguacaaccugagccacgccuacgccguggacgccgccaaccacugcggcaccaucgccaacggcgugcugcagaccuucaugagaauggccuggggcggcagcuacaucgcccuggacagcggcaagggcagcugggacugcaucaugaccagcuaccaguaccugaucauccagaacaccaccugggaggaccacugccaguucagcagacccagccccaucggcuaccugggccugcugagccagagaaccagagacaucuacaucagcagaagacugcugggcaccuucaccuggacccugagcgacagcgagggcaacgagacccccggcggcuacugccugaccagauggaugcugaucgaggccgagcugaagugcuucggcaacaccgccguggccaagugcaacgagaagcacgacgaggaguucugcgacaugcugagacuguucgacuucaacaagcaggccaucagaagacugaaggccgaggcccagaugagcauccagcugaucaacaaggccgugaacgcccugaucaacgaccagcugaucaugaagaaccaccugagagacaucaugggcauccccuacugcaacuacagcaaguacugcuaccugaaccacaccgugaccggcaagaccagccugcccagaugcugccuggugagcaacggcagcuaccugaacgagacccacuucagcgacgacaucgagcagcaggccgacaacaugaucaccgagcugcugcagaaggaguacaucgacagacagggcaagaccccccugggccugguggaccuguucguguucagcaccagcuucuaccugaucagcaucuuccugcaccuggugaagauccccacccacagacacgugaucggcaagcccugccccaagccccacagacugaaccacaugggcaucugcagcugcggccuguacaagcaccccggcgugcccgugaaguggaagagaugaggacuaguaauaaggaaacuguaugaaugucugugggcaggaagugaagagauccuucuguaaagguuuuuggaauuaugucugcugaauaauaaacuuuuuugaaauaauaaaucugguagaaaaaugagaucuaaaaaaaaaaaaaaaaaaaaaaaaaaaaaaaaaaaaaaaaaaaaaaaaaaaaaaaaaaaaaaaaaaaaaaaaaaaaaaaaaaaaaaaaaaaaaaaaaaaa

SEQ ID NO: 39477 - RNA, 1785 nt, Artificial Sequence
  mRNA product Design b-4 (A100) comprising derived and/or modified sequence from LASV(LASV1000-NIG-2009;Clade II)__AIT17782__GPCmut11 (opt4)
aggagagucccgcagucggcguccagcggcucugcuuguucgugugugugucguugcaggccuuauucaagcuuaccaugggccagaucaucaccuucuuccaggaggugccccacgugaucgaggaggugaugaacaucgugcugaucgcccugagccugcuggccauccugaagggcaucuacaacguggccaccugcggccuguucggccuggugagcuuccugcugcugugcggcagaagcugcagcaccaccuacaagggcguguacgagcugcagacccuggagcuggacauggccagccugaacaugaccaugccccugagcugcaccaagaacaacagccaccacuacaucauggugggcaacgagaccggccuggagcugacccugaccaacaccagcaucaucaaccacaaguucugcaaccugagcgacgcccacaagaagaaccuguacgaccacgcccugaugagcaucaucagcaccuuccaccugagcauccccaacuucaaccaguacgaggccaugagcugcgacuucaacggcggcaagaucagcgugcaguacaaccugagccacaccuacgccguggacgccgccaaccacugcggcaccaucgccaacggcgugcugcagaccuucaugagaauggccuggggcggcagcuacaucgcccuggacagcggcaagggcagcugggacugcaucaugaccagcuaccaguaccugaucauccagaacaccaccugggaggaccacugccaguucagcagacccagccccaucggcuaccugggccugcugagccagagaaccagagacaucuacaucagcagaagacugcugggcaccuucaccuggacccugagcgacagcgagggcaacgagacccccggcggcuacugccugaccagauggaugcugaucgaggccgagcugaagugcuucggcaacaccgccguggccaagugcaacgagaagcacgacgaggaguucugcgacaugcugagacuguucgacuucaacaagcaggccaucaagagacugaagaccgaggcccagaugagcauccagcugaucaacaaggccgugaacgcccugaucaacgaccagcugaucaugaagaaccaccugagagacaucaugggcauccccuacugcaacuacagcaaguacugcuaccugaaccacaccgugaccggcaagaccagccugcccagaugcugccuggugagcaacggcagcuaccugaacgagacccacuucagcgacgacaucgagcagcaggccgacaacaugaucaccgagcugcugcagaaggaguacaucgacagacagggcaagaccccccugggccugguggaccuguucguguucagcaccagcuucuaccugaucagcaucuuccugcaccuggugaagauccccacccacagacacguggugggcaagcccugccccaagccccacagacugaaccacaugggcaucugcagcugcggccuguacaagcaccccggcgugcccgugaaguggaagagaugaggacuaguaauaaggaaacuguaugaaugucugugggcaggaagugaagagauccuucuguaaagguuuuuggaauuaugucugcugaauaauaaacuuuuuugaaauaauaaaucugguagaaaaaugagaucuaaaaaaaaaaaaaaaaaaaaaaaaaaaaaaaaaaaaaaaaaaaaaaaaaaaaaaaaaaaaaaaaaaaaaaaaaaaaaaaaaaaaaaaaaaaaaaaaaaaa

SEQ ID NO: 39478 - RNA, 1785 nt, Artificial Sequence
  mRNA product Design b-4 (A100) comprising derived and/or modified sequence from LASV(LASV221-NIG-2010;Clade II)__AIT17624__GPCmut11 (opt4)
aggagagucccgcagucggcguccagcggcucugcuuguucgugugugugucguugcaggccuuauucaagcuuaccaugggccagaucaucaccuucuuccaggaggugccccacgugaucgaggaggugaugaacaucgugcugaucgcccugagccugcuggccauccugaagggcaucuacaacguggccaccugcggccuguucggccuggugagcuuccugcugcugugcggcagaagcugcagcaccaccuacaagggcguguacgagcugcagacccuggagcuggacauggccagccugaacaugaccaugccccugagcugcaccaagaacaacagccaccacuacaucauggugggcaacgagaccggccuggagcugacccugaccaacaccagcaucaucaaccacaaguucugcaaccugagcgacgcccacaagaagaaccuguacgaccacgcccugaugagcaucaucagcaccuuccaccugagcauccccaacuucaaccaguacgaggccaugagcugcgacuucaacggcggcaagaucagcgugcaguacaaccugagccacaccuacgccaucgacgccgccaaccacugcggcaccaucgccaacggcgugcugcagaccuucaugagaauggccuggggcggcagcuacaucgcccuggacagcggcaagggcagcugggacugcaucaugaccagcuaccaguaccugaucauccagaacaccaccugggaggaccacugccaguucagcagacccagccccaucggcuaccugggccugcugagccagagaaccagagacaucuacaucagcagaagacugcugggcaccuucaccuggacccugagcgacagcgagggcaacgagacccccggcggcuacugccugaccagauggaugcugaucgaggccgagcugaagugcuucggcaacaccgccguggccaagugcaacgagaagcacgacgaggaguucugcgacaugcugagacuguucgacuucaacaagcaggccaucagaagacugaagaccgaggcccagaugagcauccagcugaucaacaaggccgugaacgcccugaucaacgaccagcugaucaugaagaaccaccugagagacaucaugggcauccccuacugcaacuacagcaaguacugcuaccugaaccacaccgugaccggcaagaccagccugcccagaugcugccuggugagcaacggcagcuaccugaacgagacccacuucagcgacgacaucgagcagcaggccgacaacaugaucaccgagaugcugcagaaggaguacauggacagacagggcaagaccccccugggccugguggaccuguucguguucagcaccagcuucuaccugaucagcaucuuccugcaccuggugaagauccccacccacagacacgugaucggcaagcccugccccaagccccacagacugaaccacaugggcaucugcagcugcggccuguacaagcaccccggcgugcccgugaaguggaagagaugaggacuaguaauaaggaaacuguaugaaugucugugggcaggaagugaagagauccuucuguaaagguuuuuggaauuaugucugcugaauaauaaacuuuuuugaaauaauaaaucugguagaaaaaugagaucuaaaaaaaaaaaaaaaaaaaaaaaaaaaaaaaaaaaaaaaaaaaaaaaaaaaaaaaaaaaaaaaaaaaaaaaaaaaaaaaaaaaaaaaaaaaaaaaaaaaa

SEQ ID NO: 39479 - RNA, 1785 nt, Artificial Sequence
  mRNA product Design b-4 (A100) comprising derived and/or modified sequence from LASV(LASV237-NIG-2010;Clade II)__AIT17638__GPCmut11 (opt4)
aggagagucccgcagucggcguccagcggcucugcuuguucgugugugugucguugcaggccuuauucaagcuuaccaugggccagaucaucaccuucuuccaggaggugccccacgugaucgaggaggugaugaacaucgugcugaucgcccugagccugcuggccauccugaagggcaucuacaacguggccaccugcggccuguucggccuggugagcuuccugcugcugugcggcagaagcugcagcaccaccuacaagggcguguacgagcugcagacccuggagcuggacauggccagccugaacaugaccaugccccugagcugcaccaagaacaacagccaccacuacaucauggugggcaacgagaccggccuggagcugacccugaccaacaccagcaucaucaaccacaaguucugcaaccugagcgacgcccacaagaaggaccuguacgaccacgcccugaugagcaucaucagcaccuuccaccugagcauccccaacuucaaccaguacgaggccaugagcugcgacuucaacggcggcaagaucagcgugcaguacaaccugagccacaccuacgccguggacgccgccaaccacugcggcaccaucgccaacggcgugcugcagaccuucaugagaauggccuggggcggcagcuacaucgcccuggacagcggcaagggcagcugggacugcaucaugaccagcuaccaguaccugaucauccagaacaccaccugggaggaccacugccaguucagcagacccagccccaucggcuaccugggccugcugagccagagaaccagagacaucuacaucagcagaagacugcugggcaccuucaccuggacccugagcgacagcgagggcaacgagacccccggcggcuacugccugaccagauggaugcugaucgaggccgagcugaagugcuucggcaacaccgccguggccaagugcaacgagaagcacgacgaggaguucugcgacaugcugagacuguucgacuucaacaagcaggccaucagaagacugaagaccgaggcccagaugagcauccagcugaucaacaaggccgugaacgcccugaucaacgaccagcugaucaugaagaaccaccugagagacaucaugggcauccccuacugcaacuacagcaaguacugcuaccugaaccacaccgugaccggcaagaccagccugcccagaugcugccuggugagcaacggcagcuaccugaacgagacccacuucagcgacgacaucgagcagcaggccgacaacaugaucaccgagcugcugcagaaggaguacauggacagacagggcaagaccccccugggccugguggaccuguucguguucagcaccagcuucuaccugaucagcaucuuccugcaccugaucaagauccccacccacagacacaucaccggcaagcccugccccaagccccacagacugaaccacaugggcaucugcagcugcggccuguacaagcaccccggcgugcccgugaaguggaagagaugaggacuaguaauaaggaaacuguaugaaugucugugggcaggaagugaagagauccuucuguaaagguuuuuggaauuaugucugcugaauaauaaacuuuuuugaaauaauaaaucugguagaaaaaugagaucuaaaaaaaaaaaaaaaaaaaaaaaaaaaaaaaaaaaaaaaaaaaaaaaaaaaaaaaaaaaaaaaaaaaaaaaaaaaaaaaaaaaaaaaaaaaaaaaaaaaa

SEQ ID NO: 39480 - RNA, 1785 nt, Artificial Sequence
  mRNA product Design b-4 (A100) comprising derived and/or modified sequence from LASV(LASV253-NIG-2011;Clade II)__AIT17670__GPCmut11 (opt4)
aggagagucccgcagucggcguccagcggcucugcuuguucgugugugugucguugcaggccuuauucaagcuuaccaugggccagaucaucaccuucuuccaggaggugccccacgugaucgaggaggugaugaacaucgugcugaucgcccugagccugcuggccauccugaagggcaucuacaacguggccaccugcggccuguucggccuggugagcuuccugcugcugugcggcagaagcugcagcaccaccuacaagggcguguacgagcugcagacccuggagcuggacauggccagccugaacaugaccaugccccugagcugcaccaagaacaacagccaccacuacaucauggugggcaacgagaccggccuggagcugacccugaccaacaccagcaucaucaaccacaaguucugcaaccugagcgacgcccacaagaagaaccuguacgaccacgcccugaugagcaucaucagcaccuuccaccugagcauccccaacuucaaccaguacgaggccaugagcugcgacuucaacggcggcaagaucagcgugcaguacaaccugagccacaccuacgccguggacgccgccaaccacugcggcaccaucgccaacggcgugcugcagaccuucaugagaauggccuggggcggcagcuacaucgcccuggacagcggcaagggcagcugggacugcaucaugaccagcuaccaguaccugaucauccagaacaccaccugggaggaccacugccaguucagcagacccagccccaucggcuaccugggccugcugagccagagaaccagagacaucuacaucagcagaagacugcugggcaccuucaccuggacccugagcgacagcgagggcaacgagacccccggcggcuacugccugaccagauggaugcugaucgaggccgagcugaagugcuucggcaacaccgccguggccaagugcaacgagaagcacgacgaggaguucugcgacaugcugagacuguucgacuucaacaagcaggccaucagaagacugaaggccgaggcccagaugagcauccagcugaucaacaaggccgugaacgcccugaucaacgaccagcugaucaugaagaaccaccugagagacaucaugggcauccccuacugcaacuacagcaaguacugcuaccugaaccacaccgugaccggcagaaccagccugcccagaugcugccuggugagcaacggcagcuaccugaacgagacccacuucagcgacgacaucgagcagcaggccgacaacaugaucaccgagcugcugcagaaggaguacaucgacagacagggcaagaccccccugggccugguggaccuguucguguucagcaccagcuucuaccugaucagcaucuuccugcaccuggugaagauccccacccacagacacaucaucggcaagcccugccccaagccccacagacugaaccacaugggcaucugcagcugcggccuguacaagcaccccggcgugcccgugaaguggaagagaugaggacuaguaauaaggaaacuguaugaaugucugugggcaggaagugaagagauccuucuguaaagguuuuuggaauuaugucugcugaauaauaaacuuuuuugaaauaauaaaucugguagaaaaaugagaucuaaaaaaaaaaaaaaaaaaaaaaaaaaaaaaaaaaaaaaaaaaaaaaaaaaaaaaaaaaaaaaaaaaaaaaaaaaaaaaaaaaaaaaaaaaaaaaaaaaaa

SEQ ID NO: 39481 - RNA, 1785 nt, Artificial Sequence
  mRNA product Design b-4 (A100) comprising derived and/or modified sequence from LASV(LASV254-NIG-2011;Clade II)__AIT17674__GPCmut11 (opt4)
aggagagucccgcagucggcguccagcggcucugcuuguucgugugugugucguugcaggccuuauucaagcuuaccaugggccagaucaucaccuucuuccaggaggugccccacgugaucgaggaggugaugaacaucgugcugaucgcccugagccugcuggccauccugaagggcaucuacaacguggccaccugcggccuguucggccuggugagcuuccugcugcugugcggcagaagcugcagcaccaccuacaagggcguguacgagcugcagacccuggagcuggacaugaccaaccugaacaugaccaugccccugagcugcaccaagaacaacagccaccacuacaucauggugggcaacgagaccggccuggagcugacccugaccaacaccagcaucaucaaccacaaguucugcaaccugagcgacgcccacaagaagaaccuguacaaccacgcccugaugagcaucaucagcaccuuccaccugagcauccccaacuucaaccaguacgaggccaugagcugcgacuucaacggcggcaagaucagcgugcaguacaaccugagccacagcuacgccguggacgccgccaaccacugcggcaccaucgccaacggcgugcugcagaccuucaugagaauggccuggggcggcagcuacaucgcccuggacagcggcaagggcaacugggacugcaucaugaccagcuaccaguaccugaucauccagaacaccaccugggaggaccacugccaguucagcagacccagccccaucggcuaccugggccugcugagccagagaaccagagacaucuacaucagcagaagacugcugggcaccuucaccuggacccugagcgacagcgagggcaacgagacccccggcggcuacugccugaccagauggaugcugaucgaggccgagcugaagugcuucggcaacaccgccguggccaagugcaacgagaagcacgacgaggaguucugcgacaugcugagacuguucgacuucaacaagcaggccaucagaagacugaagaccgaggcccaggccaacauccagcugaucaacaaggccgugaacgcccugaucaacgaccagcugaucaugaagaaccaccugagagacaucaugggcauccccuacugcaacuacagcaaguacugcuaccugaaccacaccgugaccggcaagaccagccugcccagaugcugccuggugagcaacggcagcuaccugaacgagacccacuucagcgacgacaucgagcagcaggccgacaacaugaucaccgagcugcugcagaaggaguacauggacagacagggcaagaccccccugggccugguggaccuguucguguucagcaccagcuucuaccugaucagcaucuuccugcaccuggugaagauccccacccacagacacgugaucggcaagcccugccccaagccccacagacugaaccacaugggcaucugcagcugcggccuguacaagcaccccggcgugcccgugaaguggaagagaugaggacuaguaauaaggaaacuguaugaaugucugugggcaggaagugaagagauccuucuguaaagguuuuuggaauuaugucugcugaauaauaaacuuuuuugaaauaauaaaucugguagaaaaaugagaucuaaaaaaaaaaaaaaaaaaaaaaaaaaaaaaaaaaaaaaaaaaaaaaaaaaaaaaaaaaaaaaaaaaaaaaaaaaaaaaaaaaaaaaaaaaaaaaaaaaaa

SEQ ID NO: 39482 - RNA, 1785 nt, Artificial Sequence
  mRNA product Design b-4 (A100) comprising derived and/or modified sequence from LASV(Nig08-A19;Clade III)__ADU56618__GPCmut11 (opt4)
aggagagucccgcagucggcguccagcggcucugcuuguucgugugugugucguugcaggccuuauucaagcuuaccaugggccagaucgugaccuucuuccaggaggugccccacgugaucgaggaggugaugaacaucgugcugaucgcccugagcauccuggccauccugaagggccuguacaacaucgccaccugcggccugaucggccuggugaccuuccugcugcugagcggcagaagcugcagcaugaccuacaagggcguguacgagcugcagacccuggagcugaacaugaacacccugaacaugaccaugccccugagcugcaccaagaacaacagccaccacuacaucauggugggcaacgagaccggccuggagcugacccugaccaacaccagccugcugcaccacaaguucugcaaccugagcgacgcccacaagaagaaccuguacgaccacacccugaugagcaucaucagcaccuuccaccugagcauccccaacuucaaccaguacgaggccaugagcugcgacuucaacggcggcaagaucaccgugcaguacaaccugagccacagcuacgccaucgacgccgccaaccacugcggcaccguggccaacggcgugcugcagaccuucaugagaauggccuggggcggcagcuacaucgcccuggacagcggcagaggcaagugggacugcaucaugaccagcuaccaguaccugaucauccagaacaccaccugggaggaccacugccaguucagcagacccagccccaucggcuaccugggccugcugagccagagaaccagagacaucuacaucagcagaagacugcugggcaccuucaccuggacccugagcgacagcgagggcaacgagacccccggcggcuacugccugaccagauggaugcugaucgaggccgagcugaagugcuucggcaacaccgccguggccaagugcaacgagaagcacgacgaggaguucugcgacaugcugagacuguucgacuucaacaagcaggccaucagaagacugaaggccgaggcccagaugagcauccagcugaucaacaaggccgugaacgcccugaucaacgaccagcugaucaugaagaaccaccugagagacaucaugggcauccccuacugcaacuacagcaaguacugcuaccugaaccacaccagcaccggcagaaccagccugcccagaugcugccuggugagcaacggcagcuaccugaacgagacccacuucagcgacgacaucgagcagcaggccgacaacaugaucaccgagaugcugcagaaggaguaccuggacagacagggcaagaccccccugggccugguggaccuguucguguucagcaccagcuucuaccugaucagcaucuuccugcaccuggugaagauccccacccacagacacaucgugggcaagcccugccccaagccccacagacugaaccacaugggcaucugcagcugcggccuguacaagcagcccggcgugcccgugagauggaagagaugaggacuaguaauaaggaaacuguaugaaugucugugggcaggaagugaagagauccuucuguaaagguuuuuggaauuaugucugcugaauaauaaacuuuuuugaaauaauaaaucugguagaaaaaugagaucuaaaaaaaaaaaaaaaaaaaaaaaaaaaaaaaaaaaaaaaaaaaaaaaaaaaaaaaaaaaaaaaaaaaaaaaaaaaaaaaaaaaaaaaaaaaaaaaaaaaa

SEQ ID NO: 39483 - RNA, 1788 nt, Artificial Sequence
  mRNA product Design b-4 (A100) comprising derived and/or modified sequence from LASV(G1180-SLE-2010;Clade IV)__AIT17168__GPCmut11 (opt4)
aggagagucccgcagucggcguccagcggcucugcuuguucgugugugugucguugcaggccuuauucaagcuuaccaugggccagaucgugaccuucuuccaggaggugccccacgugaucgaggaggugaugaacaucgugcugaucgcccugagcauccuggccgugcugaagggccuguacaacuucgccaccugcggccuggugggccugcugaccuuccugcugcugugcggcagaagcugcaccgccagcagauacaagggcguguacgagcugcagacccuggagcugaacauggagacccugaacaugaccaugccccugagcugcaccaagaacaacagccaccacuacaucauggugggcaacgagaccggccuggagcugacccugaccaacaccagcaucaucaaccacaaguucugcaaccugagcgacgcccacaagaagaaccuguacgaccacgcccugaugagcaucaucagcaccuuccaccugagcauccccaacuucaaccaguacgaggccaugagcugcgacuucaacggcggcaagaucagcgugcaguacaaccugagccacagcuacgccggcgacgccgccaaccacugcggcaccguggccaacggcgugcugcagaccuucaugagaauggccuggggcggcagcuacaucgcccuggacagcggccacggcagcugggacugcaucaugaccagcuaccaguaccugaucauccagaacaccaccugggaggaccacugccaguucagcagacccagccccaucggcuaccugggccugcugagccagagaaccagagacaucuacaucagcagaagacugcugggcaccuucaccuggacccugagcgacagcgagggcaaggacacccccggcggcuacugccugaccagauggaugcugaucgaggccgagcugaagugcuucggcaacaccgccguggccaagugcaacgagaagcacgacgaggaguucugcgacaugcugagacuguucgacuucaacaagcaggccauccagagacugaaggccgaggcccagaugagcauccagcugaucaacaaggccgugaacgcccugaucaacgaccagcugaucaugaagaaccaccugagagacaucaugggcauccccuacugcaacuacagcaaguacugcuaccugaaccacaccaccaccggcaagaccagccugcccaagugcugccuggugagcaacggcagcuaccugaacgagacccacuucagcgacgacaucgagcagcaggccgacaacaugaucaccgagaugcugcagaaggaguacauggagagacagggcaagaccccccugggccugguggaccuguucguguucagcaccagcuucuaccugaucagcaucuuccugcaccuggugaagauccccacccacagacacaucgugggcaagagcugccccaagccccacagacugaaccacaugggcaucugcagcugcggccuguacaagcagcccggcgugcccgugaaguggaagagaugaggacuaguaauaaggaaacuguaugaaugucugugggcaggaagugaagagauccuucuguaaagguuuuuggaauuaugucugcugaauaauaaacuuuuuugaaauaauaaaucugguagaaaaaugagaucuaaaaaaaaaaaaaaaaaaaaaaaaaaaaaaaaaaaaaaaaaaaaaaaaaaaaaaaaaaaaaaaaaaaaaaaaaaaaaaaaaaaaaaaaaaaaaaaaaaaa

SEQ ID NO: 39484 - RNA, 1788 nt, Artificial Sequence
  mRNA product Design b-4 (A100) comprising derived and/or modified sequence from LASV(G1442-SLE-2011;Clade IV)__AIT17180__GPCmut11 (opt4)
aggagagucccgcagucggcguccagcggcucugcuuguucgugugugugucguugcaggccuuauucaagcuuaccaugggccagaucgugaccuucuuccaggaggugccccacgugaucgaggaggugaugaacaucgugcugaucgcccugagcauccuggccgugcugaagggccuguacaacguggccaccugcggccugaucggccuggugaccuuccugcugcugugcggcagaagcugcaccaccacccuguacaagggcguguacgagcugcagacccuggagcugaacauggagacccugaacaugaccaugccccugagcugcaccaagaacaacagccaccacuacaucagagugggcaacgagaccggccuggagcugacccugaccaacaccagcaucaucaaccacaaguucugcaaccugagcgacgcccacaagaagaaccuguacgaccacgcccugaugagcaucaucagcaccuuccaccugagcauccccaacuucaaccaguacgaggccaugagcugcgacuucaacggcggcaagaucagcgugcaguacaaccugagccacagcuacgccggcgacgccgccaaccacugcggcaccguggccaacggcgugcugcagaccuucaugagaauggccuggggcggcagcuacaucgcccuggacagcggcagaggcaacugggacugcaucaugaccagcuaccaguaccugaucauccagaacaccaccugggacgaccacugccaguucagcagacccagccccaucggcuaccugggccugcugagccagagaaccagagacguguacaucagcagaagacugcugggcaccuucaccuggacccugagcgacagcgagggcaaggacacccccggcggcuacugccugaccagauggaugcugaucgaggccgagcugaagugcuucggcaacaccgccguggccaagugcaacgagaagcacgacgaggaguucugcgacaugcugagacuguucgacuucaacaagcaggccauccagagacugaaggccgaggcccagaugagcauccagcugaucaacaaggccgugaacgcccugaucaacgaccagcugaucaugaagaaccaccugagagacaucaugggcauccccuacugcaacuacagcaaguacugcuaccugaacaacaccgccaccggcaagaccagccugcccaagugcugccugaucagcaacggcagcuaccugaacgagacccacuucagcgacgacaucgagcaggaggccgacaacaugaucaccgagaugcugcagaaggaguacauggagagacagggcaagaccccccugggccugguggaccuguucguguucagcaccagcuucuaccugaucagcaucuuccugcaccuggugaagauccccacccacagacacaucgugggcaagagcugccccaagccccacagacugaaccacaugggcaucugcagcugcggccuguacaagcagcccggcgugcccgugagauggaagagaugaggacuaguaauaaggaaacuguaugaaugucugugggcaggaagugaagagauccuucuguaaagguuuuuggaauuaugucugcugaauaauaaacuuuuuugaaauaauaaaucugguagaaaaaugagaucuaaaaaaaaaaaaaaaaaaaaaaaaaaaaaaaaaaaaaaaaaaaaaaaaaaaaaaaaaaaaaaaaaaaaaaaaaaaaaaaaaaaaaaaaaaaaaaaaaaaa

SEQ ID NO: 39485 - RNA, 1788 nt, Artificial Sequence
  mRNA product Design b-4 (A100) comprising derived and/or modified sequence from LASV(G3010-SLE-2013;Clade IV)__AIT17344__GPCmut11 (opt4)
aggagagucccgcagucggcguccagcggcucugcuuguucgugugugugucguugcaggccuuauucaagcuuaccaugggccagaucgugaccuucuuccaggaggugccccacgugaucgaggaggugaugaacaucgugcugaucgcccugagcauccuggccgugcugaagggccuguacaacuucgccaccugcggccuggugggccuggugaccuuccugcugcugugcggcagaagcugcaccaccagccuguacaagggcguguacgagcugcagacccuggagcugaacauggagacccugaacaugaccaugccccugagcugcaccaagaacaacagccaccacuacaucauggugggcaacgagaccggccuggagcugacccugaccaacaccagcaucaucaaccacaaguucugcaaccugagcgacgcccacaagaagaaccuguacaaccacgcccugaugagcaucaucagcaccuuccaccugagcauccccaacuucaaccaguacgaggccaugagcugcgacuucaacggcggcaagaucagcgugcaguacaaccugagccacagcuacgccggcgacgccgccagccacugcggcaccguggccaacggcgugcugcagaccuucaugagaauggccuggggcggcagcuacaucgcccuggacagcggcuacggcaagugggacugcaucaugaccagcuaccaguaccugaucauccagaacaccaccugggaggaccacugccaguucagcagacccagccccaucggcuaccugggccugcugagccagagaaccagagacaucuacaucagcagaagacugcugggcaccuucaccuggacccugagcgacagcgagggcaaggacacccccggcggcuacugccugaccagauggaugcugaucgaggccgagcugaagugcuucggcaacaccgccguggccaagugcaacgagaagcacgacgaggaguucugcgacaugcugagacuguucgacuucaacaagcaggccauccagagacugaagaccgaggcccagaugagcauccagcugaucaacaaggccgugaacgcccugaucaacgaccagcugaucaugaagaaccaccugagagacaucaugggcauccccuacugcaacuacagcaaguacugcuaccugaaccacaccaccaccggcaagaccagccugcccaagugcugccuggugagcaacggcagcuaccugaacgagacccacuucagcgacgacaucgagcagcaggccgacaacaugaucaccgagaugcugcagaaggaguacauggagagacagggcaagaccccccugggccugguggaccuguucguguucagcaccagcuucuaccugaucagcaucuuccugcaccuggugaagauccccacccacagacacaucgugggcaagagcugccccaagccccacagacugaaccacaugggcaucugcagcugcggccuguacaagcagcccggcgugcccgugagauggaagagaugaggacuaguaauaaggaaacuguaugaaugucugugggcaggaagugaagagauccuucuguaaagguuuuuggaauuaugucugcugaauaauaaacuuuuuugaaauaauaaaucugguagaaaaaugagaucuaaaaaaaaaaaaaaaaaaaaaaaaaaaaaaaaaaaaaaaaaaaaaaaaaaaaaaaaaaaaaaaaaaaaaaaaaaaaaaaaaaaaaaaaaaaaaaaaaaaa

SEQ ID NO: 39486 - RNA, 1788 nt, Artificial Sequence
  mRNA product Design b-4 (A100) comprising derived and/or modified sequence from LASV(G502-SLE-2009;Clade IV)__AIT17126__GPCmut11 (opt4)
aggagagucccgcagucggcguccagcggcucugcuuguucgugugugugucguugcaggccuuauucaagcuuaccaugggccagaucgugaccuucuuccaggaggugccccacgugaucgaggaggugaugaacaucgugcugaucgcccugagcauccuggccgugcugaagggccuguacaacuucgccaccugcggccuggugggccugcugaccuuccugcugcugugcggcagaagcugcaccaccggccuguacaagggcguguacgagcugcagacccuggagcugaacauggagacccugaacaugaccaugccccugagcugcaccaagaacaacagccaccacuacaucauggugggcaacgagaccggccuggagcugacccugaccaacaccagcaucaucaaccacaaguucugcaaccugagcgacgcccacaagaagaaccuguacgaccacgcccugaugagcaucaucagcaccuuccaccugagcauccccaacuucaaccaguacgaggccaugagcugcgacuucaacggcggcaagaucagcgugcaguacaaccugagccacagcuacgccggcgacgccgccgaccacugcggcaccguggccaacggcgugcugcagaccuucaugagaauggccuggggcggcagcuacaucgcccuggacagcggcagaggcagaugggacugcaucaugaccagcuaccaguaccugaucauccagaacaccaccugggaggaccacugccaguucagcagacccagccccaucggcuaccugggccugcugagccagagaaccagagacaucuacaucagcagaagacugcugggcaccuucaccuggacccugagcgacagcgagggcaaggacacccccggcggcuacugccugaccagauggaugcugaucgaggccgagcugaagugcuucggcaacaccgccguggccaagugcaacgagaagcacgacgaggaguucugcgacaugcugagacuguucgacuucaacaagcaggccauccagagacugaaggccgaggcccagaugagcauccagcugaucaacaaggccgugaacgcccugaucaacgaccagcuggugaugaagaaccaccugagagacaucaugggcauccccuacugcaacuacagcagauacugcuaccugaaccacaccaccaccggcagaaccagccugcccaagugcugccuggugagcaacggcagcuaccugaacgagacccacuucagcgacgacaucgagcagcaggccgacaacaugaucaccgagaugcugcagaaggaguacauggagagacagggcaagaccccccugggccugguggaccuguucguguucagcaccagcuucuaccugaucagcaucuuccugcaccuggugaagauccccacccacagacacaucgugggcaagagcugccccaagccccacagacugaaccacaugggcaucugcagcugcggccuguacaagcagcccggcgugcccgugaaguggaagagaugaggacuaguaauaaggaaacuguaugaaugucugugggcaggaagugaagagauccuucuguaaagguuuuuggaauuaugucugcugaauaauaaacuuuuuugaaauaauaaaucugguagaaaaaugagaucuaaaaaaaaaaaaaaaaaaaaaaaaaaaaaaaaaaaaaaaaaaaaaaaaaaaaaaaaaaaaaaaaaaaaaaaaaaaaaaaaaaaaaaaaaaaaaaaaaaaa

SEQ ID NO: 39487 - RNA, 1788 nt, Artificial Sequence
  mRNA product Design b-4 (A100) comprising derived and/or modified sequence from LASV(G733-SLE-2010;Clade IV)__AIT17154__GPCmut11 (opt4)
aggagagucccgcagucggcguccagcggcucugcuuguucgugugugugucguugcaggccuuauucaagcuuaccaugggccagaucgugaccuucuuccaggaggugccccacgugaucgaggaggugaugaacaucgugcugaucgcccugagcauccuggccgugcugaagggccuguacaacuucgccaccugcggcaucgugggccuggugagcuuccugcugcugugcggcagaagcugcaccaccagccuguacaagggcguguacgagcugcagacccuggagcugaacauggagacccugaacaugaccaugccccugagcugcaccaagaacaacagccaccacuacaucauggugggcaacgagaccggccuggagcugacccugaccaacaccagcaucaucaaccacaaguucugcaaccugagcgacgcccacaagaagaaccuguacgaccacgcccugaugagcaucaucagcaccuuccaccugagcauccccaacuucaaccaguacgaggccaugagcugcgacuucaacggcggcaagaucagcgugcaguacaaccugagccacagcuacgccggcgacgccgccaaccacugcggcaccaucgccaacggcgugcugcagaccuucaugagaauggccuggggcggcagcuacaucgcccuggacagcggcagagacagaugggacugcaucaugaccagcuaccaguaccugaucauccagaacaccaccugggaggaccacugccaguucagcagacccagccccaucggcuaccugggccugcugagccagagaaccagagacaucuacaucagcagaagacugcugggcaccuucaccuggacccugagcgacagcgagggcaaggacacccccggcggcuacugccugaccagauggaugcugaucgaggccgagcugaagugcuucggcaacaccgccguggccaagugcaacgagaagcacgacgaggaguucugcgacaugcugagacuguucgacuucaacaagcaggccauccagagacugaaggccgaggcccagaugagcauccagcugaucaacaaggccgugaacgcccugaucaacgaccagcugaucaugaagaaccaccugagagacaucaugggcauccccuacugcaacuacagcaaguacugcuaccugaaccacaccaccaccggcaagaccagccugcccaagugcugccuggugagcaacggcagcuaccugaacgagacccacuucagcgacgacaucgagcagcaggccgacaacaugaucaccgagaugcugcagaaggaguacauggagagacagggcaagaccccccugggccugguggaccuguucguguucagcaccagcuucuaccugaucagcaucuuccugcaccuggugaagauccccacccacagacacguggugggcaagagcugccccaagccccacagacugaaccacaugggcaucugcagcugcggccuguacggccagcccggcgugcccgugaaguggaagagaugaggacuaguaauaaggaaacuguaugaaugucugugggcaggaagugaagagauccuucuguaaagguuuuuggaauuaugucugcugaauaauaaacuuuuuugaaauaauaaaucugguagaaaaaugagaucuaaaaaaaaaaaaaaaaaaaaaaaaaaaaaaaaaaaaaaaaaaaaaaaaaaaaaaaaaaaaaaaaaaaaaaaaaaaaaaaaaaaaaaaaaaaaaaaaaaaa

SEQ ID NO: 39488 - RNA, 1788 nt, Artificial Sequence
  mRNA product Design b-4 (A100) comprising derived and/or modified sequence from MOPV/LASV reassortant(IGS-1;Clade IV)__AFY05576__GPCmut11 (opt4)
aggagagucccgcagucggcguccagcggcucugcuuguucgugugugugucguugcaggccuuauucaagcuuaccaugggccagaucgugaccuucuuccaggaggugccccacgugaucgaggaggugaugaacaucgugcugaucgcccugagcgugcuggccgugcugaagggccuguacaacuucgccaccugcggccuggugggccuggugaccuuccugcugcugugcggcagaagcugcaccaccagccuguacaagggcguguacgagcugcagacccuggagcugaacauggagacccugaacaugaccaugccccugagcugcaccaagaacaacagccaccacuacaucauggugggcaacgagaccggccuggagcugacccugaccaacaccagcaucaucaaccacaaguucugcaaccugagcgacgcccacaagaagaaccuguacgaccacgcccugaugagcaucaucagcaccuuccaccugagcauccccaacuucaaccaguacgaggccaugagcugcgacuucaacggcggcaagaucagcgugcaguacaaccugagccacagcuacgccggcgacgccgccaaccacugcggcaccguggccaacggcgugcugcagaccuucaugagaauggccuggggcggcagcuacaucgcccuggacagcggcagaggcaacugggacugcaucaugaccagcuaccaguaccugaucauccagaacaccaccugggaggaccacugccaguucagcagacccagccccaucggcuaccugggccugcugagccagagaaccagagacaucuacaucagcagaagacugcugggcaccuucaccuggacccugagcgacagcgagggcgaggacacccccggcggcuacugccugaccagauggaugcugaucgaggccgagcugaagugcuucggcaacaccgccguggccaagugcaacgagaagcacgacgaggaguucugcgacaugcugagacuguucgacuucaacaagcaggccauccagagacugaaggccgaggcccagaugagcauccagcugaucaacaaggccgugaacgcccugaucaacgaccagcugaucaugaagaaccaccugagagacaucaugggcauccccuacugcaacuacagcaaguacugcuaccugaaccacaccaccaccggcagaaccagccugcccaagugcugccuggugagcaacggcagcuaccugaacgagacccacuucagcgacgacaucgagcagcaggccgacaacaugaucaccgagaugcugcagaaggaguacauggagagacagggcaagaccccccugggccugguggaccuguucguguucagcaccagcuucuaccugaucagcaucuuccugcaccuggugaagauccccacccacagacacaucgugggcaagagcugccccaagccccacagacugaaccacaugggcaucugcagcugcggccuguacaagcagcccggcgugcccgugaaguggaagagaugaggacuaguaauaaggaaacuguaugaaugucugugggcaggaagugaagagauccuucuguaaagguuuuuggaauuaugucugcugaauaauaaacuuuuuugaaauaauaaaucugguagaaaaaugagaucuaaaaaaaaaaaaaaaaaaaaaaaaaaaaaaaaaaaaaaaaaaaaaaaaaaaaaaaaaaaaaaaaaaaaaaaaaaaaaaaaaaaaaaaaaaaaaaaaaaaa

SEQ ID NO: 39489 - RNA, 1788 nt, Artificial Sequence
  mRNA product Design b-4 (A100) comprising derived and/or modified sequence from LASV(LM765-SLE-2012;Clade IV)__AIT17814__GPCmut11 (opt4)
aggagagucccgcagucggcguccagcggcucugcuuguucgugugugugucguugcaggccuuauucaagcuuaccaugggccagaucgugaccuucuuccaggaggugccccacgugaucgaggaggugaugaacaucgugcugaucgcccugagcauccuggccgugcugaagggccuguacaacuucgccaccugcggccuggugggccuggugaccuuccugcugcugugcggcagaagcugcaccaccagccuguacaagggcguguacgagcugcagacccuggagcugaacauggagacccugaacaugaccaugccccugagcugcaccaagaacaacagccaccacuacaucauggugggcaacgagaccggccuggagcugacccugaccaacaccagcaucaucgaccacaaguucugcaaccugagcgacgcccacagaaagaaccuguacgaccacgcccugaugagcaucaucagcaccuuccaccugagcauccccaacuucaaccaguacgaggccaugagcugcgacuucaacggcggcaagaucagcgugcaguacaaccugagccacagcuacgccaaggacgccgccgaccacugcggcaccguggccaacggcgugcugcagaccuucaugagaauggccuggggcggcagcuacaucgcccuggacagcggcagaggcagaugggacugcaucaugaccagcuaccaguaccugaucauccagaacaccaccugggaggaccacugccaguucagcagacccagccccaucggcuaccugggccugcugagccagagaaccagagacaucuacaucagcagaagacugcugggcaccuucaccuggacccugagcgacagcgagggcaaggacacccccggcggcuacugccugaccagauggaugcugaucgaggccgagcugaagugcuucggcaacaccgccguggccaagugcaacgagaagcacgacgaggaguucugcgacaugcugagacuguucgacuucaacaagcaggccauccagagacugaaggccgaggcccagaugagcauccagcugaucaacaaggccgugaacgcccugaucaacgaccagcugaucaugaagaaccaccugagagacaucaugggcauccccuacugcaacuacagcaaguacugcuaccugaaccacaccaccaccggcaagaccagccugcccaagugcugccuggugagcaacggcagcuaccugaacgagacccacuucagcgacgacaucgagcagcaggccgacaacaugaucaccgagaugcugcagaaggaguacauggagagacagggcaagaccccccugggccugguggaccuguucguguucagcaccagcuucuaccugaucagcaucuuccugcaccuggugaagauccccacccacagacacaucgugggcaagcccugccccaagccccacagacugaaccacaugggcaucugcagcugcggccuguacaagcagcccggcgugcccgugaaguggaagagaugaggacuaguaauaaggaaacuguaugaaugucugugggcaggaagugaagagauccuucuguaaagguuuuuggaauuaugucugcugaauaauaaacuuuuuugaaauaauaaaucugguagaaaaaugagaucuaaaaaaaaaaaaaaaaaaaaaaaaaaaaaaaaaaaaaaaaaaaaaaaaaaaaaaaaaaaaaaaaaaaaaaaaaaaaaaaaaaaaaaaaaaaaaaaaaaaa

SEQ ID NO: 39490 - RNA, 1788 nt, Artificial Sequence
  mRNA product Design b-4 (A100) comprising derived and/or modified sequence from LASV(LM776-SLE-2012;Clade IV)__AIT17824__GPCmut11 (opt4)
aggagagucccgcagucggcguccagcggcucugcuuguucgugugugugucguugcaggccuuauucaagcuuaccaugggccagaucgugaccuucuuccaggaggugccccacgugaucgaggaggugaugaacaucgugcugaucgcccugagcauccuggccgugcugaagggccuguacaacuucgccaccugcggccuggugggccuggugaccuuccugcugcugugcggcagaagcugcaccaccagcguguacaagggcguguacgagcugcagacccuggagcugaacauggagacccugaacaugaccaugccccugagcugcaccaagaacaacagccaccacuacaucauggugggcaacgagaccggccuggagcugacccugaccaacaccagcaucaucaaccacaaguucugcaaccugagcgacgcccacaagaagaaccuguacgaccacgcccugaugagcaucaucagcaccuuccaccugagcauccccaacuucaaccaguacgaggccaugagcugcgacuucaacggcggcaagaucagcgugcaguacaaccugagccacagcuacgccggcgacgccgccaaccacugcggcaccguggccaacggcgugcugcagaccuucaugagaauggccuggggcggcagcuacaucgcccuggacagcggccacggcaagugggacugcaucaugaccagcuaccaguaccugaucauccagaacaccaccugggaggaccacugccaguucagcagacccagccccaucggcuaccugggccugcugagccagagaaccagagacaucuacaucagcagaagacugcugggcaccuucaccuggacccugagcgacagcgagggcaaggacacccccggcggcuacugccugaccagauggaugcugaucgaggccgagcugaagugcuucggcaacaccgccguggccaagugcaacgagaagcacgacgaggaguucugcgacaugcugagacuguucgacuucaacaagcaggccauccagagacugaaggccgaggcccagaugagcauccagcugaucaacaaggccgugaacgcccugaucaacgaccagcugaucaugaagaaccaccugagagacaucaugggcauccccuacugcaacuacagcaaguacugcuaccugaaccacaccaccaccggcaagaccagccugcccaagugcugccuggugagcaacggcagcuaccugaacgagacccacuucagcgacgacaucgagcagcaggccgacaacaugaucaccgagaugcugcagaaggaguacauggagagacagggcaagaccccccugggccugguggaccuguucguguucagcaccagcuucuaccugaucagcaucuuccugcaccuggugaagauccccacccacagacacaucgugggcaagagcugccccaagccccacagacugaaccacaugggcaucugcagcugcggccuguacaagcagcccggcgugcccgugagauggaagagaugaggacuaguaauaaggaaacuguaugaaugucugugggcaggaagugaagagauccuucuguaaagguuuuuggaauuaugucugcugaauaauaaacuuuuuugaaauaauaaaucugguagaaaaaugagaucuaaaaaaaaaaaaaaaaaaaaaaaaaaaaaaaaaaaaaaaaaaaaaaaaaaaaaaaaaaaaaaaaaaaaaaaaaaaaaaaaaaaaaaaaaaaaaaaaaaaa

SEQ ID NO: 39491 - RNA, 1788 nt, Artificial Sequence
  mRNA product Design b-4 (A100) comprising derived and/or modified sequence from LASV(Mad39;Clade IV)__ANH09722__GPCmut11 (opt4)
aggagagucccgcagucggcguccagcggcucugcuuguucgugugugugucguugcaggccuuauucaagcuuaccaugggccagaucgugaccuucuuccaggaggugccccacgugaucgaggaggugaugaacaucgugcugaucgcccugagcauccuggccgugcugaagggccuguacaacguggccaccugcggccugaucggccuggugaccuuccugcugcugugcggcagaagcugcaccaccacccuguacaagggcguguacgagcugcaggcccuggagcugaacauggagacccugaacaugaccaugccccugagcugcaccaagaacaacagccaccacuacaucagagugggcaacgagaccggccuggagcugacccugaccaacaccagccugaucaaccacaaguucugcaaccugagcgacgcccacaagaagaaccuguacgaccacgcccugaugagcaucaucagcaccuuccaccugagcauccccaacuucaaccaguacgaggccaugagcugcgacuucaacgacggcaagaucagcgugcaguacaaccugagccacaccuacgccggcgacaccgccaaccacugcggcaccguggccaacggcgugcugcagaccuucaugagaauggccuggggcggcagcuacaucgcccuggacagcggcagaggcggcugggacugcaucaugaccagcuaccaguaccugaucauccagaacaccaccugggaggaccacugccaguucagcagacccagccccaucggcuaccugggccugcugagccagagaaccagagacaucuacaucagcagaagacugcugggcaccuucaccuggacccugagcgacagcgagggcaaggacacccccggcggcuacugccugaccagauggaugcugaucgaggccgagcugaagugcuucggcaacaccgccguggccaagugcaacgagaagcacgacgaggaguucugcgacaugcugagacuguucgacuucaacaagcaggccauccagagacugaaggccgaggcccagaugagcauccagcugaucaacaaggccgugaacgcccugaucaacgaccagcugaucaugaagaaccaccugagagacaucaugggcauccccuacugcaacuacagcaaguacugcuaccugaaccacaccgugaccggcaagaccagccugcccaagugcugccuggugagcaacggcagcuaccugaacgagacccacuucagcgacgacaucgagcagcaggccgacaacaugaucaccgagaugcugcagaaggaguacauggagagacagggcaagaccccccugggccugguggaccuguucguguucagcaccagcuucuaccugaucagcaucuuccugcaccuggugaagauccccacccacagacacguggugggcaagcccugccccaagccccacagacugaaccacaugggcaucugcagcugcggcuucuacaagcagcccggcgugcccgugagauggaagagaugaggacuaguaauaaggaaacuguaugaaugucugugggcaggaagugaagagauccuucuguaaagguuuuuggaauuaugucugcugaauaauaaacuuuuuugaaauaauaaaucugguagaaaaaugagaucuaaaaaaaaaaaaaaaaaaaaaaaaaaaaaaaaaaaaaaaaaaaaaaaaaaaaaaaaaaaaaaaaaaaaaaaaaaaaaaaaaaaaaaaaaaaaaaaaaaaa

SEQ ID NO: 39492 - RNA, 1788 nt, Artificial Sequence
  mRNA product Design b-4 (A100) comprising derived and/or modified sequence from LASV(Z0947-SLE-2011;Clade IV)__AIT17840__GPCmut11 (opt4)
aggagagucccgcagucggcguccagcggcucugcuuguucgugugugugucguugcaggccuuauucaagcuuaccaugggccagaucgugaccuucuuccaggaggugccccacgugaucgaggaggugaugaacaucgugcugaucgcccugagcauccuggccgugcugaagggccuguacaacuucgccaccugcggccuggugggccuggugaccuuccugcugcugugcggcagaagcugcaccaucagccuguacaagggcguguacgagcugcagacccuggagcugaacauggagacccugaacaugaccaugccccugagcugcaccaagaacaacagccaccacuacaucauggugggcaacgagaccggccuggagcugacccugaccaacaccagcaucaucaaccacaaguucugcaaccugagcgacgcccacaagaagaaccuguacgaccacgcccugaugagcaucaucagcaccuuccaccugagcauccccaacuucaaccaguacgaggccaugagcugcgacuucaacggcggcaagaucagcgugcaguacaaccugagccacagcuacgccggcgacgccgccaaccacugcggcaccguggccaacggcgugcugcagaccuucaugagaauggccuggggcggcagcuacaucgcccuggacagcggcagagacagaugggacugcaucaugaccagcuaccaguaccugaucauccagaacaccaccugggaggaccacugccaguucagcagacccagccccaucggcuaccugggccugcugagccagagaaccagagacaucuacaucagcagaagacugcugggcaccuucaccuggacccugagcgacagcgagggcaaggacacccccggcggcuacugccugaccagauggaugcugaucgaggccgagcugaagugcuucggcaacaccgccguggccaagugcaacgagaagcacgacgaggaguucugcgacaugcugagacuguucgacuucaacaagcaggccauccagagacugaaggccgaggcccagaugagcauccagcugaucaacaaggccgugaacgcccugaucaacgaccagcugaucaugaagaaccaccugagagacaucaugggcauccccuacugcaacuacagcaaguacugcuaccugaaccacaccaccaccggcaagaccagccugcccaagugcugccuggugagcaacggcagcuaccugaacgagacccacuucagcgacgacaucgagcagcaggccgacaacaugaucaccgagaugcugcagaaggaguacauggagagacagggcaagaccccccugggccugguggaccuguucguguucagcaccagcuucuaccugaucagcaucuuccugcaccuggugaagauccccacccacagacacaucgugggcaagcccugccccaagccccacagacugaaccacaugggcaucugcagcugcggccuguacaagcagcccggcgugcccgugaaguggaagagaugaggacuaguaauaaggaaacuguaugaaugucugugggcaggaagugaagagauccuucuguaaagguuuuuggaauuaugucugcugaauaauaaacuuuuuugaaauaauaaaucugguagaaaaaugagaucuaaaaaaaaaaaaaaaaaaaaaaaaaaaaaaaaaaaaaaaaaaaaaaaaaaaaaaaaaaaaaaaaaaaaaaaaaaaaaaaaaaaaaaaaaaaaaaaaaaaa

SEQ ID NO: 39493 - RNA, 1788 nt, Artificial Sequence
  mRNA product Design b-4 (A100) comprising derived and/or modified sequence from LASV(Josiah;Clade IV)__NP_694870__GPCmut11 (opt5)
aggagagucccgcagucggcguccagcggcucugcuuguucgugugugugucguugcaggccuuauucaagcuuaccaugggccagaucgugaccuucuuucaagaggucccccacguuauugaagaggugaugaacaucgugcugauugcccucagcguccuggcugugcuuaaggggcuguacaauuucgccacaugcggacucguuggccuggugacguuucuucugcucugugggagauccugcaccacaucucuguauaaaggagucuacgaacugcagacccucgagcugaacauggaaacacuuaauaugaccaugccucugagcuguacaaagaacaauucccaucacuauaucauggugggcaacgagaccgggcucgagcugacgcuuaccaauacaucuauuaucaaccauaaauucugcaaucugagcgacgcgcacaagaaaaaccucuacgaucaugcucugauguccaucauuucuaccuuucaccugagcaucccgaauuucaaccaguaugaagccauguccugugacuuuaauggaggcaagauuagcguucaguacaaccucucucacuccuaugccggcgaugcugccaaucauugcgggacaguggcuaacggaguccugcaaaccuucaugcggauggccuggggcgggagcuacaucgcgcuugacucuggacgcggcaacugggauuguauuaugacguccuaccaguaucugaucauucagaauacaaccugggaggaccacugccaguuuagcagacccucuccuaucggguaccucggacugcuuucccaacggacacgcgauaucuauauuagcagacggcugcucggcaccuucaccuggacacuguccgacucugaaggcaaggauacgcccgggggauacugucugacccgcuggaugcucaucgaggccgagcugaaaugcuuuggcaacacagcuguggccaaguguaaugaaaaacaugacgaggaguucugcgauaugcuuagacuguuugacuucaacaagcaggcuauucagcggcucaaagccgaagcgcagaugagcauccaacugauuaauaaggccgugaacgcucuuaucaaugaucagcugaucaugaagaaccaccuccgcgacauuauggggaucccuuauugcaauuacuccaaauauuguuaccugaaccacaccacaaccggaagaacgagccugcccaagugcugucucgucucuaauggcuccuaccugaacgaaacacauuucagcgacgauauugagcagcaagccgacaauaugaucaccgagaugcuucagaaagaauauauggagcggcaggggaagaccccucugggacucguugaucuguuuguguucucuaccagcuuuuaccugauuuccaucuuccuucaccucgugaaaaucccgacacaucgccacauugucggcaagucuugccccaaaccucauagacugaaccacaugggcaucuguagcugcgggcuguauaagcagcccggagugccuguuaaguggaaacggugaggacuaguaauaaggaaacuguaugaaugucugugggcaggaagugaagagauccuucuguaaagguuuuuggaauuaugucugcugaauaauaaacuuuuuugaaauaauaaaucugguagaaaaaugagaucuaaaaaaaaaaaaaaaaaaaaaaaaaaaaaaaaaaaaaaaaaaaaaaaaaaaaaaaaaaaaaaaaaaaaaaaaaaaaaaaaaaaaaaaaaaaaaaaaaaaa

SEQ ID NO: 39494 - RNA, 1785 nt, Artificial Sequence
  mRNA product Design b-4 (A100) comprising derived and/or modified sequence from LASV(LP;Clade I)__AAF86701__GPCmut11 (opt5)
aggagagucccgcagucggcguccagcggcucugcuuguucgugugugugucguugcaggccuuauucaagcuuaccaugggccagaucauuaccuucuuucaagaggugccccacgucaucgaagagguuaugaacauugugcugaucgcccucagccugcuugcuauucugaaggggcucuacaauaucgccacaugcggaaucauuggccugguggcguuccuuuuucugugugggaaauccugcucucucacgcugaagggaggcuaugaacugcagacccucgagcugaacauggaaacacuuaauaugaccaugccucugagcuguaccaaaaacuccucucaucacuacaucagagucgggaaugagacaggacucgagcugacacuuaccaacacgagcauuaucaaucauaaguucugcaaccuguccgacgcucacaaaaagaaucucuaugaucaugcccugaugucuauuaucagcaccuuucaccuguccauuccgaacuucaaucaguacgaagccaugagcugugacuuuaacggcggcaagaucucugugcaguauaaucucucccacagcuacgcuggggaugccgcugagcauugcggaacaguugccaacggcgugcugcaaaccuucaugcggauggcguggggagggcgcuauaucgcccuugacucuggcaaagggaauugggauuguauuaugacauccuaccaguaccugaucauucagaacaccacgugggaagaccacugccaguuuagcagacccucuccuaucggauaucucggccugcuuucccaacggacacgcgauauuuacaucagcagacggcugcucggcaccuucacauggacccuguccgacucugaggggaacgagacccccggaggcuauugucugacacgcuggaugcucaucgaagcugagcugaagugcuuugggaauacggccgucgcuaaauguaacgaaaagcaugaugaggaguucugcgacaugcuuagacuguuugauuucaauaaacaggccauucggcgccucaaggcggaagcccagaugagcauccagcugauuaacaaggcugugaaugcccuuaucaacgaccaacugauuaugaaaaaucaccucagagauaucaugggaaucccuuacugcaacuauuccaaguacuguuaucugaaucacaccagcucuggccggacaucccugcccaaaugcugucucauuagcaacgggucuuaccugaaugagacccaguucagcgacgacaucgaacagcaagcugauaacaugauuacagagaugcuucagaaggaauacaucgagcgccagggaaaaaccccucugggccucguugacauuuuuaucuucuccacgucuuuuuaucugauuagcaucuuccugcaucuuaucaagauuccgacacacagacauaucgugggcaaacccugcccuaagccccaccggcucaaucauaugggggucuguuccugcggacuguacaagcacccuggcgugcccaccaaauggaagcgcugaggacuaguaauaaggaaacuguaugaaugucugugggcaggaagugaagagauccuucuguaaagguuuuuggaauuaugucugcugaauaauaaacuuuuuugaaauaauaaaucugguagaaaaaugagaucuaaaaaaaaaaaaaaaaaaaaaaaaaaaaaaaaaaaaaaaaaaaaaaaaaaaaaaaaaaaaaaaaaaaaaaaaaaaaaaaaaaaaaaaaaaaaaaaaaaaa
